United States Patent Application Publication US 2026/0092266 A1 - sequence listing, part 18

SEQ ID NO: 2952 - DNA, 5087 bp, synthetic construct
  misc_feature 1..5087: note = Synthetic
  source 1..5087: mol_type = other DNA
tgggctgtgattggcggtgaacgcacgaagttgcaggtggctcaattcaagttggagcacagccgggcatttctgttgcgggcctaccctctgcaaacccacgaaatgctgttcgacgcgcataggattgccgcagctagagaacttaaccgtgtgaaaaaagtaaagcctagacagtttcctgtctaggctttgggtacggacagagtctgtcgactcaatccttattgtagcaacggctctcaccccagataacaacaatcggccttaagattaacacatttatacccaatataatgtaatttatgaataaattagatataaggttcggattagacatcggaattgcctcggttggttgggccgttcttagtcccagacatatcattgatttgggtgttcgctgttttgacaaagctgaaaccgcaaaagaaggcgaatcactcaacttggctcgcagacaagcgcgtttgctacgacgacgtctcttccgaagggcttggcggttgacacaagtcgctcgcatactcaagcgcgaaggcttgattggttcggcaagtttcttcaaacaacaactaggttttccacaggcagaccctgaagacactagcggaaaagaacaagtttttgtcagcacttgggtgcttcgcaaagaaggcttagaccgtttactgacgcaaattgagtgggcgcgtgtaatttatcacttatgcaagcatcgaggttttcattggattagcaaagctgaagaagctgcggcagaaggcgatgcaaaaagcgaagggggacgagtaaaaaaaggattagccgatacagccgcacgcatggccgaaaaaggctatcgcacagctgcggaaatggtgctggccgagtttccagatgcacagcgcaacaaacggggcgattacagcaaagcgttgtcgcgaaagcttcttgatcaagagtttgagcatttatttgaaacacagcgacgtttaggcaacccccacaccagcgatgctttagaagtcttgatacgtggaaacggagaccgcaaaagtggactgttctggagacaaaagcctgcgctttcgggcgctgacttactgaaaatgctgggccgctgcacctttgaacgtactagcggagctgatggaaaaggtgaatttcgcgcccccaaatccagcttcacagcggagcggcatgtatggctcacgcgcctaaacaacctgcgtgtgatggtagacggcatctcacgccccttgaacgagaccgaacaccaagttgcgctgaacttgccttacctaaatggcgaaaaattcacttataaaaatttgcgcgcagccttaatcagagctggattgcccgaaagctttcgctttggtggccttgcctacccaagcgacaatcaaaaagaagaagaaaaagcaaagcacccagaggatcaaattttgatcaagctcactgcttggcatacgctgcgtctagccatgaagaaagcaggtctgcaagatgcttggcagcaaatcggcatggcggcactagacggccagcccgatacgctagatcatatcggatggatattgagtgtttacaaagacgatgatgaggtaagcgagcaattacgcaagttacccttgccacaagcccaaaaaactatctctgcattgctgaacattcgttttgacaaatttcatgcactgtcgctcaaagccttgcgccagatcgtgccgcacatggaacgcggcttgcgctatgacgaagcggtagcaaatatccctgaatacggtcaccacagccaacgcaaactaccagaggaaggcaaggcgctctacctacccccgttttacgaagagcagcgtaaatacaaaggcaaaagtgatcgcattggctcaatggtaattagacaagacattgacttaccacgcaacccggtggtgctacgcgcacttaaccaagcacgtaaagtggtcaatgcgctcatcaaacaatacggcagcccaaccgcagttcatattgaaatggcgcgagatttatcaagaccatttgatgaacggcgcaatatacaaaagctgcaagatgaattcaaagaacgtaaccaaagaatacgcgcggactttgaagcccaatttcaccgcaaacccaacggcaaagactttgaaaaatggatgctctaccgcgagcagggcgggcaatgtgcctactcactgttgccccttgcacccagtggcgactgcaatgagatattcctagaaggtaaaacccaaatcgatcacgcgctcccctactcacgcagttttgatgacagcaaaaacaacaaggtgttggtgctgacgcgcgaaaaccaaaacaaaggtaaccgaacagcctatgaatacctcaccagcttcaccggaggcgaggacggtgatcgctggcgtaactttgtagcttgggtgagtcagaacaaagcctatcgccccgtgaaacgaaaccgtttgttgcgtaagaactacggagctgaagaagccaaaggcttcaaagaccgaaacctcaacgacacgcgctatatatgcaagttcttcaaaaattacatcgaagaaaatttgcacctagcaagcaatgtagatggcgaaaccaatcaacgttgcgtggtggtcagtggccagctcacggcatttttgcgcgcacgttggggactgctaaaagtacgagaagaaagcgaccgccaccacgcactagatgctgccgtggtggctgcgtgcagccgcggcatggttaaagcgctggccgactactcacgcatcaaagaagtggagtttctgaaagagggcttccctgatccagaaaccggtgaaattcttaacccagccgcatttgaccgtggtcgtcgacatttcccagaaccttgggcacatttccgtcatgaattagaagcacgccttaaaaccgacgacttagccgccttgcgtgaagacatgcaacgcctaggcacctatagtggaagcgatttgcaacaactgcgcaccttgtttgtgtcgcgtgcaattcaactgagaggtacaccggaaatccacaagggcacactcaggtcaccgaaatacataagcgagcagaaatccactgttcgcatccccctttccgaactgaccattaataaacttaacggcatagtggaaggtcatggtcgtaataaaccgcttgtggattcattgcgtgaaagactcaaggcacacgacgatgacccaaagaaagcatttgctacgccgttctacaaaccctcctcaaagaagaaaactgcccctcaagtgaactccgtaaggattatttcgacgcaaagaacaggacttcaactcaagaacgctatcgctgatctaggaccaatgatgggagtcgatgtgtatcgcattggaaaagaattcttcttcgaccctgcgtaccctgcacgtgtaagcgcacgcttaaacgtaaagaaaattccggaagaagcacagtttttatttttccttacgaaaaatcacttcgttcaaatcgaaatcggaggcgaaatcactcgaggctattttgtgatgtttgaatcagacggcaggatgacattgcgcgcacatgaccagccaaagggcgataagaaattttttcgtaaatcagttaccgcagcaataaacattattaaattcaacgtcgatcttctaggccacatctaccctgccccgccggagcaacgccgtggtttggcgtagcgttgtcatcagccaacccgccaagctcaagcgcgagcatttcgcgctggtggtggagcaaaaagaatcggcccgtgtgccatttgaggacattgcagtgatcgtgcttaaccaccgtgaaatcacgatcacccaccctgtgctctcggcttgtgccgaatatggaattagcctcttcagcatgggtagcaaccaccaaccgaatggcgtgtttttgccttttttgcaacacagccgcgccacgcgaatgcagcggctgcaactcgatctggacaagcctacggccaaacgcgcgtggaccactatcgtgcaaagcaaaattcgcaaccaagcgcagtgcatgaggctgcgcatcgtaagtgaccctgcgcgtttggactcttacgctcgtcgtgtgcgctctggcgacaccggcaatatggaagcgcaagcaagcgcctattacttcccgcaactgtttggccgcagctttcaccgcagccaagcggtttgggttaatgccgcgctggactacggctatgccatcatgcgaggcgcttgcgcccgcgcgctggtagcccacggcatgttgcccagcattggcttgttccacagtagcgaacaaaatgcgttcaatttagcggatgacttgatcgaaccctaccgccccatcgtggacttgtacgtcgcggaacaaataccgccaatggacagcgatgacctgcgcccagccgacaaactcggcttgatcgccctgctcaatgtggatgtggtcatgccgcgcggcaccatgagtgtgttggcctcagtagagcaagccgccgaatcactggcgcgtttgtttgacggtggtagcgaacaggcgctggagttgccaaggttgttgcgtttgaaccggcatcggttcgagatgtaacggttatccatgccgtacagccatgagtcaagacacaagacggtttatgcggattttggtgttctctgatttgccagttgtcagcaagaccgatagaagggcctacaccgtatttcgtcgctttttacttaacgacggctacgacatgattcagttctcggtttacgggcgcatcctcaacggcaacgatgccgtggacaagcacatgaaccgcctggtgaacaacctgccacctgccggatcggtacgcatgttgaccgtcacagagaaacaatttgccagcatgaagctgctggtcggcctgccgctttttcaagaaaccaaggttaacgcagcccaaatcgccttgttttaaagtgttttctcagaacgaaaacctgcgccaagctaagtttgacgcaggtttcgaaaggagtgagtgtagctatccggggtgagagagggagctacaacatgaaacgcgtgtttggtgtgcgccatctaagtgtagctat

SEQ ID NO: 2953 - DNA, 5086 bp, synthetic construct
  source 1..5086: mol_type = other DNA
  misc_feature 1..5086: note = Synthetic
ctattcgaatcgcagagtctagcgcatcgccaaagctcgtttgtggcgctcgacccggcccgtttgaatctgtaggtcggtttcccggacgaattgaacacttggaagcggccgttcgcggtactagaggtatccgatttccacgattactctgatgttgtgcaatggcgtaatgaaggcggcttcctaaatctggccaaacatcctggccaatttcggcgatgaagtagcgtttagaaaatcgtaagatttgaagtgaaaaggcccgacaggcaagcctgtcgggccggatacggtcgccacccgagggtggctaccttattgcagcaacggctctcaccccggaagactacaatgacgatattgtatccacgatgggtgccgctatgcaatcagaaaatcttccctataccatagggctcgacatcggtattgcatctgtcggttggtgcgtactaggcgaaaaccgtatcatcgacctcggtgtccgcgccttcgacaaggccgaaactgccaaggaaggagattccctaaatctcattcggcgcacagccagactcatgcgacgccgtttgcgacgccgggcctggcggctgactaaactggcaagactgctcaagcgacaacttctgattgatgacatcggcctgttcaaagagcagcgcacattccctctatcaccgtggcaattgcgcgtcgaaggccttgatcgtcaactcgatagcgaggaatgggcacgcgcgatctaccacctctgcaagcaccgtggcttccactggattagccgtgccgaggaaaagcaggcagatgaggatagcaagggtgaagggggcaaggtcaagcaaggtcttgccggcacagcgaagctgatgaaggagaaaggctatcgtagcgctgcggaaatggtcctgatcgagtttcccgaggcgcaacgcaacaagcaggggggctatagcaaagcactctcccgtgttctgctgggtgaggagctttccctgctgttcaagcgccagcgggaacttggcaacctcattgcgggccaggaacttgaggtggcaatcctcggtagcggcgacaacaagagcggcctattttgggcgcaacaaccggctctagcgggcgacaaacttcttgaaatgcttggtcgctgcacgttcgagatacccggcggtcctgatggcaaaggcgaataccgcgcacccaaggccagcttcacggccgaacgccatgtctggctgacacgactcaataacctgcgcatcgtcgttgatggcagcacgcgcccactgaacgagcaggagcggagaatcgccctgcccctgccttacagccaagtcggcgacttcacctacaagcaacttcgtagcgcactggtgaaggcgagcgccttgggcgacgcattccgattcgccagtttttcctatgcccagcagcccgatggcaaagcgaaagacccggaaacggctgtgctggtaaagcttccagcttggcaggaattgcgactcgcgctgagaaaggctggtctggaaaccgaatggcaggggatggccggtgccgccgcggacggcagaccggaactgctggataacattgcatgggtattgagcgtattcaaggacgacgaagaaaccatcgccgagttacgcaaactccccctgcccaatacagagaagatgattgacgcactgctggattgcccacgcattgcgttcgccaaattccacgccctttcgttcaaggccctgcgccggatcgtgccactgatggaaactggcctgcgctacgatgaagccgtggccgcgattcccgactacggccaccacagccagattcacaaggtcggcgaaggcgaacacaagtatctgccacccctctactccggccgtgacaaggacggccgcatgatattcagcgaggacatggatgtaccacgcaatcctgtcgtgctgcgcgcgctgaatcaggcgcgcaaggtggtcaatgcgctgatccgcagttacggttcaccaggcgccatgcatatcgaaatggcgcgggatttgtcgaagcccatcgatgaacgcaggaaggtcgaaaaagatcaggccgaataccgggatagaaacgatagggacaaaggcatgtttgccgaacagttcggtcaaccgccaaatggcgtggagttcgaaaaatggcggctctatcgggagcagcagggaaaatgtgcctactccgtcgaaccgctggatctccatcgactgctggaacccggctacgtcgaagtcgaccacgcgctgccttattcccgcagttacgacgacagcaagaacaacaaagtgctggtgctcacaaaggaaaaccgcgacaagggtaaccgcacgccctacgaatatctcggcggcgatgaaggtagcccgcgctggcgtcaatatgccgctttcgttgaaggcaacaaggcttatcgcctcgccaagcgtagtcggctgctgcgcaaacttttcggtaaagatgaatctgaggaatttcgcgaacgtaacctaaacgacacccgatacatctgcaaattcttcaagaactacatcgagcgctacttgctattggccaaaggcagcgagtcgaagcgctgcgtggttctgagcggccaactcacgtccttcctgcgcgcccgctgggggctgatcaaggttcggtctgacaacgaccgccaccatgccctcgatgccgccgtggtagctgcatgtagccatcgcatggtccaaaatctctccaactacgctcgacgcaaggaactggaaaaggtccgagcgggattcgtcgatatggaaaccggggagattatcgatccggcaatgttccagcaactgcggcagcatttcccggagccctggccgcatttccgcgccgaactcgaagctcgcctaaagatcgacgatccggttgtgctgcgcgagaatatggaacggctgggcacctaccggcccgaagcgttggaagcgctgcggccattgttcgtttcccgcgcgccacagcggcgcaacggcggtgccgcgcacaaggacaccatttacggccaaccggaacggttgaaggcgcagggcggtgtaacgcaaaaggtgtcactctctgatctgaccctgaaagacctcgacaaattgatagacccgcaccgcaacgaaaaactctatgccgccatccgcacccagttggaagcgcacggcggcaagggcgacaaagcgtttccgtcagtcaatccactacgcaaacccgaccgcgacggcaatccgactggccctatcgtgcgaaccgtgacgatggtaatcgacaagctgtcaggtattccggtgcgcggcggaatcgcaaagaacgacagcatgttgcgggttgatgtgttcaccaaagctggcaagttccatctggtgccggtctatgtacatcacacggtagcagatgtgctgccaaatcgggcgattgtcgcattcaaggatgaggatgaatggacattgatcgacgacagtttcaatttttgtttctcgctgtatcctaatgatctggtgcgggtcacgctcaaatcagaagcccatcttggatactatgcaagttgcaaccgatcaaccgccgcagtcaatctttgggttcatgacaggaacgttaatattggcaaagacggaatgattcagagcatcggggtgaaggtcgcgcgctcaatcgataaattcaacgtcgacgtcctgggcaacatcttccccgccccaccggagacacgtcgtggtctggcgtagcgtcatgatctcccgccccgccaagctgcgacgggagcatttttcactggccatcgagcaggaagagacggccttcgttccgttcgaggacatcgcagtaatcgtcctcaaccaccgagaaattaccctcacccatccggtgctgtccgcttgcgccgaatacggcatcggtctttttgccacaggcagcaaccaccagcccgccggcgtcttcctaccatttctgtctcattcccgcaccacgcgcatgatgcggctgcaactcaacatggccaagcccctggccaaacaggcctgggccggcgtcgtccggcgcaagattgaaaaccaggctgtctgtctcagattttgtggcaaggagggagtggatcgtttggcatcatacgtccgccgtgttcgttctggcgacccggataatctggaagggcaagccgccgccttctatttcacccaactgttcgggcaggggttctatcgggccgaggaccgctggactaacgccgccctaaactacggctacacggtgctgcggggggccatcgcccgtggccttgtcgcacatgggttgcatcctactgtgggccttttccatgacagcgagcagaacgccttcaaccttgccgatgacctgattgagccattccgccccatcgtggatttgcacgtcgccaagcatccggcgatgaccgaaggcgatctgatgccggaagacaagtctgcccttgtcgctttgctcaacgttgatgtcgccatggcgcagggccggatgtccgttttgtcggctatcgagtatgccgtggaaagcctggtgcgcgtattcgaagaaggtgccaacgaacttcacctgcccacgctcattggcttacagccgcaccggctggagtgttgaggcgtgggcgttgagacgcggcgatacatgcgattgctcgttttcttcgatctgcccatggttaccaaggccgaaaagcgggcctatgtgcagttcagacggtttctccttaacgacggctacgacatgatccaatactcggtctatgggcgcatcctcaacggcaacgatgccgagactaagcatctgcggcgcctggctgacagtctgccaccggaaggctcagtacggagcatgaccgtcacggagaagcagtacgccggcatccgcctactggtgggcatgcccctttttcaggaaaaaaaggtcggcgtcgcccaaatgctgctgttttgagccggaaaatcaaagaggaatccccgcccagggtaagctgggcggggatttgaggacagtcagattgtagtcttccggggtgagagagggagctacaaccgaa

SEQ ID NO: 2954 - DNA, 4980 bp, synthetic construct
  source 1..4980: mol_type = other DNA
  misc_feature 1..4980: note = Synthetic
gccttgatgaatcgtcttgcctcgcatcggaatcagcgtgtcagggttggctatggtcaaattttatcgcctcgcccgcttgggcggggtttttcaacggcctactaatgcagttgggcttcacctcgttcgctgtgatccacttaccgcggaacttacatccgcagggggcggccatgctcggcgcatataaaaaagcccgacaggtttccccgccgggctttcggattcggtcgtccccgaagggacaccttattgtagcaacggctctcaccccggaaagctacaaaaaggcgtattctaccctttttgaataatgacgggagaatttatgccactgccgtacaccctcggtctggatatcggtattgcatcggtcggatggtgtctgttaggcgaaagtcgcatcattgatctaggcgtgcgcgccttcgacaaggctgaaactgccaaggaaggcgaacccttgaacctgacccggcgcttggcaaggcttgcccgccgccgcctcgcccggcgcgcctggcggctcaagaaactgacccgcgaactcaagcgccacggtttgatcgacgacaaacgctttttccagccgaccaacccaacatccgtttcaccttggcaactgcgcgttcaaggcctcgaccgaaaactggaacctgacgaatgggcacgggtcatctaccacctgtgcaagcatcgcggctttcactgggtcagtcgggctgaggaaaagcgggctgagggcgacgccaagagcgaaggcggcaaggtcaaacaagggctggctgctacccgacgactgatggaggaaaagcgttaccgcaccatcgccgaaatggtgctggttgagttcccggaggcgcaacgtaacaaacaaggcgaatataccaaggcgctctcgcgtgttctgctcggcgacgaactcaagcaactctttgcgcaacagcggaatcttggaaatccctttgctacggaagccttggaagccctcattctcggtaacggcgaccgcaaaagcggcctgttctggcagcagaaaccgccgttgtcgggggctgatctgctcaagatgctcggcaaatgcaccttcgagaagatggaataccgtgcgcccaaagccagtttcaccgccgaacgccatgtctggctgacgcgactgaacaacctgcgcatcgtcatcgatggtgtcacgcgcccgctcaccgacgcggagcgcggactggccttgccactgccctatcaacaagccagcgacttcacctacaagcaactcgctactgccttgcacaaagccggcctgctgccgaaagacggcttccgctttgccggtttgtcctatcccagcgaacagcaaaaaaccgaaggtaaagccaaggatccggaaagcgctgcactggtcaaactgcctggatggcaacaactccgcaccgctttcataaatgccgggctagaaaccgagtgggggagcctggcggcggccgctttcgacggccaaccggaaaaattggacgaaatcgcaaaaattctcagcgtctacaaggacgacgacgaagcccgcgccgaactcgccaaactcccgctacccaatcccgatcacttgatcgaggcgctgctcgacatccgcttcgacaagttccatgcgctctcactgaaagcactgaacaaaatcgtgccgttgatggaaaaaggcatgcgctacgacgaagccgtcgccgcgattcccgaatacggccaccatagccagttgcacaagccgggcgaaggccagcacaagaccctgccgcctctctacgccgggcgcgacaaggaaggccgcatggtctttgccgacgatgccgacatcccgcgcaacccagtcgtactgcgtgcgctcaatcaggcgcgcaaggtcgtcaacgctatcgttcgccgctacggctcaccgatggcggtcaacatcgaaatggcgcgcgacctgtcgcggccgctggaagagcggaacaagatcaaaaaggagcaggacgagtatcggatccgcaatgaaaaagaccgtgcgctgttcatcgaggaatttggccagccaccaaagggcggcgaattcgaaaagttccggctctatcgcgaacaacttggcaaatgcgcttattcgcagcaggccatcaatctcgaacggctgctggagcccggctacgtcgaaatagaccacgcgctaccctactcgcgtagcttcgatgacagcaagaacaacaaggtactggtgttcgccaaggaaaaccgcgacaaaggcaatcgcaccccctacgaatacctcggcggcgccgagaatagcgtgcgttggcagcaattcatcgccttcgtcgagtcgaccaaagcctaccgcctcgccaagcgcagccgtctcctgcgcaaggatttcggttcgaaggaagctgaggaattcaaggaacgcaacctcaacgacacccgccacatctgtcgcttcttcaagaactacgtcgagcgccacctgaagatggccgaaggcagcgaggccaagcgttgcgtcgtcctcagcggccaaatgactgccttcctgcgcgcccgctggggcatcaacaagatccgcagcgaaagcgaccgccaccatgcgctcgatgctgccatcgtcgccgcctgcacgcacagcatggtcaaacggttggcggaatattcacgcaccaaggaactggctcaggtcagcaacggatttgtcgacaccacgaccggtgaaatcgtcgatccagcaatgttccgtcaactcaaacagcacttccccgaaccctggccgcacttccaccatgaacttgaagcacgcttgaaaatcgacaacccggcagtattgcgcgaagaaatggcgcgactgggcagctacgacaccgccgcgctggatgcactacgtccaatcttcgtttcgcgtgccgtacaacgccgcaacaacggggcggcacacaaggaaacaatctacggtcaaccgaaaaaaatgcgcgaaaggggcagcgtcactcaaaaggtgccgctcgccagcctgacgctgaaggacctcgacaatctgatcgacccgcaccggaacgaaaaactgtacgccgccatccgggaacgtcttgaagcccatggcggcaagggcgacaaggctttccccgccaccaacccgctgcgcaaaccggatcgcaaaggcaacccaaccggccccgtggtgcgcacggtcacgctggtcatcgacaagctttccggcattcccgtccgcggcgggattgccaagaacgacagcatgttgcgtgtagatgtcttcagcaaagccgggaaattttatctggttccggtgtatgtccatcatcgggttaccggactaccgaatcgagcggttattgcctacaaggacgaaagcgaatggacccaaattgatgacacttttacctggtgcttctcaatttaccccaacgacctgatccgaatttcactgaagaaagagtcgcattttggctattacgctggatgcaatcgggcaaccggggcagtagccatatgggttcatgaccgaaatcatgctgtaggcaaggccgggtttatagaaggaattggcctcaaaaccgccctgaacgtcgaaaaattccacgtcgacaccctcggcaacatccaccccgccaaaccggagccacgccgtgggctggcgtagcgtgatgatttcccggccggccaagctaagccgggagcatttttcgctggccatcgaacaggagcaaaccgccttcgtgccgtttgaggacattgcggtcatcatcctcaaccaccgcgaaatcaccctgtctcatcccgtcctttcggcctgtgccgaatacggtatcgggctttacgccaccggccacaaccaccagccgagcggcgtattcctgccttttctgtcgcattcacgcaccacgcgcctgatgcgaaaacagctcgatatcgggagaccgctggccaaacaggcctgggccaacattgtccggcgcaagatcgaaaaccaggcgaattgcctgaatctgtccaaacgaaacggcgcggctcgcctgacctcctacgccaaccgcgtccgctcgggcgacccggacaatctggaaggccaggccgccgcctattacttcgcccaactctttggccaaggcttctgccgcgccgaagaacgctggaccaacgctgcgctggattacggttacgccgtttttcgcggagccatcgcccgtggccttgtcgcccacggcctgcatccgcccatcggtctattccatgccagcgaacaaaatgctttcaatcttgccgatgatctgatcgaaccattccggccgctggttgatctccatgtccataagcaccacgctgtaactgacggcgatctttcgcctcaggacaaggcatcgctggttgctttgctgaatgtcgatgttgccatgccgcaagggaagatgtcggcactttccgcgatcgaatatgcggtagagagcttggcgcgcctctacgaacaggacgacagcaacctcgacctacccaagctgatcggcctacatgcgcacgtgctggaatgctgaggcatgagcaaggagacgcgacgtttcatgcgactgatcgtcttcttcgacctgccgatggtcaccaaaaccgaaaagcgtgcttacgtacaattccggcgctttttgctcaacgacggctacgacctgatccagtggtcagtctatggtcgcctgctcaatggccacgacgatcaggaaaaacacctcaaacgtctggccgacaacctcccccccgccggctcggtacgctgtatgacggtgaccgaaaagcagtttgccggcatcaagctcctcgttggcatgccactttttcaggaaaaaaaggttactgcaaaccaattgctgcttttctgacagccgatttccggaaaaaatttcccgcccagcgcttgaaaatcgacaacccggcagtattgcgcgaagaaatggcgcgact

SEQ ID NO: 2955 - DNA, 4826 bp, synthetic construct
  misc_feature 1..4826: note = Synthetic
  variation 1869..1870: note = note, n is a, c, g, or t
  source 1..4826: mol_type = other DNA
atctgggacatcgccgccatcaccgccttcttcggcctgtccaaccgcatggccaacttcagccacatgctgcccaaccccgagttctacctgctcggccgcgtgccgagggaaaaaaaaccgtcataggcaccaacggaagccggcgtgccgctacgcacaaggaagccacgcggatcgcggagaaagggaaaggcctgacaggttgccccgtcaggcctttgggtacggacggggtctttcgacccctccttattgcagcaacggctctcaccccggataaccacaatcgggacagagtatagcaagagggaatttcatgacgcactacgtgtttgggctggacatcggcatcgcctcggtcggctggtgcgtcctcggtgaagaacgcatcgtcgacctgggcgttcgcgctttcgacaaggcggaaaccgccaaggaaggcgattccctgaaccttgtcaggcgccaggcccgcctgatgcgccgccgcctgtatcggagagcctggcgcctcaccaagctggcccgcctgttgaagcgccatggcctgattgacgccttaggagccttcggaccagagaaccccacccgtacctcgccatggctgcttcgggttgcaggactggaccgcctgctgaccagggatgagtgggcctgcatcatctaccatctttgcaaacaccgaggcttccattgggttagccgggccgaggaaaaggcagcagaaggcgacggcaaaagtgaaggcggccgtgtaaagcaagggctggcgggaactgccaagttgatggccgagaagaactatcggaccgccgccgagatgatcgtgaccgagtttccttacccagacgcccagcgcaacaagcaaggtgactatggcaaggcgctctcccggcttctcctgagcgaagaactcggcctgctcttcgcccgccagcgggcgcttggcaactcccacgccgacgcagacctggaagcgctcatactgggcaatggcgaccgacgcagcggcctgttctgggcgcagaaacctgcgttgtccggcgccgacctcctcaagatgctcggcaaatgcaccttcgagaaaggcgaataccgcgcccccaaggccagcttcaccgccgagcggcatgtctggctcacccgcctgaacaacctgcgggtcgtggtcgacggccagacccgcgccctcaatgaaacagagcggcgcctcgccctgccccttccctaccagcaagccggcgactttacgtacaagcagttgcgtaacgcccttgtgaaagcgggcttcctgcctgacgacgcccgtttcgccggcctctcctaccccagcgaggcgcagaagaccgagggcaaggctaaggaccccgaagcggccgccctggtcaagctgccggcctggcaggtgctgcgccagaccttaaagaaggccgacctggaaaccgaatggcagggcatggcgggtaccgccatgggcggcgaccccgggctactggacgaaatcgcccgcgtcctcagcgtcttcaaggacgacgacgaggtgcgcgctgaactgagcaagctgcccctgcccaacccggagaagatgctcgaagccctgctcgacatccgcttcgacaagttccacgccctgtccctcaaggccctgcgcaacatcgtgccccacatggagcgcgggctgcgctacgacgaggcctgcgtggaggccggctaccaccacagtcagcttcacgttgttggtggcggatcggacaaatacctgcccccgttctacgccagccgcgacaaggacggccgcatggtcttccgcgacgatgccgacattccccgcaacccggtggtcctgcgcgccctcacccaggcccnngccaagcacctgtacctgccgccgttctaccaagaccagcgaaagtacgaaaacaaaagcgaccgcgtcggctcgatggtcttccgcgaagacgccaacatcccgcgcaacccggtggttctgcgcgccctcaaccaggcccgcaaggtggtcaacgccatcgtccgcaggtatgggcagccccagtcggtccatatcgaaatggcccgcgacctttcccgccccctggacgagcggaacaagatcaagaaggagcaggaggaataccaggtccgcaacgaacgggatcgcacccagttccaggatttgttcggctacccgccttccccccgggaattcgagaaatggcgcctctaccgggaacagaactgccaatgcgcctactcgcagcgtcccctcgcccccaacggcaacgtggcggaaatcttcgccgccggcgccaccgaagtggatcacgctctcccctattcccgcagcttcgatgacagcaagaacaacaaggtactggtgttggccaaggaaaaccgcgagaagggcaaccggaccccctacgaatatctcaaggccgtcgacggctgcgaaaacggggagcgctggcgcagcttcgtggcctacgtggaagccaacaagcaatatcgcatggccaagcgcagccgcctgttgcgcaaggatttcggcaagaaggaagcggaggaattccgggagcgcaacctcaacgacacccgttttatctgccgcttcttcaagaactacgtggagcgccacctgcaactggccgaaggcagcgaagccaggcgttgcgtggtcgtcagcggccaactgactgcctttctgcgtgcccgctggggcctgaacaaggtgcgcagcgacagcgaccggcatcatgcgctagacgccgctgtcgtcgcagcttgcagccaaggcatggtgaagcgcctttccgactacgcccggcgccgggaactcgatcaggtccgcgaggggttcgtcgatgtggaaaccggggaaatcgtcaatccggccatgtaccagcaactgcgagagcactttccggacccctggccccatttccgcgacgagttgaaggcgcgtctccatatcgattccacccccctgctgcgagaggaaatcgaccgcttcggcacctacccggaagaagccctggccgccctgaagccgctctttgtttcccgcgcgccccagcgccgcaacggcggggccgcccacaaggacaccatctacggccaaccggagcgactcaaggcacaaggcggcgtcacccagaaggtccccttgtccagccttacgctgaaagacctcgacaagctcagcgaccccgggcgcaacgccgccctttacgaggccatccggctacggctcgaagcccacggcggcaagggcgacaaggcgttcccacccggcaaccccttgcgcaaaccgggcaagctcctgaacagggagaccggcgaacgcggtccggatggccccatcgtccgcaccgtcaccctggtgatcgacaagctatccggcatccccgtgcgcggcggcatcgccaagaacgacagcatgttgcgggtggatgtattcagtaaggcggggaaattccacttggtaccggtgtatgtgcatcacatggtagcgaaagcgttgccgaatcgggcaatcgtggcattcaaggatgaggaggaatggacaccggttgatgagagtttcgagtttaggttttccctgcacccgaacgatcttgttcgcgtccggcagaaagggaaagcaccgattctcggctattactccagttgtcatcgaggaaccggcaacataaacatatgggcgcatgaccgaagccagcaagtcggcaaagacggaatgatcgagggaatcggtgtaaaaactgccctaagtctagaaaaattccacgtcgacgtcctcggcaacatctaccccgccccaccggagaagcgccgtgggctggcgtagcgtcatgatctcccgccctgccaagttgcggcgggagcacttctccctggccatcgagcaggagcagaccgcctatgtgcccttcgaggacattgccgtcatcgtcctcaaccaccgggaaatcaatctcagccatcccgtgctttccgcctgcgcggagtacggcatcggcctctactccaccggcgacaaccaccaacccagcggcattttcctgcccttcctttcccattcccgcaccacccggctgatgcgcaagcagctcgacatcgcccgccccctggccaagcaggcctgggccaacgtcgtccggcgcaagatcgagaatcaggccgcctgcctgcacctgtgcagaagaaagggggccgaccgcctggaatcctatgcccggcgggtccgctccggcgacgtcgataacctggaaggtcaggccgccgcctactatttcgcccagttgttcggacaaggcttccatcgggcggaggagcgctggaccaacgccgccctggattatggctacgccgtcctgcgcggcgccatcgcccgcgggctggtggcccacgggctccaccccaccctcggcctctttcacgccagcgagcaaaacgccttcaacctggccgacgacctgatcgaacctttccgccccctggtggacctgcacgtctacaagcacccgcccgcagtggaaggcgaactggcgcccaccgacaaggccgaattggtcgcccttctcaacgtcgatgtcggcatgccccaggggcggatgtcggcgctatccgccatcgagtacgccgtcgaaagcctcgcccggctctacgaggaaggcgacagcgacctacatcttcccaccctcatcggcctggaggcccaccggctggagtgctgagccatgggcaacgagacgcgacggttcatgcgactgctcctgttcttcgacctgcccatgaccaccaaggccgaaaagaaagcgtacgtc

SEQ ID NO: 2956 - DNA, 4219 bp, synthetic construct
  misc_feature 1..4219: note = Synthetic
  source 1..4219: mol_type = other DNA
gcaaaagcgcgcccaccacttgcccgttgcgcaacttggtatttgctctaactgcacaaaatgtaggggatctcaaatgtaaagaacccgcacgaggcgggttcggtttcatgcgcaggggtttccccctggctttattgtagtaacggctctcaccccggattgctacaatgcgaaggagtatattattaaaggaacttaaatggaactcccgcaacaatgctacacccttggcttggatatcggcatggcctctgttggcgcagcgctgcttgccgacggccacatccacgccctgcatgtgcgcgcttttaatgccgccgaaacagcgaaagaaggcgaatcactcaacaatatccgccgcgaagcaagactcacccgccgccgtattcgtcgccgcgcccatcgtctgctgcggctgcgtcgcctgttcaagcgcgaagggctgatcgcaagccacgccgccgaagccttatctacccccgtgtctccgtgggatctgcgcgcgcaagggatcaatcaacggcttgccccgcaagaatgggccgccgcgctctaccacatcgtcaagcatcgcggctttcaatccaaccgcaaaagcgaggccaaagccgacgaaaaagccggtcagatgctctccggtgtcaccgccaaccaaaaccgcatgagcgaagacaactggcgcacggtgggcgaaatggccgcacgcgatgaaacctttgcccatgccaagcgcaacaaaggcggcgactacagccacactttcgcccgcgcagaccttgagcatgaactcaaaacgctattcgccgcccagcgcacacttgcaaacccgcatacttcccccgccttagagcaagccgtgcatacgctactcatggcgcgccgccccacgctatcgggtgaaaacctgctcaagatggtcggcaaatgcaccttcgagaccaccgaataccgcgcccccaaggcgagccacaccgccgagcgctttgtctggctcactcgcctgaacaacctacgcatcaacgatcagggtgaaacgcgcggattacatgacgaagagcgccaagccatcatccatctgcccttcgtgcaagccaaaattagctacaaacagctacgcagcaaaatcggcctgagcgacaccgcccgttttatcggcgtggactactggaaaaagcgcaaagaaggcaatgaactcgccgccgaggacgcggcattatttgaagccaaagccttccaccttcttcgcaaggcgtatgaggaagccggcctgaaaactgaatggacgcgggatgccgccaaccccgaccgactggatgcgctggcctatgcccaaaccgtattcaaggacgatgccgaagcccgcgactggatgcagcagcaaggcatcgaacctaccatcatcgaagccgtactcacggtttctttcagcgacttcatccgcctgtccatcaaggcgctgcacaacatcctgccctatatgcaagccgggcaacgttacgaccaagccgtccaatcagcaggctacgcccaccacagccagcttcacacagaggacaacaaaaaaccccgcctgccgccgatcagtaaagaggactaccccaaccccgtggtttatcgcgccctcaaccaagcgcgcaaactggtcaacgccatcatcgacgagtatggcgcacccaacgaggtgcatatcgagctggcacgagatttaagcaaaccttgggatgagcgaaaaaaaatcgagcgcgaacaaaaaggctttgctgaacgcaaagaaaccttggtcacaaaattccgcgaacgcttcgacagcaacccgcgccgcgatcagctcttaaaaatgcgcttgtacgacgaacagcaagcgcattgcgcctacagtcaaaagccgctggatcttggccgcctgctggaagatggttatgccgaaatcgaccacgccctgccctattcgcgtagctttgacgacggcatgagcaacaaagtgctagtgctcaccgttgaaaaccgcaacaaaggcaaccgcaccccgtatgaatacctagacggcgagcaaaacagcgagcgctggcgcagcttccaagccttcgtgcagggcaataaaagctatcgccaagccaaacgcgagcgcctgctgcgcaaagactttagcgacaaagctgccgaaggcttccgcgagcgcaacctaaacgacactcgctacatcgcccgcgccttcaaaaccctggtggaacagcatctgcaactggccgaagattctgaaagcaagcgttgcaccgtcgtttccggccaactcaccgcctttttgcgcacccgctggggcttgaacaaagtgcgcgagaatggtgacctgcaccacgcgctggacgccgctgtggtcgcagccgccaaccatcgcatggtcaagcggctggcagactacgcgcgccgcaaagagcttaatcaggcacgcgaaggctttatcgatccgcagagcggcgaggttttggacatcgccgctctacgccaactcgaagccgcctttcctgcgccctggccacactttcgcgacgaactccaagcctggcttagccccgaccctgccttgcatcttgagcatgtttcaaactacgacaaggcgcgggcacaaaccatcaaccccatccgcgtatcccgcgccccgctgcgtcgtggccttgggcaagcacatcaggaaaccatccgctccgccaagctgctcgatcaaggcatgagcgcggtcaaaacaccgctggaaaacctcaaactcaaggacattgaacgcatcgtcggctgggacgacccgcgcaatgaaaagctgatcgaagccatccgccaacgcctgatcgcccacggcgacgatggcaaaaaagcctttaaggagccgttctacaagcccagtaagccgggcaaggccgcgccgctggtgcgcacggtcaacctgactgacacgcaaaaaagcggcattcccatacgcggcggcatcgccaacaacggcgccatgctgcgcgtagacattttcaccgacggaaagaagttccacgccgtaccgctgtatgtggctgatgtggtcaaaccggcattgccgaatcgggcggtcatggcctacaagcccgaagatgaatggacggtgatggatgagaactaccgctttctgttcagcctgcatccgaatgattgggtcaaaatatcattcaaaaaggactcggctaaagagggttacttttcagggctaaaccgcgccacaggagccatttctatttggacacacgaccgcagcaaccttaatgggaaaggaggttttcttgatggcatcggaatcaaaaccgccctatccgtcgaaaaataccatgtcgatctactcggtcgcctatacccggtgaaagaggaaacccgccagccgctcaaccacaagcgcaagggctgaaccatggcctggcgtagcgtggtcattacccaaccggcgcgccttaagcttgagcaaaaggcgctggtcgtggctcaggatgccggtacggcgcgcatcccgctggaagatatttccatattggtgatcgaccagccgcaagtcaccctgaccgcctgcctactgaccgcctgcgccaatgcacaaatcgccgtcattaccgtggatgaaacccacacacccaatggcgtgctgttgccgcacctgccgcatagccgcgccttgcaggtgatgcgcaaacaactcgccatgagcctgccacgcaaaaaacaactgtggcgcgacatcgtgcaacgcaaactcagcaatcaggccgaagtgctcacgcggcaggggcatcagcccgccgccttacgcctgcaaacattagcacgcggcgtgcgctccggcgatgccggccacgccgaatctcatggcgcgcaagtgtattttcgtcgcctgatgggcgcaggctttagtcgggcccaagaacgctggcacaacgccgcttttaactacggctacagcatcatccgctccgcgctggcgcgtaacctcgtcgcttacggctttatgcccgcctttggcctgcaccaccaaagcgagcaaaacgcctttaatttagccgacgatctgatcgaacccttccgccccattctggatgcgcatgttttagcgcacatgcccaacgatgctgccgagcgtaacttaagccgcgacgacaaagcctacttggttagcattttgcacatcgacacccccatgcaccgcgcccaa

SEQ ID NO: 2957 - DNA, 21968 bp, synthetic construct
  misc_feature 1..21968: note = Synthetic
  source 1..21968: mol_type = other DNA
attgcggtcataaccccacgcgcaccatatagcctcatagcaaccctcggtcggcttgggtgctgccagcccgcgatcagccatgaccttacggtaggtatcgagggtggcgtaatagtcgcggcggtgcacggtcacaaacccgtccagcgtcgtgaagctgtcgcctggcataaggatctgagcgtcggcgctatcgagcgcaatggctgcaccggctgaggtcgccagcaaaggcagagagatcagcttgggcgtcaattcgatatggccgaccgcaatgccggcatccgggcgccagacatcgaccaccggcgtgccggaaccatagtctgacgcattcatgcccatgaaattcggctgattgaactcaagcccgaccggctgcacccagtcgcggcgatcggcatgggacgagcccgaccatgaccagaagcctgtcccggtcggtttcagggtatggccacccagccgccagcccgcgatctcaaggggcgcctccgtgcggttgcgataggtggcgctaatcagcgcaaaaccgggatagcgatcatagaaagtaatattgagtgttttttccacaccttcggccgatgcgccggagatggtgtgtttaacgcccttaccgtggacatcgcgaacggcggcctgagatttgccggtaaagctgaagctgtcgatggttttggtggcgggtaccttggggtcagtactgacattcagggtgacggtttcagacggcgcaaaatcgctcaacgccaccgcctgcccgttcaggcgcgacacgatccggccaaacaggcgctgatcaaattccagcgtcatcaccttatcaccggcgctggccgccaccatgtccgccccaaaggccagaccggcatggcccagacctgacgccacaattgtacccgtcatcagcttaagcaagctgcgcctttggatatgtgcgtgtggaatcatctggtcaccttccctgcaaagtggtcaaaatatcagccgtcacaaagctgtggatttttagtcttgcataaatcattttaagaaggcaaacaaaaagacagaataacgaaactttatatttcgttttgtttgcttttgaacaaggatcggttgttatggtgtctcaaacccgtgtatcttcgaccctgctgggcctcaccttaagcaccatgatcgccggctgtgcgattgctggtcccacctatacggtggcggattttgccaaggtgcgcaaattcgacgcccacgtccatgttaatgtcaccgacccggcctttgtcgagcaggccaaggccgacaatttcgagatattgtcgatcaatgtcgattacccggcttttccgtccatcgcctcccaggccgaagcgtcccataagttccacactgccgacccgaagcattttcactatgcggccacctttaccatgaagggctttaccgagcccggctgggccgacaccaccaaggcctatcttgattctgagttcaagcagggcgctctggcggtcaaggtctggaaaaacatcggcatggtcgagcgtgatgtggacggcaagctgatctttatcgacgataagcgctttgaccccgtcctgaaccatctggaggccaggcatatcccgctgattgcccatcagggagaaccgcgcaactgctggctgccgctggaggaaatgaccaccaataacgaccgggaatatttcaaaaaccatcccgaataccacatgtatctgcaccctgagatgccgcgctatgaagaactgatggccgcgcgcgaccggatggtaaaggcccacccgaaactcagcgtattaggcgcccacgtggccagcctggagtggagcgtcgatgaagccgccaaattcctggacgcccatcccaatgccaatattgagttggccgcccgcatgacccagatccagtaccaatcagttcgcgactacgacaaggtgcgcgatttctttatcaaatatcaggatcgcatcctgtacggcaccgacctgacctataaccccggcgatgatgccgaagcctttaaggccaccgcccacgactactggctgtcgaactggacatatctggcgaccggtgaaacccagactgtcgctgacatcagcgctgacgccaagggactggccctgcccaaatccgtcatcgacaagatcttttacagcaatgcgcgccgcgtctttctgagcgcgaaatctaactaaaataaattcaaggggagacttccatgtccgttcgccactatctgatgtccacggcccttggctgcacgttgggctgcgcgcttgtgctgatgccggtttgcgccaccgcccagaccgcaccttcaccggccaccactcaggcaggcgccacccgcgacagcctcgccccgtcaggtcgctggtcgctgccggagcgtcagcaggccaaaaccccgcctatgggctggaactcctggaatgcatttcgcaccgaggtcgatgaggccaaggtgatgggggcggcgcaaaaactggtcgacagtggtctgtctaagcttggctatgtctatgttaatatcgacgacggctggtggctgaagcgccgcaccagcgatggccggatgcagatcagaacccagattttcccgtctgccgccgtgccgggtaaggaccccagtttccgggcctatgtcgataaggtgcacgccatgggcctgaaggccggtatctataccgatgtcggccgcaatgcctgctcgcaggcctacgacctgcactcgcccaacctgcccgaaggtacaacggcggagcgtgaagtcggcctttatggccatgagcagcaggacattgacctttatttcaaggactggggctttgattacatcaaggtcgatgcttgcggaatcaatgtctatgggccgggcacggctgtggtgcgcgataatgactacaccgccttcccgcccctgatcgatcaggcaaccatttcccgtaccaatatccccgccgtgcgggccatgtatgaaaaggtcgatgcggccctgaaaagcgccaatccggacggcgactacatcctgtcgctctgtaactggggcagtgccgatgtccgcacctggggcaaggatgtcggccatatgtggcgcactagcggcgacatcaccccgaactggacacggatgctgcacaattttgatagtgcctcgacccgcgcactctatgccgggccgggcgggtggaatgacccggacatgctgttcattggtcacggcgatttcgacgcaaaccacctgaccgaagccaagtcgcatttcgccctgtgggccatcatcaatgcgcccctgatgatcggctatgacctgcgcgaggctccgcaaagcctgctcaacatctggggcaatgccgatatcgtgcgcgtcaatcaggaccccgccggccatcagggcgtcattgcctatgcttccgacgatgtgcagatcattgtcaaaaccttatcaaacggcaagaaggcggtcgccctgttcaaccgtggcctcgccaaggctgacgttaccttaaccgccggtcatttgaagttctcagatacggcaccggttcagcttaaaaacctgtgggataagtcggcgccgcattttaccggggatacgacctttagtctggccccgcgcgagaccctgatctttgaggcgagcggtcagcgccgccttacagacggcgaatttttgtcggaaattccgggccgcatcaatgtcgcggatgacggcgttatcgcccctgagcccgatccggtcgtgcaccgcatgaccaatcagtggggcaagacgctcaatagcggtgagcgtccgacctataccggctggggcggcgcgcaggccgacgcgacaccgtatgatcagaccctccagattgcgggccaaacctttgataccggcattggcatactggccaattcgcggcttgaagtgcgcaacagcactggcggcaaacgctttgaggccacggtcggcatcgacgattcgacccgcaacctcaaggacacagtcaccttcttggtctatggtgacggtaagttgctggcgcaaaccacagccagtttcggacaaccggctcaaagcctgagcgctgatctgtcgggcgttaaaatcgttgaactgatcgccaaaagcgccaccaccagcgatctgccgctggtggttacctggggcgacgcggcccttttgaaataacttttaggtgtcgcaacgttagtgcagaaaaccgctcacacttttctgcacgttgcttaagccagatgcagcttaatgccggtcttttccgcagcttcgcggataaagtccggcgcatcggcatcggtgatcagatcatcaatttcactgatgtcgatgatgcggtgcaggcagaccttaccgaatttagacgaatcggtaatcgcaatcacctgacgggcagtctcgaccatcttacggttcagttgggcttcagcctcatggtgggtggtaatgccgcgttcgacatcaaaaccatcgacgcctaaaaacagcttatccagcagcagatcatcgagcgacgccacggtttgcgccccgtaaaaggccatgttcttgcggcgcagttccccacccagcatcatgatcttgatcttttgtttctgcaccagcgccgacaggacgccgaaatcattggtgacaacggtgatgtcctcatcatccggcaaaaagcgcgcgatctgcaaggctgtggtgccggaatcgagcatgatcgagtcgccgggcttgaccatggccgccgccagttggccgatgcgctctttttcctgggtatggatgacctgcttgacctcgatcgcaggctctgcgccgacattgaccacatctgacgaaatggcgccaccataggcgcgcgtcgcgataccgtgttcctcaaggtaatgcaggtctttgcggatcgtctgcatggagacgctgaacatatccgacagggccacaacctggacgctgccgcgctccttgagcatcgccgtaatctgacggcggcgctcactggtgtcgcgtgtaaccttgatagagccttcggccatgtcagcgccttgccttaagttaagtttatcgttttagcgtaaaccctgccggctaaggacaacagatatccgccgtatgtttcgtttctctaccatgacgcgctttaaattcaacttaattagactttgccccccacccaaaccgcacgacataacgcgtaaatatgtcggatatatttcgttttgacaccaagcctgtaaaaatgcctgcaaatcgaaagataaagggatgtttttggcgccgttttacaataagcaaagctctccctaacgggagagctcataatctaacgaagctgcttgagtgcggcataggtataaaaagggcgtcgtcactaaaaagcgctctggcaacgacgcccgtatatccggatcagaaccggtagctgagacccagcttcatcgaccgtccgtaacgatagtagccctgtgacagcagcggattaccattgatgctgtaggtctgggcttcatcgagaagattacgaccttccagactgatattgatcttgtcatttaccttgtacgaagcatgggccgtcacccaggtgatgtcgtcggccacttcgttatagccgccgcccagcacattgatcgctgtgacatagccatccgtatagtcagcgttcatgcccactgagatcggaccgcgatcatagaacagccccagcgaataaaccgacggcgcaatgccttcgagcgggcgctcttcgccgccgacccagctattcgaccagttgcgcgtgtattgcgccctcagaccaaagccgttgtccataaagtgctgcaaaccgacttcgatgccgcgaactctggcataatcgccattgataggccggctgatgttaaacaggtagcccggtacgccgatatcctgacccggttcccagcttgaggtgatctggttttcgatatgcttgcggaaggccgcaaagttgaagatcgagtttggcccaaagtaccattccagtgacacatcaacctgatcagcggaatagggtttcaggtcagcgttaccgccgtagatctgggtaaattccccccaggatacgctctcagtcgtgttggtcggtgccagcgtctcaaccgacggacgcgccattgtgcgcgcggcccccagacgcagacgcaaggtctcggtcaggctgaagctcaggttagcggagggcagccagtaggtatattcattatcctgagtaacggacgttggatcagcatagacggccgtatagttgaacgcgccgttttcgatgatgttgagaattttcgcatcccaagcctgagaactggtgttggtctgtacgacgcgcacgccgacattaccactccagcggtcgcccgccagattggcctgcataaagcccgaccaggtttcctcggatacgcggtagctttgcagtgggttccaaacaggggctgccgccgcgtagtcataggtgccgccgcccggacgcgcattgccgttataggccgccagcgccgcctgataggccgggacgtcaaacgccaggaaggtgcgcgggaaatcggaactcacctcatccatgaaattcggcaaggcaaagctttgcgacacaacaccaccgcccagatcgccgacattgatagcatagttgccggaatagtagtcagcaccaccagtcagcgagttattgaccagatcgcgcgattttttgcggtctgtacggctgacgccaaactcgacactttcgatccagcctcggccgaccgtccagtccgcggcaaaggtcgtgccggtgatttcatcctcaatattgtcgccggatagcgagaaataatgggtgttgaagtcagaatcgctgaacgcgccattggccagtccggtcgccagatcacggccgtcatcgaaattgacatcaacattcggcacacgcgccccgctcagtgaaatgctggcggagttcggctggttcatgcgcaacacgacatagctatcctgcccgcctgatttgcgcgatgaagttgacttataaacatcgcctgtcagggtcaggctatcgctcacgcgccacttggcgttgacaccataaagatcggtatcgactacccggaatgtcgtctggttgagcagttccgggttaaggcgcatctccggatcaggattcgtcatgtcaaaactggtgacgataccgtcttcgatcaccatgtttgaccagcggcccggcgcatacagcggatagaacgactgctgatatccgacctgcggtgaatcaagcttagtcttcaacccatcaacgaccagggtgaaatcttcattgggccgccattcaaatttggcggtataggcggtacgttttttcttctcaaggatagagccgacacggaactggcccggcccgatcaggccatattcttcaggatcgagtacgccgttttcattagggtcaatgctgccaccccaggcattgccccacagccagctttcgtcggtcgggtcggcattgcgtgtccagccgccgtcattaccagccacatcagtacggctgtcgcgttcttcgagcacaacaccgaacaggacgccgaatttgtcaccgccaaacgtgttgctgtagacgccggagaatttgcgtccatccagttcggacatctggttgtagtcgccttcgacgcgcagaatgccttgctggccacgcttatcgaaggggctggccgaacgcagattgatcaggccaccgatggcaccttcggtattggccgcctccgcgcccttgataacatccgcgccgctgatgacatctgccggcaacacgtcataggcaaaatcacgccccgcaccatcggtcgccagtatacggccgttgaatgtcgacagggtatattccggcccaaggccacgtacgctcacgctctggccttcgccgccagccgtgcgcgaaatcgataccccggtgatgtggcttaaagaatcggcgacattgtcatccgggaacatgcccagttccagcgcactgatcgaatcctgaaccgtggccgcatcgcgcttaagcttgaccgcacgcgcgatactaccgcgcacaccgacaatggtcacttcctgaatgacctcatcagcctcttctgccggaacggccgcgggctctgcattctgggcaaagcctgcccctgcggtcaggagggccgcaatgcccgcgctggccagtgcagctctgcgaaaagtttgacgacatttcatatggatatcccctatttcaacccgtttagatgacaacatggctcgcgatggaaaccgaaagcgtcacacatctttcgatttgcagccttatttcaaaaaacagctaactaccgtttcgcaaaactgtcaaatcgaaacttaacgaaagaatttgaaagtgatatttcgttgcgaagatgtctcaaatgtcactcataagaacccgcatccttatctaagcacgacgcgcgctgacatcagatgaccgatcagggatgtccccgcggcgcaaggcctccagactgtggacgtggaactttacgaaggcctccggatctttgccctgagcttcaaatgtcaatacgggcaaattcccggttctgaaccatcagaaaacggcactgattctgcgacctgccaagcaccagtttaattattggcttttgaagccatagggctttgaacatgaaaaagggcgacccgtagatcgccctctatctggtgagaattctctcttgttaacggagagacctcgacgttgtctctgctaagacaatgcctattgaacacgatgcgcaaactgtgtcaagtttcgcaaatgcaactataaatgggcagggctatgagcggcaaaaactacagattcgcgtttgacgtcggcacaaactcactcggctgggcggtttttgagcttgatcagaaaaataaccccatcgacctggccgatgccggtgtgcggattttctcagatggccgtgaccctaaaagcaaggaatctctggctatcgcccgccgcggcccacggtctatgcgacgacgccgtgatcgcttccttcaacgccgcagctaccttatggacttgctgatcagggcagggctgatgcccgatgatgaggctgcgcgtaaagcgctggaaaaactcgatccctatgggttgcgctccaaaggccttgatgagcctctgagcctgcatgagcttggccgggtgatctttcatctgaatcagcgccggggctttcaatccaaccggatcgccgatgcgggcaatgacgaagacagcggcaagattaaaactgccgagaaaaagctgatcgcggccttggcagaacaaggctgccgcacctacggcgaatttctcgccaaacgtcagtccgcgcccaaagtgcgtgagcgtgaagctgttcgcatccgcctgaagggtgtaggcgccaaggcgctttacgatttttatcccacccgtgatattttaaagcacgaattcgatgcgctttgggcggcgcaagcggtgcaccatgccgcccttaacgacgcgctgcacgataagctttataacacaatgttctttcagcgcccgctcaaagacccggttatcggcaagtgcacattttatcccgaagagccccgcctcgccaaatcgcaccccttatcgcaagcccggcgcatctatcaggatctgaaccacctgcgcctgaaagaaggcgaggcccctccccgcaacctgacgctcgatgagcgcgacacgctagcttttgtcttactttccggtgaagatgttaccttcaagaccggcttgcggagacttttgaagctacccgccaatacgacgacctcgcttgaggaaagcggcaaagttgatcgcttggtcggtgatcaactggtcgcgcgcttgagcaaaaaagggcccctgaagcaactttggggaaacctaacgctcgaccagcgtgccgacatcacgttgaaacttaataccgagcaaagcgaacctccctgatcgcttatcttatggcgacctatggcctgagcgaagacgccgccaaggccacggcgaatatacgcctgcccgatgggcatgacatgctgggcctgaccgccacgaccaaggttttggaacaccttaagaaagaggtcgtcccttataatgtagcggttgaacgtggccttggccgatctcattccgatgagcgcgacggcgtggtccatgacagcttacctttttatggtgagattctggagcgtcacaccctgggcggctccggcgatccgaaagacagcgacgaaaaacgctatggccgcatcgctaatccgaccgttcatgtcggcttaaaccagcttcggcgcgtggtgaacgccctgatcaggctttacggcaatcctgagcagatcttggtcgaactggcgcgcgatctgaagatgtcgcagaaacaaaaagacgaactggccaagaagcaaaagggcttcgaagacgacaacaaggcccgcaaggccctgctcgagtctgaaagtttcgactacagttccgccaatctgcgcttgctgcgcctatgggaagaactgggcttcccaaaactttgtgtctattctggtgaaaccattggcattgaaaatctgttcagcggcgatgtcgagattgagcatatcttgccctattcgcgcacgcttgacgataccatggccaataagacgctctcgtaccggatgcacaaccgtctcaagcgtaataaggcgccggctgaggctttttccggcgatgagtacgaggcaatacggctgcgtgctcaggttttaccgccaaataagcgctggcgttttgaaaaagacgccatggaaaaatatgaaaaagagggcagtggttttgctgcgcgtcaacttaatgaaaccaagcatctggcggtgctggcacgaaaatatcttgtcagcgtctgcaacagcgaaaacggcgttcggattgtcacgggccagatgacagccctgctgcggcagcgctttggcctgaacggtatcctgagcgatgacaatcacaaaaaccgcacagatcaccgccatcatgccatagatgcctgcgtcattggtgtcattgatccgtggattctgcacgaaattgcggctaacgccgccgattttgagaacaaaaacgaactcagcaagatcaccacacgtttccccgaacccttccgtggccagccgagaggtgacttccgcgagcgcgtcaaggccaagatcgacgccattatcgtgtcgcacaaaccggaacatggcaccggcggcgctttgcataacgataccaactacgggattaacaacaccgccgacaaactggatggggagctgatcacacgtaaggcgattgatgccctaacccccaacgaagtcgataaggtccgcgatcttcatctgcgcgctcaactacaggctattaaggctgaggttggcaaggacgccaagactctggccaagaaattagccgaattcggcgaagcccagtcccccccgatacgccgggtgcgcatcctgaaaaaacaggaagactttattccgatcaaagaccggaaaacgggcgcgccttaccgcacggtgattgcgggtgaaaatcatcatgcagacatcattgaggatgcgtctggaaaatggcgtgggttttccgtatctatatttgaaattaatcagaaaaattatgaacctaaatggaaggttacctatcctgacgctaaacttatgatgcgtgttcacaaaggcgatttgatagaacttttggactcagatggaattaagcgaatcaaacgtgtggtcgttttagatctgtccgcaggtcgtatacgtttagccgaacataaagaaagtggagagctgcaaaaacggcacgaggatattgatgatcctttccgttgggatttagcaaccatttcaaagcttaaagagcgtgaatgccgcctttatgccattaacgaaattggcaagctaagagattattgaaaaagccaattggaaccgaagctaagacgggtgagttatgctcagagtcgggtgtttggaagacgaagactccgggcacaacagcgcctattgctaagtgcaaccgcatgccaccctatgggggacatgcagtcgtatggattttgatccaatacgcctgataaaacaaggagagataacaacttcaccacgaggatgttatctctcttacaatcatgtttcttgggaacaatatgattgtgttgcggttgggcctctcccgttatttctgctaagacgctccttatgtttacgcataaggagtgttttgcacctataaattgaatctcgttctcattccattaaatcaacctgtgtataagtatgtgcgtaacttcacaggcagaaagctatggttggacagattgttgaactggcgtccgaaggccggcgcattgggctggagcgtggctttcttacagtcacttccgacatgggcgtgggcagggtcgcgatcgacgatgtagaggccgttatcgcctcagcacagggcctgacctattccaatgccattttggccgcattggcggaacgtggcgcacctctggtcatatgcggcaaaaactatgccccaacggccgtccttctgtcgctcgacggccactatgaacaaggccaccgcatagccgcgcaagccacagcttcaaaacccgtttccaagcaattatgggctcagttggtgcgcgccaagatcgttgcgcaatctttgatgctggcacgctttggcgaaaatacggcgcggctggatcgactggccgatcaggtcaaatccggcgatcccgataatctggaagcccaggcggcccaagcttactggccgcttctgctgggcaaggatttcagacgaaaccgtgacgggtctgacatcaacaccttcctgaactatggctatgctgttttacgcgccgcttctgcccgcgcaatagccggatcaggtctacacccgtccctctctatccatcatcaaagccggggagaggcactgcgacttgccgacgacattatggaacccttccgcccggcggtagactatgtcgccaagaacctttgggcggcgggggaaaacgaactgacaccgcaggtcaaactgacattggctaaggtattgcagttggactaccagaccaccaatggccgcacccccttgtcggtttgcctgtcgcgtttatgtaattctctggcgcgcgtgtatctgaaagaaactgacaagctcgacctgcctaagcccttgatacccatcaaggatagtggccaatgacccatttatcggcgtatagaatcatgtggattatggccctttttgacctgcctgtggtcacaaagcccgaacgcaaacgcgcaacggcctttcggaattttttgctggatcaaggctttgaaatggtgcagttttctgtctatgcacggttttcattttcaaaagaaaaagcggaagtcatcactcgcaaggtgggaaaagctgttcctgctcacggtaaggtcgatattttatattttaccgacaaacaatatcagcagattgtcagcttccggggcaaaaacgaatcgtttctgccaaaaaatcccgaacaactggcactattttgagagatttatgggcacttttcgcgagctaaacctaagaaaaacccttgcagaacaaagcgttccacaagggctgtcttagcagaaataacgtcgaggcccaaccgcaacatacaagatgcgatcgcccgcatgaaacacgtcttagcagaaataacgtcgaggcccaaccgcaactatgtcggttgccttgatagaaacgatatggtcttagcagaaataacgtcgaggcccaaccgcaacctatgctgatccgctgtcggccaataatgagtcttagcagaaataacgtcgaggcccaaccgcaacagcggctgaattttcaataccatccgcttcgtcttagcagaaataacgtcgaggcccaaccgcaactggccttgcggctgaggcaatggcacgcgtgtcttagcagaaataacgtcgaggcccaaccgcaacatcgaaataccgctgcatgaaatcagcagcgtcttagcagaaataacgtcgaggcccaaccgcaaccgtacttacccggcagcgcgtgatcactgagtcttagcagaaataacgtcgaggcccaaccgcaacgtcatcacggtgccgggcgtgttctccagcgtcttagcagaaataacgtcgaggcccaaccgcaacggccgcgctgatcggcgtgacccaaaacttgtcttagcagaaataacgtcgaggcccaaccgcaaccagcacgagacacgcaagatcgaaatacccgtcttagcagaaataacgtcgaggcccaaccgcaactcaattgaagtcgaatataagacggcttctgtcttagcagaaataacgtcgaggcccaaccgcaacgcctctgatcgacgccggagtggcggttcagtcttagcagaaataacgtcgaggcccaaccgcaacccgcacgccttaaactggcattcagaaattgtcttagcagaaataacgtcgaggcccaaccgcaactgctataggcttccccacaattcccggcaagtcttagcagaaataacgtcgaggcccaaccgcattacgtgtcaggtgtgtcaatggaaaatcttacttaacaggctttaaaataagccactagacgcacaaaaggccgcctttgttgggcggccttttgtgtaatttcttcatgtctcagatcgttataacgagtgagttataacagtaatggttgcgggggctggatttagtcgccgcttgatgcacgcagtatgggatatcgaaccacccttgcagacgatcaaacataagaattcgttgaaactttagcaaggctaggtttggtttccagcttcggaaatccagcatggcaaacgaccaaccacggcttccatttgaggaagctgccggtgcatttctgccttcaggaaatgtatcgacgcaaagccaccataagaaggcaaagaagaatttgtgttgcggttcaaatacaaagttctctggcgcaatttcacgagatccatatgaatggattccagcaaagcgatgcgcttcaattttaactagcctcaaatacttttttacagattgcacaggcgccccaaccgttggtaggggggcgactgttttgccgacctgatcggcaagggattcaatgtcggcttctgaatttcgagccgtccatttaggtttgtttccgtagtaccatttcaggatcgaacgagtatcaaggttattaagactaaatagttcgccgtcagtaagctcaatctcgtgaccatttattaaatcgacacataagctttcgattgtatgtaactgtagtggtctcgccttatggtctgtcattttgcgccgctttattggatctaacacaagctagcattgttttttaacaaataaaatccggcaaattgtattgccggaaggcttgccacctccattggtcagcggcgtgcaaccttagtctcgataatatggaaacgctggtcgtggcgctttaaaaggtgggaggacggggctaaaaattcgatcgacaaaactgaatacaacagataagcttttggtatgacgaatcatccgattaagacgaccaataaaaagcgacgaccgataggcatagacctttttgctggagcagggggcatgagcctcggttttgagcaggccggttttgatgtggtagcagccgtagaaatcgatcctatccattgcgccgcccacaaattcaatttcccaaatacggcagttattccgcactcagttgcggaactaaccggcgttgatattcggcgcgccgctggactgaaaaatgaagagattgactgtgtgttcggcggtgcgccttgccaaggcttttcattgattgggcatcgcgtactagacgaccctcgaaacagcctcgttatggatttcgttaggcttgtatcggagttagatgccaaaacattcgtttttgaaaatgtcaaagggttaacggttggaaagcaccgcgcatttttagaagagcttgtcgaagcctttgcggctaaaggatatgatgtccggttgccgtggcgcgtattgaatgcttccagctatggtgtgcctcagcatagagaacggctgatactttttggttcaaaaaaggggactgaactaccagactacccgttggcgaccaccaatcctgctgatcggaagcgtatggttcctggcctgcctttcggcccgaactgcgaagatgcactggaggatattccggacgcagagcggtttgaaactttaagtgacatagacgcagtgaaaacttcttcatacaagaagccgtctccctatgccgctgaaatgcgctgcttaacaaatgactcttggcatttaggctacgtgcgcaattggaaccctaatattttgacgtcgagtgcgcgaacggtgcatacacaaatctcaaagggccgctttcggtcaaccgatcaaggtatggttgagcctattagtcgcttttttaaactggccccacagggcttatccaatactcttcgcgccggaacagatggcgctagaggtgcgtttactagcccgcgtcctattcattacaattttgctagatgcattacggttcgcgaaatggctcgactgcacggctttccagattggtttcgatttcactcaactaaatggcacggtgcacgtcagattggaaacgccgtgcccccgcccttagcgcgagccgtagcagcaaaggtggtcgaagccctgaagcttaatcctaaaatggtttcgaaagcactggagttgggtgacgcggccttgctgtacatggagatgtcggaggctgcggaacagtttggggttaaaaagccaaattcaagacgggacaagaaaagtggcgctaagaaaagaaaacagtctgaaatcgaggccgatagaattcggttgtgtgctgtaaatggctaaacctgatccagcagaaaatcggtacaaggttcttatagagaagctgttcttcaaccactggaaagaaggcatcactgagtttgcgtttgaccggcgggaactggagactgtcgccgctgagcttaaaatcgttcttcctagaaatttaggcgatgtgccctattactttaggtatagaaatccttttccggatgcaattttgaagacccaaccagaagggcttgaatgggtaattcagggtgctggaaaggggctgtatcgcttccgccttgtcaaatttacgcgcattgttccaagcaccactctcatcagtataccaattcctgatgcaacaccggaagtcattcgtgcttatgcacttgacgacgagcaggcacttttagcaatcgtgagatataaccgtctggtcgatacctttctggggcttacgacttacagtcttcaaaaccacctgcggacaacggttaagcagctagggcagattgaaattgacgagttgtatgttggcctcgataaatacggatgtcactatgtcattccagtccaggccaaaggtggaaaggaccagattggcgtcgtacagatcgcgcaagacctggcattctccaacgagaaatttccagagatgcgctgccgcccaatagccgctcaatttatgcctggtggcgttgttgcattgttcgaactcacaatcgatgacgaacaagtaaaggtcgtcgaagaacggcattacaaactcattccagcagaccaaatcgatgcgaaggcagctcgaaactatcgcaactagggtggataacaatctagtccatagatagagttatgccgtctggtacgctggtctgtgctcgtttgacgcttccattcaaatcaacggcatcgaacatcgccttttcgagttgctggcgacgtggatcgtttttatcctcccaaattgccaaaactgctttggcatctaggccggaggcaatccgaaattgctctatagcttcggctgctttttcctcatccgtgtaatcatatagtctatccgctatatccactacgatgggcatgcacgcctcctctacgaaacaggttttcaattaatacagtaacgccgccaacggtgggtctcaagtccaaacattaattcaatggagactgaggcccatatgcgaagtcttctgtaaggaatacacgcgccatatgaacctactgcgccgtaaccataacggcaacattgcgggctatcgggcggaactgataaagctcgaccgtgaacgggaacagatcgtcaaggccgtgctggacggtattccaggtgcgtctttgaaggacagggccattcgcattgaaacccgtcgggaagaagtcgaacggtttctggtcgatatgaaggaggagccgattgcgttccatccgagcatggcgaaccagtaccacaaagaaatcaagaaccttttggcgtcgctcaattctgaggaccggcgcaatgaggcggcggcgatactgcgatcattgatagaccgtgttgttatcacgccaaccaaagaaggcgaccgtttgacggttgacctgatcggcgatctggggggaattctctcgatggccactaaacgggacagaaacgccgtattaagcgatctgtctaaacttcaaccagtgcagcaagcggatgatgatttcttggacggcgacgtagatttggcggatttccaccaatctaaggcgctggttgcgggaactcgttaccagcgcgacttcgactctaaccatcagggaaaaaacgggaaggttgaagacgacggacacaccctaaatttgggtgctgacttcgcctcttcaattagctctcaccccttatgtaaagaggcggtggttgcgggggcgcgcacacacctagaatgcccaatgccttcaacagcttatgccatagcacaacatcttgcaacttcaacccatagcgcattgtttcgtgttttagcgtaagcgaaagcctccgcgatatgcctgccaaggaaaataggcgtatcagacaccattttcggtcgacaagccaaacaggtcattatgtgggatatcatcgcgtgagtttccataacggacgtcgagcagtctctttattcccttcattattggcgtgtctgtcggcaatgtaaggccccaagtacctgcgacgtaaattggttgccgttcaagctcctcatttagcagcttgatcgtaagcgtgtccggcgaaacaacagcatcgcttagttcttccggcctttttaatcgatccaggtgcttgtggcgagtcgcccacgtgattgggccgccgagatgggcctcaacttgtaacctagtcacgagattcatcaatgctatgagaatttgccaatctaagacaccttctgccttcaaagtggctatattcgcccgaaaccctctgtcagctgccaacttaggcaatgtataccggatcatctctactgagcggcgatagcgattgctcaaggcctcattcgctttttccttagtgtaacctggtccatcccccgttctccatctcatttcaggagcttcgatcggctcaatttccctttttgggtggtatttactaactccgataagcgtctgccaacccggcgcctgctgcagagcaaaactcattaattcatgggcggggcgaaccgagaaaactcgaactaaaagtccacgatcaagcgacgcatggattcgttgttggtaggtctcgatatcgagtgcactcgactgaccaattacggtaacaaccatcgccaccgcatttccgacggcatcgagcatgtcctcgtcgtcatcgaccctatcagggatcgatacccgccaagtgaggatattattgtccccaacatactcgacggtcatcttgccgaccgccatcgtgtctacgacgataagcgcggagctcggtacaatgagcaactccacacttgttaactcggcttgggcaacctgaagcgttgctataaggccttgtacggtgggaagtgtgacttcgtccgctagaaaccgtacggtccacctaatgcccaaggccatccatgtaacctcacgggcgtcgccgagatctgtaaaaggtgtacagccaaggtccctttcaaaagcgacctctaattcgtcaaccgtcatttttggccaaggcgcactcgcggaggtagccatatcgagaaaccggtaaacgtccttagccgcgaacggccaggcctggactgcatcggccagcgtggaattcaggtccggcaccaatttgtctgcaacaactttgaatatcccagcatgcgcaaaggcccgctcaatgtatggatggttgcccgtctcggcaggttccgaggcaagttcgacatgtgcctgaaaagcatgtccgagctgaagaaaataggttgtcccctcaccggcgctataaaatgtctcggccagcgcgaaagccgcctgcggcaacatttgataaacattctcgtcagccgatttcatcgtcatgaacgtggcgcccgctgcataataacgagcggcaaaatgaagtccaagctccgaataacactgactaagcataagcattatcaggatagagagcggcagttcctctcctgtgaacgcgccaaccttcgctttttgcaactcatctatagccgcgagacgttggccggcattaaggtgcgccaatgctcgcttacggcttatttcagcgatggaccgcttccctgctcgggcatgagataaccggtccacctcatcgcgaagctttgtaaattccggcacctcgatcaatattggcgccaacttctcgatgagcatagcgatatgtgaaatcgggtaatacggaacatctttgacggccgtaatcacttctagccatgcctgaaccatcggcacctgattggctttcgccggccgatcttttcgaacgacaactgttaacatcgccttggcttcaaggagggtacaatagtccccacccttcgcgatttcggttagtttcctcgccagaacagcctcaacaacgttggcaaatccctccacctcgcgccgagtcaagctgctttgctgtgtcgtgattgagccctggcaaaaagcaactactatggcaccgtctaagagatcatttgccgttaaagccgtgaccgggaaatctgcaaaaaatgcccgtatataatcgatggccggatcaagattgcctcgccccttgagttcagcgaccgacacttcatagcgggctttctgcttcatgcggttactgttaggctctgaggcgtagtccttcattcgcgccagccactttataatatcaggctttgcgtattcctcatgagtggctgttctcaatcccatcttaatatcgagaaagtccgcaagactttccgctggcctcttcaccgctaaccaacgatcgcggagcgcggcgtaatcgctatcactctcctggggaaagaattccgatggtacagacaaatattgttctgcaatccagaaagtatctgtatcggaaagctggtcggcgatcgccagtccgtcgaaaataacaaggcttgcatcgaattgagctttgcattcggcaatgagcttgtgtcgggtggatacaacgacgttgggttcacaaaaataataaaccttttgaggcctctcaccgctaccgaatattgttttaaggtcggccctgattttggtaggcgtttttttgtcgagggtacaggcccccacgactatctctgttgagataaggctggcgaaagcattagcggcaatggaagtttgtgataagtaggtatgatacgattcaaagtcccgaccttggtccccaccggctttgacgggtccagttgccgggaccaaattggaaacgtggcgcaagcgggccagctcaaatgccagaagttcaaactcatgttcgccatttcgcgcgccaagttgtgccagttgataccgaatataatctctcagttcgacgcgatttttcacctctgtttcccaaataccggaggggctggtg

SEQ ID NO: 2958 - DNA, 14946 bp, synthetic construct
  source 1..14946: mol_type = other DNA
  misc_feature 1..14946: note = Synthetic
ggtcgatgcgacattggacaggaacatcaccacagagatgcaggccaccgcgacgatgttgctttggacgagggcgcccggcacgacgaacaccgccatgccgaacatggcgatgacggccagcaggcgccgcccacgcaccgccgaaccggtcagccgcaccatccagtccgacaacccgccggccacccagcagccgataaagccgcagaagaacggcacgaaggccgcgaagcccgtctgaagcgtggtcatgtgccgcgccatgtgcagatagccgggcagccaggtgacatagagccacagcaggtagaccgagccgaaaaagcccaggatcatgccccaggtcgtaccgtggcggaacaacgcgccccaggccttgaagccacctgatgccggcttcgccagcgcgttgtgcgcaatcacctcgcgatccgcttcgctcagcgtcacctcttccggattgcgataggtcagccaccacagaatcccgacgaataccccggcaatgccaagcaccacgaacacccagcgccagtcggtcgccaccaggatgagcgccagtaccggctgggccacggccgtgcccagcgccgccgccgaattgaacacgccggtcggaaagccgcgcttgttcagggggaaccagtcgctgaccacgcgcgccccggtcggatattgcggcgactcgccgatgcccagcagaacgcgcgcgaccaggaaggtcgcccagttgcgcacgaagccgcacaggccctgggcgatcgaccacagaacgatgccgcaggccagcacatgacgcggccggtagcggtcgatcaaaccgccgatcggtagctgcgccaaggcatagctccacgaaaaggccgacagcagaagccccatttcaccgagatcgaggtgcaggtctttcagtatggccgaattggtcaccgacagggcgctgcggtccatatagttgagcgtcccggtcagcagcagcaggcccagcgataccgcctggacggtggcgagtttgcgcggcttgggtggcgtgtgtcccggcattggcgtccctgagctattttccaggaccatagggggccgggagccggcggtcaaacgggcgcgaaagccgccttgccgaggtaatcaccaccggtgcggccagggtctcgcccgcccactcgcccgggccgggcttggccttggaaatccggccgttcagaatcttgtgcaccacgtccttgcccgaaacgacatggccgaacaccgcatagccctgcttgtcgggcgtcgccgtgccgccggcatcgagataggtcatgtcgccgacgacgatggtgaactcgttggacgccgtgcccaccgcatagcgcgccgtcgataccgcgccgtcggtgtgcgacaggtgcgtcaggctggtcggctcatgcgggatcggcggataggtgcgcgcgccgctgttgaactggataaagcccgactggccgtacttgaccgagcgataaaacgtcccggcgtccagcttatgactatcgacatagtgcaggaaattggccgtggtaatcggcgcgtccttgccgtccagctccagcacgatcggcccgtcggcggtgtccagctcgacgtcgacggtgtccggcggcacgtccagccccatggccagccgcttcgggggcggcgcggccggtgcgggcgccggcggcggtgcgggcttcgagcaggcgaaaagcgccgtcagggccagggcgcttgccacaacatgccgtgtcatcatcgagaaactccggtttgcgagccgactatcgcgacgcggaggcagattggcaagggcgcgccattggagcgaagagctgggcgtcctttgccccttctacgccgcccgcacccgcgccaggaagccctcgacctggccgcgcagatgctcggcctgaccggcaagctccgacgacgcgctgagcacctgggaggcgccggcgccggtctcctcggccatgcgcgccacgccggtgatgttcgtggtcacttccgtcgttccgacggaggcctgggcgaccgcctggacgatctcgcgcgtcgccgcgccctgttgctcgaccgcggcggcgatggtcgccgaggaatcgttgatgtcacggatggtgccggtaatcccctggatcgcggccacggcctggcgcgtcgtcgcctggatgccggccacctgggcgttgatctcgtcggtcgccttgccggtctgcgtggccagggccttgacctccgaggccacgacggcgaagcccttgcccgcctcgccggcccgcgccgattctatggtggcgttgagcgccagcagattggtctgagacgcgatgcccgatatcatctcgacaatcccggaaatacgcgacgccgccacgctcagctcgccgacgatggcggcggtcgaatccgcctcggtcacggcctcgcgcgccttgagcagggaatgatcgacctggcgggcgatctcgctgaccgaggcgcccagttcctccgccgcgccggcgactgaggtgacattggtgccggcctcttcggcggcggccgagcatgacgtcgcctgggccgccgattcccgggccgacgaggtcagttgcgacgccgtcgcctgcatctcagtggcggccgaagacaccatggagacgataccgccgaccgcgtcttcgaactgatcggccatgctcagcatggtctgcttgcgttcggtttcggccatttcgcgcgccatggcggcctcggcctcgagttccaggttgcggatcatgcccaggcggaagacatcgaccgccgccgccatggcgccgatctcgttgcgttcgccgatattgggaatcgtcagctcggtccgccccttggccaggacgcccatcgcttccgccatgcgcgagatgggcgccgagatggtgcggatcatgacgaaacccatggcggcgcagatggccgcggtgccgatcagggcccaaaggatcagctggcgcgccgcattgcccagcgccacaccggcggccgccgccttgcggccggccgccatctgatagtcacggtccttgtggatggcgccacgcagcgcatcgacctgcggcagcatggcgaaggcatagtcctgggtcgccttggcgatatcgccgccgttgacctcggccatgaagccgtcctcatccgcgaaataggcgtccatgtcccggcggatatcgtcggccatggcgtgttcatcggcaccgctgatggtcggcacataggtgcgccacgccgtttccatggtgtcgcgcgccttgtgcatcttggccagcttgctgtcgcgttcgtggcccgacaactgcgcgacctggccctgcagcgaacggtaatattcgaagctctgcgccaggtcgccgagcgcgttcgacgccggcagccagttgtcggcgatatcggtcgcggcggcattgacggcgctcagccgctgttcggcgaacaggccgagcccggcgcaggcgcccagaacgatgacgaaggccgcgatgacgcgcagccgaatggttgtatgctttaacatgttaccgttccccagatcatcgcaaagtcgccgcaagtcagacaagtgttccggaaaatgggattaatcccctttcgatacccttaattttcaacgccggcgcgaggaacatgccgttcccgaagcagcaaccccttacaatttcagggcaaacctcaaagcaattcattgtgagcgaaggcaaataggcttaaccatagggaaggcggcaagatcttggacaagatcctttcagggacgacgggcaaacaggcatggcaaccgatctcaattcactggagttcgcggatctgcgcgccttcttcctggtcgcggagacgggcagcttcacccgcgccgcccagcggctggaggcggccaagtcgatcgtctcgcgccgggtcgcccggctggaggaggccctgtcggcacgactgttacaacgcacgccgaccggcaccatactaaccgaagagggccagctctattacgatcaggccctggcggcgatgcaacagctcgattccgccgccgaggcgctgaacacctctgtccaggacgtcgccggcgccatccgcgtcaccattccgatctatttcggcgccgtgttcctgtcgccggtcttcgccgaattcatggcgaagaatccgcgggtcgagctggaaatccagacctcggacgaaaaggtcgatatcgtccgcgaaggcttcgatttggccgtgcgtaccggccatctggtcgattcctcgctgatctcgcggcccctgtgccattcccggcgcaccctggtcgccagcccggcctatctgaaagccgcgccgccgatcgaaaagcccgaggacctgatcggccatcgcatcctgcactattccagcctctttccgcaggagctgtggcgctaccatgtcggcgaccagatcgtgcaactgcgcctgacgccgttcctgcgctcgaacagcgccaccctgttgatggcggcggtcaccgccagccagggattgaccgtcctgccgtcctacgtcactgaaagcgccatcgcctcaggccaggcggtcgaggtcctgcccgagatcaactggggcacctcgccgatcaccatcctggccccgccggggcgcaagttgacccgccgcgtccgcgtgctgctcgacttcctggtggcgcatttctcctcccgggtggtttagctcagctaagggcattgtgcccagtcctgaagcccgatcagatgccgcgcgtcacctgcaccccgaaggcgatggcttgttgccgctgcgtattatgttaatatccgccacagaaacgcgaaaagcgactgggtggaaacatggtaaagtcgacggcccagcgtacatttgcccacttttgcccgcactggtccctcagtatcgcggaaacgccggtcttcgatctccacgacacaggccgtcaagtcggcgtccgcactgaaaagacctgccgcctgtgtcacaccaagttcgtgactgccttgcattgatcgcgacgccgttcccctggacgggtccggccaattttcaatgagacccacggagatgacatgctgttgatcgcaatcgcctgcgtggccgccgtcctgctggcggcggtgatcctgtggctgatggccgcgcgcatcgaagcccaggcgcgcacgcgcgacgccgtcgccgatgtcgataccggcggcgtcagcccggccgaatggcagcgcgtgcgccaactgaagcgcatggcgctggcctgtctggtggtatcggtgttcgccgcggcgtgcatctgggccctgttcggcgccgcgatcatggattcgctggcggcggcgtagggcttccgccgccggccacccaaattgcgggctgcagcataaagggttgaggccagccatctatggcgcccccttaaggggttgaattaattaaatttccacacttcctgcatccaggaattaaatttgcagttgttaccccaagctctggggcaacggctcaaaatgaaacatcaagacttcgttgcgaagtggtccgctcgggagggcggacaagaacgcgccaactatgtcatgtttctcaccgagctttgcgacctcctcggtaccgcccgtcccgatccagccggggctcgtcatgagctcaatgattttgtctttgagcgcttggttcagcgacaattgcccgatggcaaggtcgagctgggacgcatagacctctataagcgcggtcacttcattctcgaagccaaacagacacgaatgcgcggtggccataaggccatattgcagggtcaaggtgatctgttctccgcggaaaaacccgcggaaacccacggatcactcgaccatgtcatgatccaggcgcggaggcaggctgaacgttacgcggcgtccctgcccgccgaccacgcctatccgccgtttctaatcgtttgcgatgtcggtcgcgtgattgagctgtacgccgatttctcgggctatggccggcactattcgcaatttcctgacgcccgtcactatcgcatcggattggcggatctggccgagccgaaaacccaggacctgttgcgtgcggtttgggacaatccgtatagcctcgacccggcgaagcaatccgccaaggtcacacgcgatatcgccgggcagttggccatcctgtcgaaagccttggaggcacggggctttgaacagaccacagtcgccatcttcctgatgcgttgcctcttcaccatgtttgtagaggatgccggtctgctcgtggaagacggcttcaccaacatgctggcgacgtgcgtggtggatcccaagcgttttcccttggaaataaacgacctgtggcagcacatggaccagggcggctattcgcccggcgtgggcgccaaactgctgcgcttcaatggcaagctgttcaagaatgcccaggccctgtccctgacggccgacgaaatccggcttttgaaggtggccgccgacgccgattggcgcgatctggagccggcgatatttggcaccctctttgaacaagcgctcgatccggccgaacggcgccggctgggcgcgcactatacgccgcgcgcctatgtcgaacggattatcgacaccacgatcatcgagcccttgcagcaggactggatcaactaccagtccgctgccgagcgcgccttacgcgacgccggtgtggcagccgcgacgagcgaggttcgggatttcctcagccacctctctaccgtccgcgtactcgaccccgcgtgcgggacaggcaattttctctatgtcgccctgcgccgtatgaagcagctcgaaggcgaggcgctgaaatacctgcacgatattggtggcgacgaggcggtcgcgcgcgccgtgaacatatcggtcaagcctgaacagttcttcggcatggaactaaatcgtcgcgccgtggagatcgccgaactcgtcctgtggatcggttatatccagtggcacatgcgcacacgcgccacactgccgaccgagccggtgctgggcagcagcgaccatgtgcgcatgcaggacgcgcttctcacctggcaggactatccgaacgatcatctaaagcgcgatgccacaggcaagccctcggttggacgaggcggaaatgagatctatgccttcccggaagccgctcgaccgacctggcccgaagtggacttcatcgtcggtaacccgccctttatcggcggcaaggacatccgcggcaggttgcggtcgggctatgccgaagctttatggcgcacccatccgcagatgaacccgtctaccgactttgtcatgtactggtgggatcgcgccgcggaattgctgacccttccgggcacacgcctgcgccgcttcggcttcgtcaccaccaattcgattacccaggtgtttcagcgccgcgttgtggaccggcatctgacgtccgcgtcgccgatctcgctggtcatggccattccggatcatccgtggacaaaggcaagccgcgaggccgctgccgtgcgcatcgccatgacggtcgccgctgccggcacgcatgaaggcatattacggacagtcattaaggaggctgatctcgatacggacgaaccgaggatcgagttctcggaaaagaccggacggattaattcggatttgacggtaggggccgacgtgacacgcgcacttgcgctaaccgccaacgacgccctttgttcacccggcgtgaagctgcatggagacggcttcatcgtcactcgtgaaaaggcgaaggaactcgggctgggccgccggcctggtctggagcgacatattcgcgagtaccgcaatggccgcgatctgactgcgcattgccgcgatgtgatggtcatcgatctcttcggtttggaagcagagacggttcggcgcgacttcccggatgtttatcagcacctgctcgaaaccgtgaagcccgaacgcgaccgaaataatcgtgcctcctatcgcgatcgatggtggttgttcggagaacccaggcgtgaaatgagaccagccttggaaagcactaaacggtacatcgcgactgtggagacggccaagcatcgcgtttttcagtttctgcaggaaaaagtccttccggataacatgcttgttgtcatcgctttggatgatccattttatctgggcgtactctcttcgagacttcacatcacgtgggcactgcaggcaggggggcgacaaggcgttggcaacgatccaagatataataagtcccgctgcttcgatccgtttccgcttcctcacactacggaaatgatctggaaaagaatcgccgaccttgccgaagagcttgacgctacacgtaagcaagtgctgacggaccatcccgatctgaccctgaccgggctttacaatgcgctggcgatcgtgcgcgatcagtctgctctgtcgcccaaggaccgcgacgtcttgaaccgcggatgggttctgatccttaaggacctgcacgaccggatcgacgaagccgtaatgctcgcctatggctggccggctgacctgacagacgaggatatcctgacccgtctggtcgaacttaaccaggcccgggcagctgaagaaagtcgaggcctaatccgctggctgcgtccggactatcaaatcgacaaactgggggctctggctcaccgcgccgaccgtgttcaaacgctagctaccgccaagccaacgcgatcgcggccagcctttccggaggatcgcaaggcgcaggccggttgtgtcctggacctgctgtcacgaagccaagccgctctcaccgccgccgaaatcgcaagccaattcaaggcccggagcgaggctgaacgagacgtcgcggacattctggcgtcgctggatcgtctgggggaaatcgaaagcttcgataacggacggagctatttccgttcggcgtcgtaggcacctgacggcgaaatacatccgacacggccgatacgcccacctatgcgaggccccgtcctctacgtccgcaacgatgccgaagcttggggatggtagccgttgcaaccggcaaagacaatatcaaacccaccaatcgacgcccttgggcttcacgatcatggcgcgtcgagcgtctgaaactgcccgatacgcacttcgccttcggggaatcgcgcgacgatttcgagttcgccgcccatggcgcgaatatgattgcgcaaggtcgaaatatacatgtctgtccggctttccagcttggcgatgctgggctgttggaccttgagccgctcagccagttctttttgagacaaaccacgggcctgacgcagttcgctcaaggccaggtcatgcgcgatgtcggacagggacacggcgacccgcgcctcgacccgcgtctgggcctcaggcgacattttacgtctcaggtccgcgaacttttttgccattccacaatccttccttgatcaacgcatccaggtggtcgtcatacaaacggtcggcaacgggaacgacgcggtcgtaccagcgatcgtctccggtcttgttgccgccgatcagcaagatggcgctgcgaagcggatcgaacgcatagagcacgcgatagggctcgccctgatgttggatgcgaagctcccgcatgtgggaatgcttcgatccgttgatgccgctggaatgcggatgaccgagattaggccccaacgcctcaagcagcccgaccgtgtgagcgaccgactcctgctcggcctcgttcagatattgccaccaggcgccgaaattatcggtatattcgacgtcccaagtcacaatatatagctcacagggaatattccgtcaagggaatgtggcgccaggggatggttctgtcgggcggctatcttttgcggagtatcgccggcccgcaacaataagggcgacccgtaggccgccctcgatttggtgagaattctctcttgttaacggagagaccccgccgtcgtctctgctaagacacaccacttgaacacgacgatttattcgtgtcaaggtagtgtcatacgcggggaaacgacatggcagataagtatcggttcgcgttcgatctcggcaccaattcgatcggctgggcggtgtatttgcttaatcaggcaaaaatgccggccgaccttgtcgacgccggagttcgtatcttctccgatggccgtgacccaaagagcggcgcttcgctagccgaggaacgccgcggtccgcgcgcgatgcgccgccgccgcgatcgctacctgcagcgccgcactttcctgatggatgagttgatcaaggccggcctgatgccgaccgaagaagccgaacgcaaggcgttggaaaaactggacccttatgtcttgcgtcggcgaggtttggacgagccattgagtctgcatgaattcggccgcgtcattttccacctcaatcaacgccgcggcttccaatccaaccgcatcgcagacgcaggaaatgacgacgagagtggcaagatcaaaacagcagcgaaaaagcttctagccgcactgaaagaacaggattgtcgcacatacggcgaatttctcgccaaacggcaggccgcgccaaaagtacgcgaacgcgaggccgttcgcattcgcctcatcggcgcgggcgccaaagctctttatgatttttacccaacgcgcgatattttgaagcatgagtttgacgcgctctgggatgcccaacttgcctttcatcccttcctactcacagtggaacttaggggtaagctccatgatacgatgttttttcagcgtccgctcaaggacccgattgtcggcaagtgcacgtttttccccgaggaaccaagactggccaaatcacaccctctatcgcaagcgcggcgcatctatcaggatttgaatcatctcagacttaaagaaggcgaagctccggcacgaaatctgacccttggagaacgcgacaaattagcttttgtcttgctttccggtgaggaaatcacgctcaaggcaggtattcgcaagatacttaaatatctaccggccaacacgacaacatctctggaagaaggcggcaagactgacaggctgatcggtgatcaactggtggcccgttttggtaaaaaggggccgcttaagaacatttggggcaatttcaatcttgctcagcgcgccgatatcgcgtggaaaattggtaccgaacaaagtgaaccgaccctcgtcgcctatcttaggacgacctatggcgttagcgaagaagccgcccaggcgacggccaatattaaattgcctgacggccatgatcatctcggtctgactgcgactgccagaattttagaagctctaaaagcagaagttatcccatacaatgtcgcggtagatcgcggcctcgagctgcatcattccgatgaacgcgacggcgtgatccatgatcgtctgcccttctatggtgaaattctggagcgccacactctgggtgggtcaggcgacccgaacgatacggacgaaaagcgctatggccgcttggcaaatccgaccgtccatgttggcttgaatcagcttcgccgcgtggtaaatgccctcattcggctttatgacaatcctgagcagatcgtcgtcgaactggcgcgagacctgaagatgtcacggaagcaaaaagatgagcttgctaagcagcaaaaaggcttcgaggagaaaaacaaggagtgcaaggcccttcttgaatcggatgctagcgcaggtggagcagactacaatccaggaaatttgcgcttaatgcgactatgggaagaattgggtcctatgccgagacgctgtgtgtattccggcaatatcatcggcattgaaaatctgttcaatgccgacgtcgaggtcgaacatatcctgccttattcacgcacgctcgacgataccatggccaataagaccttgtcctttcgcatgcacaatcggctcaagcgtaatatgtcgcccgcagaagccttctctgacaccgaatacgaagagattaggcggcgcgcacagattttgccgccgaacaagcgctggcgtttcgaaaaagacgccatggaaaaatacaaaaaggagggaggtgggttcgccgcaaggcaacttaatgatactaaacacctcgccgtgctagcccgaaaatatctagtcagtgtttgcaacagtgaaaacggtgttcgtgtcgttactggtcagatgacggctctattacggcagcgcttcggcctaaatggcattttgagcgacgacaatcacaagaaccgcaccgaccaccgccaccatgccgtggatgcctgcgtcatcgggattatcgatccgtggattttgaatgagatcgcctcaaacgccgccgactttgaaaataaaaacgagctaagcaaaatcacgacgcgcttcccagaaccttttcgcggcaagcctaggggagatttccgcgagagagttaaagccaagatcgatgccattattgtctctcataagccagaacacggcagtcattccaacgccaaagacaaaagcaccagcggtcaacttcacgaagattcgagctatggaataaacaattcctctgaccgggaagatggcaacctcgtcaaacgcaaagctctcgattctttgaccacaaaagaaatcgacaagattcgtgacggttacataagatcgcaattgcaggaaaagcgtgatcgcttattagagcgtggtcttgggaaaaaagaatttgaaaaagaactttccaaaatattagttaaatttggggaggatcataaggtccgcagggttcgaatattgataagagaaagggaatttatttcaataaaagataggaagaccagaaggccctatcgcgccgttattggaggggaaaatcatcacatagatgtcgtggaggacacagacggtgtctgcaaaggctttgccacgaccgtctttgaattcaaccaaaaggatcgttccgcagagtggaaaacggaataccccgacgcaaaattcattatgcggcttcataaaggcgatttggtccaaatcaaagatgatgatggcattaccaaagtcaaaagagttgttagactcgaaattaaagataagcgaattcgcatagccgatcacaacgaatccggcgtccttcaaaagcgtcatgaggatcccgatgattcatttcgttgggacgcgcctccatttgcgagctttaaggaacgcgattgcaagctctacaacgtggatgaactgggcaagccaagaaaataatacgcttttttggcgaatccttttcccaaagcgtgaaatgaggctgtgaataagtctgtgcataacctcataggcaagtctcatggtcgggcaaatcgtcgaactcgctaccgagggcggacgcatcgggcttgagcgtggctttctgaccgtcacctccgactcgcgcacgggccgtgttgccatagacgacgtcgaggccgtgatagcgtcagctcaaggcttgacttactcgaatgccgccctcgccgctctggctgaacgcggcgcgcctctggtcatctgcggcaagaattacgccccgaccgccgtccttctttcgctcgacggtcatttcgaacaaggccaccgcatcgccgcccaggcgaccgcttccaagccgctatccaaacaactttgggcgcagttggttcgcgccaagatcatggcgcaggcacagatgctggcgcggttcggtcattcccatgcccgcctagcccgcttggcggagacggtccgctcgggcgacccagacaattgcgaagcccaggccgcccaagcctactggccgctgctgatgggtaaggattttcgtcgcgatcgcgataatgccgacatcaacgctcttctgaactatggctatgccgttttgcgagccacggcggcgcgcgctatcgccggctccggcctgcatccttcactatcggtgcatcaccaaagccgcggcgatgccttgcggctggctgatgacatcatggagccgtttcggccggccatcgacatggtcgccaaaacgatctgggatgccggcgaacgcgaactgacgccaaccgtcaagttgcagttggtcaggacattgcaactcgattaccagacaacaaatggccgtacgcccttatcggtttgcctgtcgcgcctgaccaattcgttggcccaagcctatcttaaagaagctgagaagctggattttccgcgtccattggttccgttgcgagacgacgactagtggcacatttatcggcatatcgcatcatgtggatcatggctctcttcgacttgcccgtcgtcactgccgccgaacgcaagcgcgccagtaaattccgcttgttccttttggatcaaggattcgaaatggtgcagttctcggtctatgcgcggttcgccttttcacgcgaaaaagcggaagtcatcacgcgaaaggtcggaaaagccgtgcctgcgcacggaaaagtcgatatactgtactttaccgacaagcaatattcccagatcgtcagtttccgcgggcaaagcgaatcagccttgccgagaaatcccgagcaattggcgctcttttgagggttttatgatcattttctgcgagccgactcaaagaaaagcccttgcagaacaattagttccacaagggctgtcttagcagagaagacgtcggggcccaaccgcaactctagcgtctgcattgggatcttaccgcccgtcttagcagagaagacgtcggggcccaaccgcaacccacgggatcgtcgggcctgacgtcgtcgtgtcttagcagagaagacgtcggggcccaaccgcaacgctgacgttgttccatgcgcccccggtggcgtcttagcagagaagacgtcggggcccaaccgcaaccgaaaggaagcgtaccggcgactggacgaagtcttagcagagaagacgtcggggcccaaccgcaacccacgggatcgtcgggcctgacgtcgtcgtgtcttagcagagaagacgtcggggcccaaccgcaacccagc

SEQ ID NO: 2959 - DNA, 11215 bp, synthetic construct
  source 1..11215: mol_type = other DNA
  misc_feature 1..11215: note = Synthetic
ctggccgccgatggcgcgcacagtgtggtgcgcaacagcctgcatatcggctttcccggtcataccttgccggaggcctggtcactgatggacgtgccgctggaaggcgacatcgatccggaggccgcccatatccgcctgttcgatgatggcggcttcctgttcatgctgcgcacggttgccgatgcgcgcgtggaaaagccgccctatctgtggcgcatcattggcaatgggcccgacctgttcggccgcctgcgcgacgtccgtccggccggcgagcccgtctggtcgtcgagcttccacatctcgcaccgcattgccgatcacctctgtcgtggcaaagccttcctggccggcgacgcggcgcatatccacgcgccgatcggggccaggggcatgaacctcggcatcgaggacgcctgggtgtttgccgagctggcggcgaagggccggctcgatcactacggccacctgcgccggcacgtcgaccacgatgtcgtgcgccgggtcgaggccctgaccgccctggtgctgggcaaggccgcctggctgcgcggcctgcgcaacctgatgctgccggcggtgctgaacctgccgctgcggacccagatcctgcgcaccatggccggactcgatcacgcgctcgaggtgtaggcgcccgggacggatacctttctcatcgccgctgtcaccgtgccgggagtggtgctgtcgccggcgttttcgcaggacatttgtcactgtcgtaccagccccatcccaacgcccccgagcgactgtagaggcaaaccgtgtcgccgatcttgccgttccgcgccaggcgccctttgtatgtaagggtcttaccgtccgcgcggcggatggttacggtcggatatttgctgtcattatcgacggccgtcacgatgaccggttcgaccttcggcctttgcgtatcgagccaggcgttgaggaacagcagtccgccccaagcataacaaagatagacgacataggctccggcaagcgtcttccagggaaaacgaccctcgatccagcagaccagcagcatcaggaccagggcagcgccggcgctccacgccaggggcaccggccagtcaatcatattgtaatcaagaaagccgcgtaagcctaacgcgcccgcggcgccggcggccagattgacgccaaggccgagcggatagacgctgttgtccgtgtgcatcgaccagcgccagcgttgcgaaacgatgatcgcgagcaccaggaccggcgccgccagcatggcgtacatgcaaatgccataggggcgcggaaagcagatggcccacccgtaaagggcgatacgtggccaccaaagccagttcagccacttcaggtctcggtgataggccatcatgcgttcatcgggattggtcccgagccggctgtcgccttccattcgcacccgctcttggtcgctttcccgggcttcgcggttcggaaaccgattgagccactcaacgaaggcgggatcggagcggccaaatctgatgatgcggtgcgccttgtcgttcttgagccgcaaaccgatataaaacggcgaacccgtcccgggggcaaaggtctcgatgatatccgcgtaggctatcgtgcgtgtcgtcaggaaaccacgatattccagcctgtcttcgtggaggaccaggcgggaccgtaagttggcgacgagcaggaaaagactgtgtagaccgcaaagaccgccaagagcgcgcaagaagggcatgctggccatcggcatcccttggatggcgccgctcggcatgttgaggaacaaggcgggcaaaaacgccagataggctacggccaagacgctcttgagggcgtcgccgaagcggggttccatcatgacgacaagcagcatgatcattggcgcgaggagcgccgcaaagaaccagaggtcgcccttggctagaaccgacgccggaaggcagatgcaggcgacactgaaggccccgagcgtcagcgcgccgatcatcaggccgattttggcccaggggcgattttggtagagtcgcggatagaccggatgggtttgccagttgtcccacgccgtttcctgtctttgctgctcttcgttgggaaagctgtccaaccattcaaacagggacttatcctgctggccaaatgtgctgattatgacgggtttgcccgttttcagcctcaggccaacggttgcctcactcatcacggcttccggcttgaaggtcgccagaatatcgccatagcgcacgctgacggtccttagggcaaagcgatactcaaggtgcgttgcatgaagggtcaggcgaccgtttagcgtggtcaggaggtagaacaagccgatcgcacagagcatggcgccaacggccaatccaggggtgaagtctctggggaaggggggattgtgcacaaaaatcaagggcaacggagcacaggttgccaataggaccaaaagcctgatccaaccgttgatctgccgggtgaacgcgaaaaacatgccgccaaatagcagggtgaagaaggacgcgccttccaccaggctggcaagattggccggtatcggaaattgtccatgaagcgcgtcaatcaatgcgccaccgctcgcgaacaagaacagtgccaacaagctgcgccaggcttttgtcgccggccgaaagccatagatgcgcggatatgtcgtctgcctagccatgtcgccccccgaggcatggtctgtttgacgaagacattgccaaagcgtcaagccaatgtccatgagtcaagacgattggtatgcggccgattagcgatccttctggcgggcctggatgaatttttccagctcggcatagtcgccgtgaaacaaacggtccaccatgtcgtcgagcaggctggcgactaggacgtcgcgcgcgatcagggggcggtagaccaactgtccgcctatccgctcggagcgcacgatcttcttgcgcatcaaccgcgccagcagcgtcttgatcgttgactcgctccatgggcggcgccgcttcacctcggcaaagaggctggccggggtgagggtgccctggcgccatagcgcttccatgagctcgcgctcggcttcggtgacgtcgatacgcggttccatttcagaccggcaagccattgagctcgcgcgcccggatcaggctgtgcgccgcggcggcggcaaggcccgccagggcgccggcgacgactagcgcggccatttcgataaacccgggtacaagcatctggatggtgggctcgaatggcaggcgaagcgttgtctgcatcatgtgaaagccgttcagcgcggcgcaaagcgtaccgaggagggggcaaagcaggctcagggccttcatgggcgccgacaggcgagtgaagggtttgataccgttgaagacggccgtcgcggcgcccaggatcatcagggcgatgaaggcgaggaagaggcccttttgcggaagggcggcgtcctggaaaagggtccagcatgattggagcatgacggcgcctattcggccagaacctggcggtcgatccgcgcttcgatcgcccaggtcagggcgatggcgatgatgcccgacagggcgcccagtgcgatcagggtggcgatctcggcaaagccgggggcgaggaccttcaggctcggcgtggcagggaccgtggcaatcccgatgcacatcttccaggcggcataggcggcgcccaggaggccggcgatcggaccggcgaagcgcaggctggacacgaaggccgacccgcccgtgaggcggccgggcagaagcttgaacaccgaaagggcgatcgctgccaccgtggcgaccacaatgccgagcataagacattgctgaaacggcgccgcgtcggcgaagacctcggtgaagccaagtggcgttgcatgggcggcggtggccggagcgataagaagaacggcagcgagtccagggcggaccgaacgaaacggcatggggcatcctttcgagactacacctgtagaccaatatgcgagcggatggggaggctgtcaactcggcgcagactacacatgtaaacttttcgcttcccaagctcgcgagtggagactacacgtgtagtcttccaacctgaacgcgttgataagggagctgtagatgccgaaggatatgctgaagtctttagtgcgccggcgatgcctcgccgctgttacgacgcttggattgatccaggcgcttttcaccactacgccggggcacgcccaggatacaaaggcagacaatagcccgcggcctgacctggtggtcgactattcaaggccggggcaattcgtcacgctggccgacggccggcatatcaacctgcgctgcgtgggcgccggaaaaaccaccgtggttctcgatgccggcggtggcactttcagtctgacctggcgcctcgtgcagagtgatatcgccaggttcacgcgcgtctgttcttacgatcgtgccggctatggcttcagcgatgtcaatacgcggccgtcaacgggaaccaacatcgttgacgatcttcaccagacgctcgccgcggccggcatccatccgcccttgcttctggtcgggcattcggccggaggacagtatgcgaccctctacgccgaaacccatcccgaagacgtcgccgggcttgttttgatcgatcccggattcgccacttggagccatgacaatgtcaccatggcctggtccgcccatcccgaccttcttgccaaagcacgcgcggatcaagcgacccatacggcgctgatgcagacctgcgtgccacggttgcgatcggggatgtataagacgggcgatctgggcgaatgcgactgtatggacacgacgtacatgcccgaacttgctgactatgtgcaccactactgcagaagccccaaacaattcgaaggcatgatcgccgaagaagcagagttgctcggcaagaccggtgactggccgtcccagaccgagcaggaaatgaccgcggccgcccgttcattcggcgcaatgcccgtgacgatactggcccacgggcgcgcgataagttttgccgacaacgacgacctaaacgcccggatggacatagtatggcgcggggggctggtaggcctcgcggcgcagtccgacaggggcaaggtggttgtggtccgcaactcgggtcatagcatacagcttgagcaacccgacgcggtcatcgccaccatccatgagatgctccagatgatctccgtcccaagcgacgcaggtcaaaaataacgactttgcgatctgagggcgcggttccccataggtagccgcgcccccaaaagagcagtcggtgcccgatgatgcctgcgcgcttagagcgcacaagcgctctgccgaacggactaatttgccggtcgtgcgtcaggtagcggcaagtatttttcttgctcagggttgtttgcgccggtgacgaaggtcgacctcgcccgcgagccgaccggtcgacatggctgtcaaccgagggatccgaaagcagactgcaaatgtagtcttatggcctgaactcgtggataaggagctgtagatgccgaaggaaataatgaagtctttagtgcgccggcggtgcctcgccgccgtcatgacgcttggattggtccaggcgctgttcaccgccacgccgggccgggcccaggatacaaaggcgaacgatagcccgcggcctgatctggtggtcgactattcaaagccggggcaattggtcaccctggccgacggccggcacatcaatttgcgctgtgtgggcaccggaaaaaccactgtggtgctcgatgccggcggcggtactttcagtctgacctggcgcctggtgcagagtgatatcgccagattcacgcgcgtctgttcttacgatctcgctggctatggcttcagcgatgtcaacacgcggccgtcaacgggaaccaacatcgtcgacgatcttcaccagacgctcgccgtggctggcatccatccgcccttacttctggtcgggcactcggccggtggagagtatgccactctctacgccgaactgcatcccgaagacgtcgcggggcttgttctggtcgatcccggattcgccactcatagccatgacaatgtcaccatggcatggtctgcccatcctgaccttctggccaaagcacgcgcggaccaggccgcacataccgtgctgatgcagacctgcgtggaccggcttcgagcgggggcgtttgaagagggcagtctaggcgaatgcgactgtatggacacaacgtacatgcccgaacttgccgactatgtgtaccactattgcagaagccccaaacaattcgaaggcatgattgccgaagaagcggctggatccggcagaaccggtgactggccctctcagaccgaaaaggaaatgatggcggcggcacgtccgttcggcgcgacgccggtcacggttctggttgccggtcgggggtggggttataccgccagcgacgacctcaacgcccgactgaccatagtctggcgtgcgggtcaggtggcgctggccgggcagtccgacaggggcaaggtcgtcgtaatccgcaactccggccacagcatacagcttgagcaacccgatgcggtcatcgccgctgtccatgagatgctccagatgatctcggccccgggcgatacaggtcaaaagtagaaactttgcgaccctgggggcgctttattcatagtgcagcgccggtcccggccaggcccggctcgtccaaaaggcgtacaggccggtcgtcaaccaggccacgacgccgcccaccaagatgggcggcgtctggtcccagacgatccggcggacggtctgccacggccacgcgccgaaagctggcgcacggcgatttcacgggcgcgccggcccatcgtacaggccgagagctgaaaccaggccggcgatcacgtcctcttccatggtcacgtcgccgcggccggtaaagcgcagggtttgaccggtggcccgggcgtgtgagccgggggcgaaaacctgaatgggctttcccgaggctttcacaattggaaaaagggggccggcaccccgaaatctaagtcaccagagcgatgtgagtaatttaaacctataagtcagccaactagctgaggttgagttgttcggcaatggctggcctttatcgacacgaagccatgatcccgaaacaaggaagggcgacccgtaggccgccctcgatttggtgagaattctctcttgttaacggagagaccccgccgtcgtctctgctaagacgccgtgacttgaacacaggggggcattcgtgtcaaggtagagctgtgagcgggggagtcatatagtggacagatatcgcttctcgttcggcttgggcaccaattcgatcggatgggctgtataccagctaaaccaagcaaaccaggtcacagacctaatcgacgcaggcgtgcgtatattttccgatagtcgcgatccgaaaagcggagcgccgctggcgaagaaccgacgtggtccgcgctctatgcgccgccgccacgaccgttatattcagcgacgcactttcttgatggatgaactggtcaaggccgggctgatgccgaaagacgaatttgcacgaaaggagatggaagcactcgatccttaccagcttcgcttgaagggggtggaccaaaaactagatttgtatgcatttggtcgtgctcttttccatctcaatcaaaggcgtggtttccagtcaaatcgcattgctgacgattttgaagaagggggcaagatcaagcaggccgaaaggcgccttaagggccagttggaagctgaaaactgccggacctacggtgagtttctggcgcggcgtcaagacgaccctgaggtacgtaagcgcctgccggttcgtgtccgtcttcaaggccgggggatgagcgcgctctatgccttctatccgacacgcgatcttctgaaacaagaattcaacgtattgtggtcggtccaggcaggtttccatcctgaactcacgccagcgctacacgactgcttgttcaacgctacgttctttcagcgtcctctgaagcctcccgtcatcggcaaatgcacttactatcccaaggaagcccgagtagcgaaagctcatttcctgtcgcaagccaggcgcatctataaggatcttaaccacctaaaataccgccgtggcctgacgccatggcaaaccctcacgctagacgaacgcgaccgtcttgcggtctttcttatggcaggcgaaaacttgacctttgataagattcgtaaagaactgaagctcccagctgattcgatcttctctattgaagatggtgctaaaagcgacaagctgattggtaatcagatcgttgaacggttggggtataagaaggggccgctgaagcactactggcccaaccttaccctcgaacaacgtgaggaaattgtcgaaaagctgacctccgaacccgacgaagacgcactggttgattatttacgagccacctacggtcttaccaatgagatcgctcacgctacgattaaggttcgcctgccccaaggccatgacaatctgggcttgacggcgacgacaaagatcttggccgaactgaagaaagaggttgtgtcttacgatgtcgcggtcaatcgtggcattggtgctgaccactccgatgaacgcgatgacgtcatcctggatcgcctaccgtattatggcgaggtactggaacgccacaccgtgggcggtagcagcgaccctcgggatggtaacgagaagcgctacggccgcttggccaacccgaccgtacatgttgcgatgaatcagttgcgccgcgttacaaatgcgttaatcgaaaggtatggtcatcccgaacagattgttttggagttggccccagaactcaagttatcgcagaagcagaaggaagaatttgaacgtgaaatccgcaagaaccgagacaaaaacgaggtgcgcaggcgagtcctagaggatgcaggttattccgcgagttttggtaacttggagttgctgaggctgtgggaggaacttggagcgccagcacagcgttattgcgtgtacactgggcggccgatcagtttgcatcaattgttgagcggcgatgtcgaaatcgagcatatccttccctactcacgcacgctggacgacacattcgccaaccgtaccatcgccttcatcgacgccaatcgcggcaagcgcaatctggccccgtgtgaatcgttccagggagcggaatacgacgccattcgtgttcgctcacgaaccttgccatccaataaacgctggcgcttcgagccggatgcgatggatcgctttgaggacgaggatcgcgatttcctggcacgtcagctaaatgatacgcgacacctggccaaactggcccggaaatatacggagcgcgtatgcaacaatcccaaggaggtctgggttgtcactggacagctgaccgccattgtgcgcgcgcgtcttggattagacggtgttctgagcgacgacaataagaaaaatcgcacagatcatcgccatcatgccattgatgcttgtgtaattggcatttgtgatcgtccatttcttcaatctatagcacaggctgcagaacgccgggaaagtcgggacgagctgagcgaaattacaaaacacataaagtctccgtttcggactttccgagatcgcgtggaagcagtcgtcaatgcagtgatcgtttcgcacaagccggatcatggcggcgccgctgaagatagccgtgaaactagcggcgcgctgcataacgacacgaattacggaatcaacaaaacggcagatcgcgttgatggcgaactcattacgcgcaaggcaatcgatgctttgactgcccatgatatcgataaggtgcgtgacttgcatctacggaaatgtctgcaaatgcttcactccagtgtcggcaaagataccgacgcattgacgaaggcgctcgccgaattcggcgagctcaatggcattcgccgtatccgtatattgaagaagcaggaagattacatctcaatacggaatcgcaagacaggtgaacattaccgtgctgtgattcctggagaaaatcatgcgatggacgtcatcgaaggcgctgatggtgtctggcgcggcattgcgatgactgtatttgatttcaataatcagggccgcaagcccaattggctggtggagcagcccggtgctcgattcgtgatgcgagtacacaagggtgatatgctccatttattggacaagaatggcgctccctctgttaagagggttgtcagtatcaggccgtcgtcaaatttgatttcccttgccgcgcatcacgaaggcggcattttgcaaaagaggcacgatgatagtgacgatgcttttcggtgggattttgcgaatataggaaagctaaaagagcgtaattgccgaccatacaaagtcaatgaattaggtaaagtaccataaatagcgtagacgttggatcccgatcttagcgatcgggggcccgttgcacgcgcagtggcggaatttcttcggctatttgtcgattgttcgtttgaataagcagcgcgagaaccgcgagcaaacgcctacataagcaatcatggtgcaggttggaagctttcgagtgcgaagcgaatcagctttgccagaaaatctgattcaacggatccttttctggcgattccatgaacggcttctttgtttcaacgcaaagaaggccccttgtgaaacaggcagtttcgcaaggggaccctggccgatatatcgtcggagcccaatcgcaacaaggatgccaccgaagagcatgcccagcgcgtcttagcagagatgacgccggagcccaaccgcaactcccatcctgcggacagagcgcgcacgaactttttagcagagatgaaggcggaggccaacagcaacggttcttgattcctcactttcgccaagacgctggcgggaagggagcgcagatactgaatacaaaaagtttgtgttttgtcgtcgcgtagcgcaacttttgctttccgtggtacgaacctcctgtgacgctgggcctgggggcctggcctgatccaggagacgaccatgatcaatcttgccaagcgtatcggcctgacggccgccgtgctgtgcctgaccgcgacggccccggcctttgccggcctacctgaaggcgccaaggcgcccgagttcaagctgcaggccgccctggccggtgaaacctcgaccttcgacctgaaggacgcgctgaagaag

SEQ ID NO: 2960 - DNA, 5286 bp, synthetic construct
  source 1..5286: mol_type = other DNA
  misc_feature 1..5286: note = Synthetic
gcatgtaggtgaagaaagcatagagattcatgatgaccgaattctaattgaaaactttcttatgtgatcattactttatttgacatatgtattttttggcgtaaaacaaatgaatcaggacttcaatccaaattgtgcattcttgagtttgcattttattcaatcagaataaattcgcattcaaaatattcgattatttgaaaaaacttttacatgctataatattttcaaaaattgcaaaattctctgttaaacgataataaatcatatctattcgcaacgataatatactcatgattgtatttaaatttcaagaaaaacaacaattattaattttaaaaagaaaacacatgaaagagtcatgtgtttattttagcggatttgttcaggttaccgctgtacctcacggcgtttacctcgaaaggcaagccttatcttaggactactgatggatattggtaagcttgtacacttcacaataatgattttctaatctgatggatattggtaaatctgtaccacaatattcccaagttcaagtttatattaccaatttattttttagttgtcaatagatgtcttataaaaaaaacttcaaaatggaaaaatatttcgaaaatatgtatttaatattggattgatttaataaggagaatatgatggaacgtacctatcgttttggattcgatattggcattggatcaattggctgggcagtaatttctggcgaaaaggatactgcaaggatcgaggactttggcgtaagaatctttgattccggcgaaaaatcagatggtaaaagcagaaaaagtcaggagcgaagggcttttcgaagtgtgaggcgattaacgaatcgtcgtcactttcggaaaattcggttaaaaagatttttagtgaacatcggaatgctgacagatgatcttttaatcaatttatctaagaatgtggatgttaatacaatggctttaaaagtcaaagctctggatgagaaacttacaaaaattgaaattgctcaatgtctgattcacacctgcaatcatcgaggttataaacctttctatatgattgatgatgaaatctcagattctgatgcggaagctacggatgaatcagaaaagatgcttcaaaccgcatattctcagatgatgaaaaattacaaaagaagcggacttcggacaatatcggaatttatttgccaaaagctgcccaataacggaactgattttccaaactatcgaaataaggagggaagcgacaattttcgtctgattccacgaaaactgcttgaagaagaaattgaaaaaatactgtttgcacaaagcagctattatccggaattaactgcttccaatatacaaacccttaaagagatcatttttgcacagcgatgttttgaagacggtcctggtgatcctaataataagtttcggcggtatacgggatcattgggaaaaatcggagcttgtccattttataagggattggaaaggggatatcgcagtacgctcattggagatatttttgccgttgtcaatacactctcgcaataccgttttattaatcaaacaacaggagaagttgcattaccgtccgatgcagcaaagctgatgctttcgcacgtgattgaaaccggtaaagcctctataagagaactccaaaaattggtatctcctctgaatattcttattaaaatcaatgacaattctgagagcaaaaatctttccaattctataaagtttatcaatctattgaagaatgatgtcgaaggatcgggtctctcctggaaagatttcattgcggaggaacaatttgattgcgggcatccatcccgaattcatcaaatcggtgttgttctttcaaaatatcagacaccctctaaacgagagaaagcgctggaagatttcgaatttctcacaccggagttgcgcagccgtctcagtaatcgaaaaacacatggggctgcaaatgccagtgatcaattcatgtgtgaagctattcaggcttttttaaaaggagaaatctatggcaattttcaataccggacaacggagcgaattgccagtcaggatatgaatcaaagttttcgcaagttaggcgcggaattgctgaaagatgaagaattcaatgataatccggtggtgttcaggtctatcaacgagacgcgcaaaatcatcaacgctttagtaaggcgctatggttctccggaggcagtcaacatcgaagtggcttcggatcttaaccgcggttatttagccaggcaggagattagaaaagaacaagccaaaaaagagaaagaaaatgaattatgtcgtatgaaaattgctgaactgctgaaaatagattgcactgaagttaaaggttcacaaatcgatatgtataagttatataacgaacaaaatggcaggagtctttattctggagtgaatttgggaggattggaagcggttctgagaaatacacataaagaatacgaaattgatcatatcattccttattcgttgattcttgacaatactttacataataaagcactggtttttgctggagaaaaccaggcaaaaggtcagagaactccactgatgtatttatcagcggaacaaaaagaaaagtttcttgagaccatcaatcaaatgttcagcaggaaagagaatccgatcagcgcaaaaaaatatcagtactgtatgctgaaaaccgtctattcggatgaatctcaggaattgttgagtcagtggaaaaccagaaatatcaatgatacgcgttatatcacgaaatatttggtcggatttattaagaaatacttacagttttcgggagatgcgaaagtatatggcgtaaagggaggctatacctcgcaatttcgtaaaatttggctgcaggcaattgacggtgaatggggctcagaagaaaaagatcgaacatccgacctgaatcacgctttagatgcagtgatcattgccaatctgacaccgccatatcttgaaattgcttcggataataacaagctgcagcaaatcttccgcaagaataatggcgccgagaccagggaatacaatgagtatctcgaggattgtgttcgaaagatgaaacgctattacggctttcaggaatcgtatacagtcagtctattaaaaaatccgaatcgcgtgccggcttatgcgccgaaattggatacagaagtggatatccggtttaatatcacagatcctgcaaagtttaacgagaaagtcaacaatttttatggcgattgctctgattttatcgtccccccgcatatacccctcgtgtcctataaaccggaaaggcgtttccagggacagatcgccgattcaaatttcatcaaaattcgtaaagtggatggaaaagatagacgcatcgttcgaaagagcatcaaggaaatctgcaaaaaagatatcgcggatttatatacccatgatcaggatttgctgtccagtttatcccgtattctttcagaacgagaagaaaaatattcgattgaaaaatatatggaagaaaattcattaaaagaattccgaacggattgcggtcaattggtccggaaagtatctttgctggagaaaaatgcggtttcgaattaccgggtgaagcaaatctccgatacaaatcattccattttaagcagtctgaaatattactgtgtcgaagtgtataaggatgtaaaaggcaaaattcattgctggggaattcgctatgtggatattgttcggaaagggaaaaaactgcagatcaaaaaggcgagcattcctcctgattatgtatctcatgttcattatctgatggccaatgattatgtggagattaccgataagaatgggaaggtaaaatgtgccggatattaccaatccgtaaaaaacattaatagcaatttgttctattttaaacaaatgggattaagtgaaataatcaaaattggtattgcccaaacggatgaggtcaggaagtttgatatgagtatcttaggcgaaaaaggaggtgaaatcaaatgttccgcacaatcattgtttctcagggagaaagaatcagcatccgcgatcgatgggttgtcgtaaacgatggatcggcagaacggaaaattccgatggatgatatctattcggttgtgatcgacaatccaatggcgagtttaacggttccggcaatgaccgcattaaccagcaatggaacacatttgcttttgtgtgatgaaaagcatatgccggttacggtagttttggcacaaaaccatcattatcgaccgcttgctgtcatccgaaaacagatcaacttgcctgagactttcaagaatgacctgtggaaaagaattgtcaaagggaaagttcagaatcaggcgcgggttctggaactctgcggtgttgatcaacaacgctcagaaaggctatatgcactggcggatgaagtggtccctggcgacattgggaatcgagaggggatcgcagcaaaaatgtttttccgttctctttttggcacttcattcatccgtatgaatgatgacgggataaattctgccctaaattatgggtatgcgattctccggtctgccgtcagcaaaacactggcggcatatggatacaactgtgtcatcggaattcatcatatcaatgagacaaatccctttaatttggcagatgatatgatggagccactgcgtccgatcgttgatctctgggtggatgaaaaccatgaagatctgtttgatgaactgacgaaatatcatcgttatgcgctcattaatctggtcaatcacttcatgttatttgacgggaaacgtatgcgagttcgcaacgtgatcgataaatatatctcgagtctgacctcggctattgaaaaacaggatgcttccttgttgaaaatcccgatcattatccgtaatgatcccatgaatgagcttgacgaagatgattaatcgatttatgagaattctcgtccttttcgacctgcctgttacaacaaaacgggctcgcaagcattatatgaatttcagaaaatttctgatcaaagacggatatgacatgcttcagtattcggtttattgccgtgtggttcggaatcatgatgattcaaaaaagcatattacacgattaaaaacaaatctgcctccgcaaggatctgtccgtgttatgctggtaaccgaaaaacaatacagttcgatggagattctggttggaacaaaaactgcatcagaaaacttcctttgtcctgaagaattgcttgaagtgtgactttttttgtcgtataatgctgtttaaggttttagttctctgatggata

SEQ ID NO: 2961 - DNA, 23399 bp, synthetic construct
  misc_feature 1..23399: note = Synthetic
  source 1..23399: mol_type = other DNA
acacggactcatcggccatgatcggcacgggcgaggccgcccgcacgcgcgccatgccggccaggtcctcgcgcgcgacgggctgctcgaccaggtcgatcggcagcccgtcggcggcgaagctctcgagcacccgcacggcctgctcgggcgtccatccctgattggcgtcgatgcgcaggcgcacccccggggcggcctcggcgacggcggcgagccgctcgcggtcggcctcggggtcgcggccgagcttgatcttgaggatcgagtacccgtcggcgacggcctgccgggcccgttcggccatcgtcgcggggccttcgagggagacggtcatgtccgaggccagcgccgcgccccggtccaggcggacgccccgatcagccccgagcagctcgaccagcggcaccccgagagagcgggcgagcgcgtcgtgcaccgccacatcgacggccgagcgggcgctcgaggtgtgcgcagtgcgggccgcgtcggcgccaccgctccgagccgctcccgtgcctcccgtgccgccgtcgaccgcctgccgggccagggaggcgagctcgtcgggggtcccctcggcgtcggtcagcgcggccgcgatcgggccgttcacggccgcgaggatcgtctcggcgctctccccggtcaccgcgacggtctcggccgccgatccctgaccgcgcgccccgtcgtccagctcgacgtccaccaccacgtaggcgacggcctcggtgcggcgctgggccgtcacgaagggccgcagcagccgggaggcatgcgcgtgggcgcggatctggcgcagacggacgggggtgtcacgacggacggtgcccccacgggcggggtcggtgctctcaggctcggcgctcatgctcacaagcctgacatgatctgccctccgagcaggccgatccacgtgcccatgagcgagccgatcagggcgaagagcacgccgaccggcacgagctgccggttgaacgcgccggccaccacgggggcggaggcgatgccgccgacgttcgccaccgacgcgacggcgacggagaacagctcggtgcgggtgagcttcgcgtagatcagcatgatcacggcgtgcacgacgagcaccgtcacgcccgccaccaggtacaccggggcctcggtcagcgccgagaagtcggagccggaggcgatctggccgatcacgacgaacagcaggaccgtcgcgatctgctgcgagccggggatgcggccgagcggggtctgcgccgcgatgaggccgagcacggagaccagcaggatggtccaggcggtcgagttcatcacctcaccgacctcgggcatggcctcgccgaccgtgatggcgccccaggcgatcaggagcgagccgaggatcaggccgatgacggcgggcacggtgactggccggtcgtcatgctcggcggcgcccatgtgggcgttcaagtaggaggtgtccgcccgggtgaagcggttgaagcggtcggagaacatgaccgaggagaagacgatcatcagccacagcgagtagacgatcgtgtccgtgatcagggcgtagccgaagatgttctcgggggcctggaggatgtcctgcaccgcggccatgttggcgctgccgccggtccacgagccgagcagggccgccagggccttccacgcttcggggtcgagcgcggcccggaacgccaggaacgcgacgacgatgcccacgagcagcgagagcgaggtgacggcgtaggtcagcagcagcttggggccgagggagaggatgcgccgcaggtcgcagccgagcagcagcaggaagatcatcgccggcagggcgaagtccttgagattcttgagcggctcgcgcgtcgcgtcctcggtgccgaacaggccggcggagttcagggcggcgcagagcaggtacatgaggacgacggccgggacgtaacggaagaacttccagccggcggtcttgtccagcacgaggaggatcgccgcaagtccgcagaccacggcgatcatgagcaggccgttcgtgatcaacggagcctcccaggggtcgaagtgggcggcgtcggcaggtggacgcggaggcgtccggcgacgccgggtgcgcgagtggcgccgatcactatagctgtgggcagggtcggtgatgtgctcggggtcggcgacgtgcgcggcgtcggtgacgtgcgcaccgggcaggcagactggcccgcatgaacgaccaccgtgtgcgcaccgtccagctgagcgcctccggtcaggaggcgatgatcctgcccgccgaattcggcaccggcgtggagctggcgatcggcggggccgtgcagtcgcacgtggaccccgacgagccgaggctcgtgcgctacgagtacctgcgccggatcgcaaccgtgttcgacgtggccggcgcgccgggcgcaccgctgcggacgctgcacctgggggcgggggcgctcaccttgccgcggtacctgcaggcgacgcggccggggtccgagcagctcgtcgtggacctggaccgagagctggtggacttcgtcgtgggcaccctgccgctgccggcggggacgcggctggagtcgatcgtcggggacgctcggatggtcgccgtggatctgctgatggagggggagcgcttcgacgcggtcgtgctggacatcggcacgggcgaggacggggccgagcacctgcgcggcaccgagttctacaccgagctgctggggctcgtcggggtcggggcggacacgtccggcggcggtgaagcggaggccgagggcggcgtgctgctggtgaacatcggcgatgacgcgggcctgcggttcctcggcacgcagatccgggcgctcgacgaggcggcacgggccggaggtccaggcgaccgcgctgccgggcccggcagcggtgacgccgagctcggcgtgtggacgctcgccgacgcgggaatgctggagcggcgggaggccgggaacgcggtgctcgcggtcgggccggggctcaacgaggtgatggccgaacggctgcgcgccgccggcccccacccggctgccgtgctgaacccggccgagtcgcgagagctggcagaccgcttgaccggttgaacccaccccgaggccaggtcccaggccctgtccctcagcacacccacccctgccgaacgggctgccgcccctgctgcctcggccgccccagccgaacgatggtgcactcgttccagcccagcgggcgatctggtgaaagcagtgcaccagcgttccgctcaccgccgacgcgggtgcagtcatgccaacaaacggcccgattccttggaactactgcacccgcgttgcccggacccccgctgtgggccggtcagccgatgcctgtcccgcccactgagcgcacgtcgcccagccccgcgcccacgtcgtcggccgcccctctcagcgcacctgctcccgcagcacgttgcggcggatcttgccgctgggcgtcgccggcaactcgtcgaggtaggtgatcgccctcgggtatgcgtgccgcgcataggtgctcttcacgaactcctgcagctcggcggtcagcgcgtcgtcacccgtgcgcccctcggccagcacgacgaaggcgtgcgcaatctccccgcgctcgacgtcgggggccgccacgacggccgacgcggccaccgccgggtgcttggccagggtggactcgatgtcgaacgggccgatccggtagccggccatcaggatcacgtcgtcgtcgcgggacatgaaccggaagatcccgtcgccgtcgcacgtggcgaggtcgccggtcaggtaccagcggccgtcgtcggtgaacttgtccttggggtcctcgcggtcggagccgtagccgacgaagctcatgaacggcgaggccgccacctcgatcgcgagacggcccatccggccgcgcggagcctcgtcggtcgagtcggtctcgagcacggccatccgccagcccggcagcgcgacgcccgtcgcgccgggcaccggatccggggcaccgtcgacggcctgcgggaagccggcgcacatgccgagctcggtctgcccgtagtggtcgtgcacaggatggccgcggtcccgggtccagtcgaagacgtcggggctgagcggctctccggccgaggagatgcggcgcaaggcaggcagctcacgcgccccgtcgctgttcttcagggctcgcagggcggtgggggcggcggcgaagtcagtgacctcgagccgctcgagcagctcccacgtggcctcggccttgaaggtgtcggcgaccacgatgctcgggacgccgaccaggagtggcccgacgatcacggtgtagaggccgtaggcccagcccgggtccgcggcggaccagaacacggcgtcgggctcgaggccgagcgcgtaccgcatgtaaccggtccagccggtgaggtggtggcgggtgtggacgacggcctttggcttgccggtggttccggaggtgaacaggtgcacgagagggacatcggggccgacgccgccccggtccgccaccggctcggcggcatcgacgtcggcctggaaatcggggtcgtcgacctggagcacggtccaggcgccgtccgggatcttgcccgcctgggcggactcggtgacgacgacgcccgcccccgaacgctcgagccgatcgcgcacggcctcggtctcgaacgccgtgaacaggggcaggtagaccgcgccgagccgccaggcggcgaggatggtggccggcaggtcaaggcacttgccgacgagggtggcgacgcgactgcccggcccgatgccgtggccggcgaggacagacgcgatgcgcgcggaccgggcgtcgaggtcggcgtaggtgtgtcggatgctctccccgtcggcgccgacgacgacgtaggccacggcgtcccgcgggtgctcgtgcaggagcaggttgacgacggtgcggtcggggtcggccaggcgatcgacgatctgccggatgtcctggtggtcgacggtggtcacagtgcgtcctttcgccggggtctcggcgctgcaggccgctgccgcccgacgcctcattcaagacggcacgacagtgtgttctgcagcacattctcggcgcaggctactccaagcggcggcatcgagtcgctgtgcgacgggcggcggaccgcgtgaccgaagaaggggcacgactgctggcacgtctcacgtgacgctgcgggccagcgccggccgcgtcacgtcgacgcccagacggacgagcagcacaccgagggccaggcacgtgagcatcgtcagcatgctggccggcgccaggaacactccggcccccaggatcggcgcagccgtgacgacggcgaacaccatgctcaccgtcagcacggtgccaagcgcggacatcacggcccgccgacgcatggcgtgcagggtgcgcaacggcatgcctgcccacgtcagcccccggtgcagctcggcccgatcgagcacctgagcggcctgggcgatggcaacggagcagccggccagcaggaacgagatcaccatggtgacgagcacgcccgtgcgcatgtcgagcatgagcgtcaggtcctcgcccgtcgcacccgcaccggtcgagtcggtcccggcggcgctgagcaggccgaagccggccgctcccaccgtgcccacgtaggtggtcagcgcgacgccgccgacctgccgccacgccagcttcggcgactcgaggacggtccgtgccgccaccagccggtcggcggtgcgcgctcgtcgcacctgccgtcgggcgacgaccgcgagcacccacggccccaacagctgcacgccgatcaacggcaccagcagcgttacgaccaacagggacgccatcgtgaccatgtccgccgacgcgcccatgagcgtgccggtggcctgtgccgccacgagcagtccgacggcaagcagcacccgggtccaggccgcgcgttccggtcgccgccgggtgcgcacgcccaacggcgtgacctcgacggcccgcagcccggccagagcggagagggcgccgaggacgacgacgcccgtgacgattcccgccgtcgccggcaggccgagccactgcgccgcgacgccgatgcggcggccggcgaaaggaaggaggccgatcagcggcatgagcgccagccagccgagcagcccgaccaccgctcccgccgcggccaggacggcggcctcggcgactgcgagcgtccggatcatgccccgggaggcgcccaggagccgcagcgaggacagccgttcgtcgcgccgtcgtgcgagcaggcgggcggcggaggcggccagcgagcacagcgggacgagcagcaggcccagtgcgagcgccgcgagcacgcggtagacgtcgacgaggtacgggtcgccgaagccgccgagccggaagaagaatgctccaccgccgacaacgccgagggtcagggccgtgaccaccgcgaacgcggccaccggcagcgtccaaacgccgcggtcggcgaagagccggcagaggaacaggcggacgacggacagggagggggtgcgccggcggctcatcgcgcatcctcctcgatgcggccgtcacgcacccggatcagccgcgcgcagcgggcggccacggcgtcgtcgtgggtgacgaccaccagggtgcgaccgcgcgagaccgtcgagtcgatgagcgcgtccatgacggcggcagaggtgtcgctgtccagggcgccggtcggctcgtcggcgaacaccacgtccggctccccggcctgggcccgggcgatcgcgacgcgctggcgctgtccgccggagagctcccccggacggcgcgactccatgccggccagcccgagggaggccagccagccggcgccgcgtcgttcggcctctggacggggcacgccgttgagcatgagcggcatggcgacgttcttgacggccgtcagctcgggcagcagcaggccttcctggaagacgaagccgagtcgttcgcggcgcagggcggcgcgccgctcctcgtcgagcccggtgacctcgacgttggagtgtcggccgccgccgagcaggaccgtcccggagtccggggcgatgatgccggagagcgtgtgcagcagggtggtcttgccggagcccgaggggcccatgatggcgacggactcgccggtgcacaggtcgaggttgactccgtcgagggcccggacggggccgtaggccttggtcaggccgcgggcggcgagggcgacgcgtgggccggacgccaacgcggtcggggctccggcgggcgcgagaggagcgggggcagggtcaggaggggaggcggggctgtggtccatgtcctccagcttcgtcggcgggacatcggcccgcgtctgccccgaggaggagtccgagcggcgctgggtcatacccggggcggaggggccgggccgggcgcctccctcaggtcagcatcgtgagcagcagcaggttcacgggctcgcccgcgtcggccggggcagccacggcatgccgcacatgggcgggcaggtggacgatgacgcccgggtcgagccggacggtccgctctccgacggtgaagtcgagggcgccggcgaggcactgcacggtgatggggtgggcggcctcatggtccggccaggactgccccggcgcgaaggagaacgtgatgatgttcgcgccgtcgccggagtgatgccgctgcacggccccgcggtcgcgggacggatccggcgcgggggcgtcggagatcagatccaggacggtcatctggcccgcggggtcggtggcaacagtggcgtcgggtccggcggcggagtcagcggcgttggcggggtcagtggcgttcatgccccgacgctaccgccccggccgaccgcgctgctgcccccgccgtcccccgcccttgccgcacatcgtttatcgatatatcgtttttcgatatggagcaccgcctcctacatcaccatcacccggcatcgcgaagggaccgccccatgagcgccaaccagcacaccgcccccggccgacagtcaccacaccgcaccgaccagcgccccacccgcccccagatcgacccgctccgtttcgaccgcacggacacgatcatcacgggcatcgtcatgctcctcgcctcgcttggcggcctctgggccggcgtcgtctcccccgcgctcgcgtgggccaccgggcggccgttcacccgcacgatcgacgcccccgacggcgccgcactgcgctcgaaccccggttcggacgccgtcgccgagtcggcctccgcaacgatcccctcccccgacgccccgctgtggatcgcccgcctcatcgagggcggtctgcacgccgcgctgctcgtcgccgtcctgtggctgctgtggggcgtcatccggtccgtcacgcacggccgggcgttcgaccgcgccaacgtcgcccgcctgcgatggctggcggggctgctgatcctcggtgcggccctgtgcggctcggtctcgggcgtcgtctccggcatgacgcagaacgccgtgttcgtgcgccccgggacgacggtgatgtttgaggcctcgttccactggcacctgctggcgatcggcgcaggcctgctctccgcgtgcctcgcggaggcgttccggcgcggggctcgcctcgaggacgacgtcgaggggctggtctgatgccggtcgaggaaccgcaccgcgtcgtctgccacctggaccggctgcttcaggcccgaggcatgacgctcgcggccctcgcggagcaggtcggggtgacggtggcgaatctgtccgccctgaagaaccagcgggcgaaggccgtccgcttcacgacgctgacggcgctgtgcgaggcgctggactgccagcccggggacctgttcagcgtcggctgacgggggcggcctcggccggacgtcggctcggcatcgacgccagggtcacggcggcgagtgcaccgagcgtgccgacgacggtcattgcggtgacgtgggatccggcggtgggggcgatcaggtccacgacgagcgagccgacgaggttcccggagacgaggccgagggtggtggcgaacacgccgatgcgggggacggcgaccgcgctgaacccgatgaacaggcaccccaggggtccgctgatgtagagccgccagtcagagggcaggctcggcgggccgctgccggcgagcacgctgagcgcggcccagaccaggccgagggccacggtgccggcggcgaagttggtgagcgttgcgggcagggcgctgccgtaggcggtggcctgacgggcattgagcacctgctgttcggcggttgcgagcccggccagcaggggcagcgcggcgaacagcagccacagcggtccgacgtctgcgccgccgagctggggccacacgacgacgaggaccgcgacgagggcgagccccgcaccgatcaggcggcgcggggtgagatggcggacgccggcggggctgagtccgagccggtcgacgagcatgccgccgacgacctggccggtgacgaccgagaccgtgaacacggcgacgccgatggtgccgatcgtcagggcctgggccagcacgaggacaccgccgatcgcgccggcgaggaagtaccaggggcgcacggtgcgcgcggcgagcgcgggacggacggcggccaggccgcggcgcccggaccgggtcagcgcgctgaccacgaccatcaccaccagccccagcgtgaacgagcagagagcggcgagcacggggtcgccggcggcctgggccagagcggcgttcacgcgcccctgcacgggcagcacacagccggcggcgacggcgagcacgaagaacacgatgctcgcccgcggggaggccggcggggccgtgggggtggggcggtcggcaggaacggacggcggggcggcggacatggcgctcagtgtaggagtgagactctgggcaggagtcatgggacctcaaggtcagaggtcaatgtaacgtgttgcacagccagctctgcggccgaggtcggtcgcccgcgaacggagtagtcgatgacgaaccattcccccgcaggatcgatcagtagcaccgactgggttctgggtgtagaccttggccagcgcagcgtcggtcttgcagccgttgccctcgacccggacggcactccaaccgagatcctggcgtcgaatgtggtgcggatcgacggcggcctgctgcccggatccgaggagtcgccggtgagccgcaaggccgcagcgggaatggcgcgtcgggtgcgccggttgcacagacggcgccgcgcgcggctgaaggcattggaccggcgcctcatggacctcggcttccccgttgatgacggccctgagacatacgagtcctggttggaccgcgcgcgcctcgtcgagggccgcatcgccaacgaaaccgagcgaaagcgcgccacctcccgagccgtccggcacatcgcacggcaccgcggctggcgcaatccgtggctgtcctggtccgcgttcgcggaactctccaccccgagcgacaaccacaggaggaacctggctgctgccgcggagcgtttcgacagggagaccgagggctggacggtgggtcagctcggcgccgccggcacggacccgcgcatcaccattcggccgaggacagcgaaggacagccgacgtatcgttcacggggaggccgcgcttctcgaacaccgcgtgctgcaagaggatcagctcgccgagctccggcagatctggactacgcaggagtgggacccggccgagctacccgagctcgaaaaggccgtcttcacccaggcggaacctttcgtgcctccggggaacgtcggccgggacgcgttgcccggcatgcagacgcaccctcgggctccccgcgcctcgctcgagttccagaggttccgcatccagagcgtcgtgggcaacctgcgcgttccggtcaccgaacgctcacgggacctccgccccctcactcccgaggagcgggaacgggttaccggcctgctcgagcggtggcacgagcgggaaggccacgtaccgggcgaacgccccacgtggcgagatgtcgcagaggctgtgggcgtctctctgcgcaacctccgggggcgcgacacgagtgactatgccaccgcgacgcctcccacgatggaaaccctggaccgcttgaaggccggcattgccgcgctgaaaccggcggccgtgcgacgggatgtcgccgcgtggttcgacgaggccgaggacgaccagatctccgcattcgtgtcctatctggcggactccaccgacgcgtccaatgaggcgctggacgaggcaggactcaccgacatcatcaccgggtgggacgaggccgcgctggagaagctcggtgacctgcccctcgagcccggtcgtgccgcttattcgctcgagtctctgaaccgtctgaccggccgcatgcaagccgacgccgtcgacctgcaggaggcccggaagcgagagttcggcgtcgacgattcgtggactccccccacaccctccatcgagacgcccaccggcatgcccgccgtggaccggaacctcgttgcggtacgacgattcgtgatgagcatggtcagccagttcggcatgccgcagttggtcgtcatcgaacatgtccgagagagcttcctcggagtcaccgcggtcgaggagctgcgtcgccagcaacggcttgaccgacgacgccgggagaccgctgcgaaggaggtggcggcggccgcttctgggaaggagcccagagccgccgatgtacgccggtacagcctcattcagcggcagaacggtcaatgcgcgtactgcggcaccgccatcgggctccggaactccgaactggaccacatcgtgccgcgtgccgtgggcggggcgagcactcgagccaatctcctcgcagtgtgtcgcgcctgcaacaacctcaaggggaagcagcccttcgccgtgtgggccgccgccgacacacgcacggacgaggacggcgagaagctcgtctccgtcgaggcagcactggcgcgcacacgcagctggatggctccgagaccgtccatccgcgaacgcaacgaactgcgtgagatccgccaaaggctgcgtcagcgcgagtctgatgaacccatcgacgagcggagcatggaatccaccgcctacgcggccacggcactcgtggaacgggtgcagaactacctagagtctcagacaccagaaggcgtccagacaccaccggtgcgcgtgtaccgcggctccatcacagccagtgctcgaaagtcctcgggggtggacaaggtgatcagactgcggggcaagtccatgaagcaccgcggggacttccggcatcacgccatcgacgccgcagtgtgcgcgctcatcacaccgagcgtcgcacggacactcgccatccgcgagagcctgcggaccgcccatcgcttcaccggtgacgagcacgattggaagtccttcaccggtgactctcctcaagctcgcgccgaacacaccgcatggacggcgcgcatgcagaccctcgcgaagctcctgcgcgatgccgtggacgcggaccaggttcccgtcagcattccgcttcgcctgggtcgccgcgtcggccgggtgcacgaggacaaggtccgcccgttcgactctcggcccctcggcggaacctggtccgccaaggagcttgaacgcatcgtcgaccgacgtctctacacggccctccaccacgtggccgcttccgctacctcgggcgtggaggtgacgccggagctgtgcaccgaactgggctcgtccatgggagccacagtcaagctgtacggttcgcccgctgcccagattccggttcgcggtggttccgcccgcctcggtgcgatccaccatgcgcgactgtatgcatggcgtgggacgcgtggcatcgagttcggcatgatgcgtgtcttcgcgggggaactgaccgcgatgtggccgtcgcctgctactgacgtgttgaccgcgcccgtgccggaatggtccatgtcgtatcgacgcacggcgcctgcggtcatgcaacagctacgctccgataccgcggtccaggtcgggtggatcgccccgggcgacgagattgtggtcctcccgccccgtgagggagcacgagcctcctcgctggacagcctggtgtcatcggtcggagaggaccgatggaccgtcaccggcttcgaacgagcgacaaccatcaacgtcgctcctcgcctgctgtccgccgagggcatcagtgaggagacgcccaaggcggtcacttccgtcctcaaccggcctggccgcctggccgctagcagtcttctgcctcgcatccgcgtcatccgccgcgacgctcttggccgggaacggcggcgaggagggggccggttgccgagtagcttcgtgccgttcgaggtcgctgagcagcggctccagggtgattgacggtgaccggctggcgcattctcgacctctcgcatttcgagggttccgtccgcgtgactcgtggggccgtggagatccgagggcagcgcatacccgttgcggacgtggatctcatgttgatgggccccaaggcccacttcggcggggcacttgtgcaccgagcagcgggggcgcagacctcggtcatcgtgtgcgattggaaacatgaacccgtcgcggcgatgtacccatggtcgtcgaacacgcgtgtaggcgcccgtcagctcgctcaagcggagatgacccgacctcgaaagaagaacggctggatgcggatagtgaaggccaaggttcggtctcaggagaacactctgctgttcgccgaacggttcgaggccgccgagcgtctgcgggccttgagcactcgagtacggtccggtgaccctcagaacatcgaggcgcaggccgcccgggtctactggcaggccatgtacggcgcggacgggttcacccgggtgccgggggcggaagacgccgtgaatgcggcccacaactacggctacacagtcctgcgagggatcgtattgagcgccgtggtggcagctggcctgaaccccacactcggcatgcatcatcgagggcgcggcaacgtcttcgccctggtcgatgacctgatcgagccgtttcggtgcatcgtggaccgcgtcatcatcgcggatcccgaactacgcgaggacttcccccacgcggacgcgcgacgagcactggtagaccgtattcttgctcgggcatcggcagctggggagccgcaggacggcaagggcccggccgcgcagattcgggacttcgtccagagctacgcgggctatgtcgaaggggaggcagacgtgctggctgtgccggtgatgtgagtggcggaccccgtgtggatgatcgtcatgttcgacctgcccgtgaaaacgaaagcgcaacggagcgcagccacacggtatcgaaatgagctcttggacttcgggttcgatcgggtacagctgagcgtatacggcatgtacttcccgaatgcggcacgttctcagagcgtgctcaacgacgtccgtgccgccattcctcccggtggagccgtgcgggtgctccgcttgagcgacgcagtctggggaagtatgaagcgttatgagggcgagcgggagcagcagccggagcccaaacgggagcagctcctgctcttcgattgacgccccggcagcacctccgagctatctggttggctcggtatagtcatctagcttgatccgaagcgaccttgaggctgggaaccccgccggtccctcctcgatagactcctgacgagcccggtcacgtggtcaaggtcgttgggaaccctgccggtccctcctcgatagactcctgacagcgttcacgcagccggcgcccgcgttaggaaccctgccggcccctcctcgatagactccagattctccgcccaccacgccgccgcctgttgggaaccctgccggtccctcctcgatagactccactcgcgccgagggatggcggtggatttgttgggaaccctgccggtccctcctcgatagactccccacgatgccgcgacccgcgcgcagggcgttgggaaccctgccggtccctcctcgatagactccggcgtcgatggggcggcagcccagaagcgttgggaaccctgccggtccctcctcgatagactcccacaacagcgcgcaagccgccgcgtcgagttgggaaccctgccggtccctcctcgatagactccagaagacgctccgccctttcgagcagaggttgggaaccctgccggtccctcctcgatagactcccactcgttgcgcgcctgtgccagcgactgttgggaaccctgccggtccctcctcgatcgactccgtcgaaaccgcgacaccacaccgaaagggttgggaaccctgccggtccctcctcgatagactcctgtgagcaaccgccatcgcggcacctctgttgggaaccctgccggtccctcctcgatagactcccccaacgccgtgcccgcgtgctcggtacgttgggaaccctgccggtccctcctcgatagactccgctcgaggtccacgtccccggctcgcaggttgggaaccctgccggtccctcctcgatagactcctgcgcacgtgcgaggtcgatgttgggccgttgggaaccctgccggtccctcctcgatagactcccgccacaacggcagcagcgcccgaatcagttgggaaccctgccggtccctcctcgatagactcctgtgagcaaccgccatcgcggcacctctgttgggaaccctgccggtccctcctcgatagactcccccaacgccgtgcccgcgtgctcggtacgttgggaaccctgccggtccctcctcgatagactccgctcgaggtccacgtccccggctcgcaggttgggaaccctgccggtccctcctcgatagactccggggggcggcggtagccccccgcgacgcgttgggaaccctgccggtccctcctcgatagactcctgcgcacgtgcgaggtcgatgttgggccgttgggaaccctgccggtccctcctcgatagactccgccctcgtcgtccccagccacagacagggttgggaaccctgccggtccctcctcgatagactcccgccacaacggcagcagcgcccgaatcagttgggaaccctgccggtccctcctcgatagactccttgatcgcttcgagaccagacaccgaccgttgggaaccctgccggtccctcctcgatagactcctttcgttcgatgcactggaagcgatgatgttgggaaccctgccggtccctcctcgatagactccggaggccaagcccccatcacccggacggttgggaaccctgccggtccctcctcgatagactccacttcgcctcccacgccgcgacattcgagttgggaaccctgccggtccctcctcgatagactccgacagctcctcgcacacgtgatcggtgtgttgggaaccctgccggtccctcctcgatagactccaaccagcacgattcagccgctgcgcgccgttgggaaccctgccggtccctcctcgatagactcccagaccatcaccgtgaagggagcatgatgttgggaaccctgccggtccctcctcgatagactccggcccgcgggcacgccgccgacggccacgttgggaaccctgccggtccctcctcgatagactccagtcattgacgtcgcacctggtcaggcatggtttcaggcgcgaaattcgcacccaaatccgctactgatccggccactccaggagcacgtcgagacatttcgaccgccgagccactatgcttgcggtgtctatcgaagtggaaccggcaggattcccaataagggctcttcggagcccgacttctcaccgcccccgccgactgagtcggcgggggcggtctgctttcgtgctcgcttcacgtcaccgacaacgcaacctcctcctccggaccggagcacactagtcctcatgatcagcatccagcggaagttccccaccgccgacttcgccgacctgatcggcccggtctactcgacgaaggctctcgagtcgctgtggggcatcacccgcgcgggcgtcagcaagaaggcccgcaccggccagctcctcgcactgaaggtggacgggcagaacgtgttccccctgttccagttcgacggcgaccgggttcgcaccgaggtcgtggggaccgcccggctgatgcaggagcgaggcgcggacgcctggtccgtggccgcctggctgtgcacccccctctcggacgacgggcgcggacgcacgccgctggacctcctctccgcgggcgacgtggctgcggtgcagggacacgcgcgagccaccgccgagcgctgggccgcgtgaccgatgaggcgagactccaccgctcagcgagcgccgcgggctgacgtcgacctctcggcgttccccggtcggggcctcaccgccggcagcacgtggttccgggcgcatcgcgccgagcatgggccctggttcttcgccagcggcggcggacgcttcgatctgcccagcccacgcggaacctgttacctcgctgccagcccggagacggcggcccgcgaggtcgtcgggccggacctggcccgctccggccgggtgccggcacccctggtagagggccgagtcgtctcgtcgctgtccctgccgcagtccgcccggctggcccgcctcacttcctccggcgccctccgcttcggcgtgatcgggtcagagctcgcggccgccgtgacctacgacgtctctcagacctgggcctcggcattcgcgtcagccggctgggccggcctctggtacgcgccgcgcttctccggcgctcacgtccgcgccgtcgcgttgttcggcgacgccggggcgcaagactggccagcggatccggcgccgacacccctcgccgaggtcgtggccgggatgctggacctgcacgtgatccgcaccccgacgcgactgtccgaactcaccgtgctcgacgagcctgagctctgagcctcacccccacttcgacgccggcgcctcccagcgctcgagcgcagcggccagctcgtcgggcgcgtccaccacgatcagcgagtcccggtagacctgccgcaggaacccctcggcgaccatgtggtcgatcaacgcggtcagcggcgcccagaactgcgcgtcgtacagcacgacgggcttggggtgcaggccgagctgctgccacgtccacacctcgaagaactcctcaagcgtgcccgccccgccgggcagcgccacgaacgcgtcaccgagctcggccatgcgcagcttccgctcgtgcatgtccgcaaccacctcgagctcgctcagcctcgggtgcgcgatctccccgtcgaccaggtgccgcggcatcaccccgacgacccgcccgccggccgccagggcggtgtccgcgaggacgcccatgagcccgacgtgcccgccgccgtagacgacgtcgacgccacgtccggccaggtcggtcgcgagctcgcgggtcaactccgcgtagcgcgggtcaacgccggcggcggagccggtgaacacggtgacggcggaaacaggtgcgggggctgcggtggcgtcggtcatgcgcccgaggctagccgggccccggggcggacacggctcgataccctggacggcgtgcttgagaccgcctccctcacacccgtgaccgccgccgacctggaccgcgccgagtcgctgatccgctcgatcccggacttcccgcagccgggtgtcaccttccgcgacatcatgccgctgctcgccgacgcccgcgctctgcgggactgcgtgcgcgcgatgatcgccccgttcgagggcacgttcgacgtcgtcgccggcgtggaggcgcgagggttcctgctggccggcgcggccgcgatgctcgccgacgtcgggctgatcccgctgcgcaaagccggcaagctgccgaagccggccgccgcggagagctacgacctggagtacggcaccgcgacgatcgaggccaccgaggaggtccggccggggatgcgcgtgctgctgatggacgacgtgctcgccacgggcgggacgctcgccgccgccgaccggctcgtgcgggcgctcggcggcgaggtcgtcggcaccgccgccctcatggagctgacggcgctcggcggacgggcacacgtgcccgaggcgcacgtgctgttccaggtctgagtttccgggcctgagccgacacgagccgccggtcatgccgtgcggtcgaccccgcgctccttcccggatccgtactgcgcaaacgacccttctgagcgcgcatcgaggcgtcagaagggtcgtttgcgcagtacagactcaaggcaggccccgccttccgcccctccaactttccgcgacacacggtggtccacctctcacccgcggtgtaccctcgagcccatgcgcacgacgactccggccgggcacttcgcccgtcagtggtggaccgcctgagggcggtctcctcgtcgtacgcacgctgaagccgcccgccatgtgggcggcttttctcatgggcggcccgcaggcggtgcgaacacccgcagcagcaccagccagcaccagccaaggagcaaccccatgaccccgcatcccacccaccgcggccccgaggacaacgcgctcagaggcggcgcccgcaccgaccgcgcgcaccgcgccgcgctcacgaaccacacggagccgacgaccctcgccgaggccaccgacctcgtcgtcacccccgagctcgcccccgccgcggacggcatgttcggcccctacggtggcgcggtgcttccgccgcagctggccggccccatgcaggaggtcgccgaggcctacgacgaagcccgccacgaccccgagttctacgccgagtaccgtcgcctgctgcgcgacgtcgtcggccgcccctcccccatcacgccgctggaccggctctccgacgagctcggcggcgcacggatcgtcctgaagcgcgaggacctgaaccacacgggcgcgcacaagatcaaccacacgatcggcgaggccctgctcgccaagggcatgggcaagcggagcctcatcgcggagaccggcgcgggccagcacggcgtcgccctcgccacggcggccgcgctcgtcgggctcgactgcgagatccacatgggcgcggtcgacgtcgcgaagcagcaccccaacgtggtgcgcatgcggctgctcggcacgaaggtcatctcggtcgaacgcgagggccgcacgctcaaggaggccgtcgactccgcgttcgaggtgtacgcggcgaacccgaagaagtacctgttcgcgatcggctcggtcgtcggaccgcaccctttcccgacgatggtgcgagacttccaggcagtcgtcggcgcggaggcccgcgcgcagttcgccgagcggttcggggcgctgcccgacgcggtgctcgcgtgcgtgggcggcggctccaatgcgatgggcgcgttcaccgccttcctcgacgacgccgacgtgcgcctggtgggcgtcgagcccggcggccgctcccccgcgcgcggcgagcacgcgatgacgatgggccacggcgtcgacggcgtgctgcacggcatggccacgcgcgtactgcaggacgccgacggcgagccggacccggtgcactcgatcgcctcgggcctcgactacccgggcgtcggcccgcagcacgcccggttccagcagctggggcgcgtggagtatgtcgccgaggacgacccggccgtgctcgatgcgttccagcagctggcccggctcgaggggatcgtgccggcactcgagtcgtcgcacgcggtggcgcacgccctgcggatcgctccgacgatgcggccggaccaacggatcctcgtgaacctctccgggcgcggggacaaggacgtcgactatgtggccgagaccctcgggatcacgggtgaggccgacgaggtggttcgctgaccgctggacagcgcgacgatcgtcggtttcggcctgcacgtggggctggctcggcgctgaggcccatcgtgggaccgtccccggcccctcacccgacgcgtgtacagctgttccgttcccgaccggggattcctggaacagctgtacacgcgtcaccggggggcgcccggtccctgagcccccgtcagatcacgggtagagcccgcggatctggtgtgcctcggccacccgctcgacggcggtgacggtcgcggcggcgcgcagggtcagtccgtgctgctcgctcgtggcgacgacgtcctcccacgcggcgcgcatgcgctgctcaagccggtcgtcgacctccttgcgcgtccaccggtaggcctggttcgcctgcacccactcgaagtaggagacgatcacgccgccggcgttcgccaggatgtccgggacgacgagcacgtgcgcgtcgttcaggatgcggtcggcctcctcggtggtggggccgttcgcgccctccacgacgatcgaggccttcacgtccgccgcgttctccgccgtgagcacgccctcgacggccgccggcacgagcaggtcgacgtcgagcgtgagcatctggccggcgtcgatcggctcggcaccggcgaacccgacgaccttcccggtctcggccacatgcgcggcgagcgcgtcgtagtccaggccctcgtcgttgcggacggcgccgtactggtcggccacggcgaccaccgtcacgcccgcctccgcgaggaactgcacggcgccggcgccgaccttgccgaagccctgcacgacggccgtcgcgttcgccgggtcgatgcccttgtgcgcgagcgcggccagggcgatgtgagtgacgccccgcgaggtcgcctcggcgcggcccagcgagccgcccagcgagatcggcttgcccgtcaccacgcccggcacggtgtggccctgggcgacggagaaggtgtccatcatccaggccatcgtgttctcgtcggtgcccacgtccggggcggggatgtccttgtcagggccgatgatcggcaggatctcggtggtgtagcggcgggtgacgcgctcgagctcgccctgcgagtactctcgcgggtcgatcgtgatgccgcccttcgcgccgccgtagggcacgtcgacgagcgcgcacttccacgtcatccacatggccagggcgcggacctcgtcgaggtccacgttcggggagaagcggaggccgcccttggcggggccgcgcgagaagttgtgctgcacgcggtagccgtggagcacctcgacctcgccggagtcgcggcgcagggggatgctgacggccatctcgcggcgggggctggcgagcaggtcatggaggccctcgtcgtagcccagggtcttcacggcctcggcgagctgggccttggcgttgtccagagcggacgatgcggaggtcatcggggatgccttccttcggatggggatgcggtcggtcgacgccgacggaccgcccgagcaaccgacgccccgtgtctgccggtgccccgttcgccgtgctgcccgccggtgggtggcgcgcaggagtcgcggagcgggaaggtgacgggagaggtcatgcccggggcgcggctcactgcgctgtgtgccgagaagaaaccgtagggcgtcgtggcccgcctgaccatgctcgacgcgtgacgaatccgtcgaacggggcggtttgtggtcagacacacccggccgggcgacgcggcccttgggcgggcgacgggttcggcccgagggcggggccgtgccgggttccggccacagcacccgaacggctcccaccgacgaccccgccggccggcctcaccctcgcgtggcggcctccagcagctcgagggcgtggcggtactcctgccccgtggccgccttcatgccgagctcgcacgtgcggttggcggagacgtaccagtcggtcggccgcgcctccacctcggccgcctcagcacgggtcgcggaggcggtcagctcggggtgcagcatgccgcggtcccccgcgtaggcgcagcagccccagctcaccggcacgtgcacgtccgccggatccgccacgcacgcctgcgcgaccgccacgaggtcctcggtcgcgcccaggtgtgtggaggagcaggtcgggtgcaccgtcacggatgccaccggccgggtcaccctcaggcggggcagcagcacccgccgcgcgaacgtcagcgcgtccaccacctcaagcccctcacccgcctggcccgcggcctcgacggccccgaggacaccctcggtgcagctcatcgcatccaccaccaccggcaggcgcgagccgtccgccgctctcgaggaccgggccagggcgtccgcgagccggccgcgcatcagctccttcgcctccgtcatccccttggaggagaacggggtgccgcagcacaggtcgcccacggagtccggcgtcacccccacgacgccggcccgctccagcagccgctcgaag

SEQ ID NO: 2962 - DNA, 23903 bp, synthetic construct
  misc_feature 1..23903: note = Synthetic
  source 1..23903: mol_type = other DNA
caaagacatcaatgcaaataatttactaatagaatcgcaaactttgacagtaaagttgatagattttggtattgcaacaaaaaatattcgccaaactaatgagttattgaatctcaatcaattagaaggtactttggagtatatttctcctgaacaaacaggcagagtcaataggtcgatagattatcgcagtgatttgtattctttgggagttgtcttgtaccaactatttacagggagattaccttttagttcagaagatgccttagatttggtgtatgcccatatagctttgcagcccgaagcaccacatttggttaatcctgagatacccgaaaccataacagccattatagccaaactgttagaaaaaaatgcagaagatagataccagtcttctttaggtttattgtacgaccttaccctctgtaaagaaagtttggcagcaacaggtttggtaggcaactttgagatagctactacagatttttctacccgtttacagattccacaaaaactctacggcagagaaactcaacgccagcaattactttctatttatgagcaagctaccaacaattataaagcggaagttgtattaatttcaggaagttcaggtataggtaaatcttcacttatcaacgaactccacaagcctattacacaaaacaacggtatttttatcaaaggaaaatttgaccaactccaacgcaacataccttatttagctttgctcaaagcttttgacgatttaatagaccaactaattacagaaagtgctaccagattagctatttggaaagaccttttagtagaggctttgagcatcaatgcaaaagtaatgacaaacctactccctcgcctcgaacttatcataggagaacagcccgaagtagaaattttgcctgtcttagaagcacaaaatagattagaaaataccctcaataactttattaaagctattgcaagtccagaacaccctctatgtttattcatagacgacttacaatgggcagatacctcgagcttaaaatttttggaaattattacccaagaaacacttggaaaagccttagtgattattggggcgtatagagataatgaaatagacttggcacaccctttattgagtacgttgaaaatactaaaccaacaacaagtaacagttaccactattcaattaactaatttggcagaaagtgacgtctatcaacttatagacgatacactgcaaaggaaaaataaaacagctatacaagggttggctaaattgatttttcaaaaaacacagggcaatccgttttttgtcaatcagtttctcttaggattatacaatgataggcatctgaactttgatttgcaactcaaaaaatgggtatgggacatcacaagtatcagccaactaaaccttacagaaaatgtagccgaatttatagcggataagatgagacgtctgcccagtgaagttacagaattattaggttacgcagcagccattggacatagttttgacgaaaactatttagtagcttgtacaggatttagcaaccaatctgtaaaaaaaggactcaatgctgctatacaagaagaaattatcttgcaacgaaaaaatggctatcaatttgtgcatgacaaagtgcagcaagctgcctactccttagtattagacagccacaaacctgctttgcacctgcacatagcccaaaacatggtggctacaccaactaatgattcgagtgaaaaaaatgtttttagtatagccaaccaatacaatttgggtttgactgctatccatgatgatagggcaagacaacaagccattacctataacttgttagcaggcaacaaagccactgaaggcaatgcttttgcaagtgcaagaacctacttactaacaggctaccaattattgcctgccaatgcttggcagaccaattatcaacaaacttttgactatgtaagtgccttagcagaaacagcgtatcaaaatggaaattttgaacaagcctcgcactatattgatttagttatcaacaatgccaaaacgccgcaagaaaaggcaaatatttacaatagattgattgtacagtacactttagttcaggactttgataaagcagtagaaagtgcaaaaacaggtttggctttattaggttttgatgtacctgaagacgaaaacttaggtgccatgattggggcaggtattggcgaactgatgcaaagtttggcaggtagaaacattgcaactttgatagaccaatctgatatgacagatgaacaagaccaactcattatgaaactcctcattaatgcagcgtcgccttgctttttaagtggcaaacagactttgtggacatttatcatagttaaagccactaccttgtctatgcaaaaaggaaatacgccagagagttgcacagcttacagttcttttggtattttatcaggtgctattttttcagactatcattcaggctatgaatatggaaagttggcagtagagttagctaataaatacaacaacctgcgtatgaaatgtgcagcactttttgtgttgtctgctttcacacagccttgggtgggttctatcaaagaaacatttggtttaatgaatgaagggataaggagtggtgtgaattcaggagaaatgcagtttgcctcctatattgcagggaatataattaccaatattatacagactcatcgtcctattcgtgaagtcatttctcatatcaacacaggtattgctatcactcaaaaagccaaaaactttttctctgaaggtactttattggtaatggctatgttttattatgctatggcagaaaccaagacagacgaagtacaaatttcttatctcaacctatcttttgaccagataagggaaaaatatgtagatataacccccacaagccctttattcttattcaattatcattttagcaaagctattactcagttttttttagcaaattacgatgcaggtttccaagaaatgaaaaccacagaaaattatcttcctgcacagttaggttctctgcataatatagactttgtttgttttatgtccttaaatgcagcaataatcgtttggcaaaatacaaatgaagaattagttgcacaagcaaaaataagtttagaaacctatttgcctaaattacaattattaaatgacatcaacccaacaagttatgcacaacgctataaaatagtgcaggcttttcaggctgccattacagaagatgccaatgcagccatgaatttgtttgacgaggcaatagatttggcatctaaaaatggatttttaagtgattatgccctcttttatgaattatcagccatgtattatggtcgtatcaaccgcaaaaaaattcaagaaatttacttagcagaagcctatcaacattattattattggggagcttatgccaaagtagaattattggaaatagcccatccatttttactcaaacggagtaaccaaatgggcatctctacgaaacagaccaatgtgagagaaggtagcatgataagtacagccccaacggtggtaggcaataaaacacaagacgatacgtttacctcgcagatagatgtaggcgtagtagtcaaagcaagtttagcccttgccagcgaagtggttttagataaattgtgcgaaaccctaattggtttagtagtggaaagtgcaggagcccaaaaaggtgtattgttgctccgcaaaaaaggcgaattgttggtatttgcagaaaaaacagccaaaaaaacaactcaattaatcaatagcaacttaactgcggcagttcaggagtttgccatacccgaagaaattatcaattattgcctaaattctcgcaaaacacttgttatagacaatgcaacaacagacaccaattttgggaagtctgcctatattcaaaagtttgctacaaaatcagtgcttgctttacctttgattcaccaaacagattttgttggtatcatttatttagaaaataacctaaccgcaggtgctttcacaagcaaaagattagccttgctcaactctttggcagcacaaattactatttcagtagtcaatgcgatgctatacgaaaatttggaggaaaaagtaaaagacagaacagccaaactatccgaagcctacgaagttattcaaaagaaaaatttagacatcaccagcagtatcaactatgcgaagagaatacaagaagccttgttgcctgctgtaaaatctatacaggcaaaattagatgcttatgtattctatttgccaaaagacattgtgagtggtgatttttactggtttacagagaagggagctaatcttattttggtagcagccgactccacagggcatggtgtacctggtgccttgatgagtatgttaggaatagaaatgctcaacaaaattgtgcatgatttagagatatatgaacctgcacaaatactttcagacctacacaaaggtatttcagaactcctcaaacaagaacaaacaggcagccgcgatggtatggatattgccatactaaacatagaccaacaaaccaaacaagtgcaatatgctggggctatgaatcctttgtactacatacagcaaggtgtgtttaatgaaatcaaagccgataaattagctattgcaggacaggaaatctacgagcaaaggatttttactaaccatacaatcaatgcagccattgcccccactactttttacatcagttcagatggtttccaagaccaatttggtggcgaacaacacaggaaatatatgaccaagaggtataaagagtttttgcagcaggaaagtagcaaatccatagccgaacaaggcgaaaatatagcaaaagaattttttgcatggaaaggcaatacacctcaaatagatgatgtgttagtaattggggtgcgtatataacccttctaaaaatacatttttcaatagagtttatgaataattgccaagagatgtcattttttgagaggttgcaaccctcaaaaatgacatctctttttagtaaccacaacaaaaatttattcataaactctaatagatattctaatttttttctattactttacgaaactgtagctacggactttagtccgtagtgaaaaaactacggactaaggcgtcccctaaagtccgtagctacattagctaaaaaacccaatgagaagactaaacttagggcagaaagtgttgttagcaaatttgctaaccattatcatttttgcattgacagcagtagtcagcatttttacgttgcaaagcagccgcgaaatcatcagaatttcgtcagaggaaatcaacccatcagtagaggctattgataggtttattcttatggtttcgcagggcaaaatgtatatcaccaactgggtcttaatttctaccaacgaaaccgacaaagaagccctaaaaaacctccaccacttcgagtttcccgaactcaaagacaaaatcagtcgcctcaaacggacttggaacaactccgaacaagtggcagagatagactccattatcattcgttttgacgatatgctcattatccaccgagatattatggataagtttgcaaaatttggcgactacaacgaccccagcaagattttttatgccaatgaaatcatagaggacaaagtaataccaatttcttacgccctcatagacaggttggaagtgttggcaaaggcaaaacgagcagaaaaagaaaaatacgagcaaaatgtaagcaattccttagctacgctgaatacagtcattcttttgttgggtattctttcggtttttgcaggtctgttggcaagtgcctttgtatttcggtctgtttctacgcctatcaaatatgtgaacgaagtagcctccgaattgtctttgggtggtttgccaaaagactatgaaagagaatttggcagcgatgaaataggcgaaatggcacaaagtatgaaaaaattggtaaacggattgaaagccaccgccaactttgccgaaaatatagggcagggcgtatatgaccaaagctaccaacccctaagttctcacgatatgttgggcaatgccctgatgaacatgagggacaacctcaaaaaagtggcagaagacgacaaagtgcgaatctggactacggaaggcatagccaaatttggcgacatcatgcgtgccaactacaacagcatttcgaaatttgccgaagaagtaattaccaatttggtgaaatacacaggggcaaatcagggcggaatttttatcatagaagaacacagcgaaggcagcgaagaaccttttatgaccttgcaaggctgctatgcgtgggacagacaacgctatttggacaaaactattcacaaaggcgaaggattggcgggacaggcatggcaagaaacccgaactatttacatcagccaagtgccaaatgactatatcaacatcacttcgggtttgggcaaagcaaatcccaaaagtattttgatagtgccgttgaaactaaacgaaactgtatttggtgtattggaaattgcttttttccgcaatttgcaaactcacgaaactgtttttatagaaagaattgcagaaaattttgcttctaccttgtccatagtccgcaccaatgaaagaacacaaaaattattggaagactctcaattattaaccgaacaaatgaggtcgcaagaggaggaaatgcgacaaaacgtagaggaattgcaagctacgcaagacgaaatgcggagaacacaggcagaagtggaggcgaaagaagctattttgaacttgctaaacttggtgatagaaaccgaccacaattttattattcaacgtgccaaccaccaaatagatgcctatttgggctaccacatctccgaaattttggggcaacctctctccaaattgtttgatacccatgtggattttctactcatgactcgaactttggagggtggcaaaatttacagcaaaatccttaattggctcaatgcagacaacaatgccgttttggtaaaaatatcggctgctgccctgcacgtgcaacacgcacaaacagtacagtacctctttgtgatagaccaaattaatggggcagaagtgaaaaaatatttgatataggcataaaacaagacccaattgatgcaattgggggctaaaaagcatagttagtcaaattcatgagcaagatgctgacatgaattttgatgcggaaaacctaaaaagtttattcctttcttgcaaattgcataaaaaatgtactaaatttgctatttacttaacatacctaacacagtaagcagtgaaggcatcgagcagaagattacttattcagtttgtgattgtgctggtggctttgatttatatgaccaagttgtttttcattcaagtaatggacgatgactataaactaaaagcccaaaacaacaccgttttacgacaaatagagcagcccttgagaggcatgatttacgatagaaatggcaaactcatcgttgccaacatacctgtattcgacctcgtaatagttcccaaagaatttaagctaaaagatacggcagctttttgtcaagattttgccatgagcaaagaggaattgatagacaagctaaaaaaagccaaagagttttcgtgggtcaaaccttcactgtttatcaaacacattttgcccgaacagtttgctttgttgcaagacaaggtaaacaactattcaggtatctatgcagaggcaagggcagtgcgtgattatccgcaccgcaacatggcaaatgctttaggctatgtgaaagaggtggacaaaggcgtattagacaaagactctacgcaatattaccaacaaagagatttgataggcaaaacaggtatagagtcggtttatgaaaaagaactgcggggcagacgcggcgtaaaatactctattgtagatgtaaaaggtttgattaaaggctctttccaaaatggcaagttcgatacgttgcccttagtgagtgaggaattggtatcttcgatagacctcgaattgcaacaatacggcgaattgctgatgcaaaataaaattggcagcgtggttgccatagaaccctcaacaggtgaaattttaagcctgatttcttcgccctcttacgaccccaacctgctcacaggcagtggcaaagaagtttcgcaacactatgccgaattagttgataacgaatacaaacctcttttcagccgaccaactatggctttgtatccgccagggtctattatcaaattggtgcaatgcctgattggattggaggaaggcgtcatagactccaccgaaacaagtattccttgtgtgcaagacgtggtgaaatgccacaaccacaaatctccgctcaacgtaaaaggttctatccaacattcttgcaatccgttttactatcgggtgtttaaccgaatcatcaggcggggcgaatctgaaattaactccgaagacaccagacatgggctggcaaagtggcgacagcacatggttagttttggtttgggcaacaaactatacacagatttagacaacgaaaaaggtggcaatattccctcggtggagtattatgataagagatttaaaaaccacaaatggcgttttggtaacatttattcactcagcatagggcagggagaaatgggcgtagtgccgttgcaaatggcaaatttggctgcggtgatggcaaacagaggctactactacacgccgcacatcattaaaggtgtaggcaaggacaaacatttgcaccctcgttttaaagaaaagcaccaaaccacagtcaaagaagcccattttaatacagtggtcgatgcaatggaaaaagtggtaagtgcaggtacggctcgcaaggcttttatcaaagatattccgatttgtggcaaaacaggcacagcccaaaatcctcatggcgaagaccattcggtttttgtagcttttgccccaagagaaaacccaaaaattgcgattgcggtgtatgtagaaaatgcaggttttggtggtgtgtgggctgcccccattgcaagtttgatgatagaaaaatacattcgccgccacatagcagacgacaaacgcaaggctatggaaaaagacatcatggctaaaaactttttggtgatgatagaaaaagaaaaccaaaaacaaaaattggaaaaagaacggaaagaaaaacaaaaacaagaaaaagagaaggaaaaacaaggcaaatctaagcctgaaatagtgctaacgagcaatgtagctaccaaagaaaccactttggtaaaaaaagaaaaataacaaaaaaattacgttacattcaaactgtgcaatttgcattaacaaaaaaagagcaagcaccccttgcggagccctgctcggagtttttacaacaaaagatttttattgtaaaatgctgcaaaatgtgatgaaacaaaaatagtaactaaaaagtagaaaacaaataaaaagcaatattttttcaaaaatatttttttattggtgtaaaattcatagtttgccaatggactaaagtataatgctattaagttaagaaacaacttgcaacctcgaaggggttgaacaataatagccctacgtgcaacgtagggtaaaaagtgcaaagatactctacaacctcgaaggggttaaacaataatagccctacgtgcaacgtagggtaaaaagtgcaaagatactctacaaccccgaaggggttgaacaataatagccctacgtgcaacgtagggtaaaaagtgcaaagatactctacaacctcgaaggggttgaacaataatagccctacgtgcaacgtagggtaaaaagtgcaaagatactctacaaccccgaaggggttgaacaactacctattgggtgcaagatagtgttcaaccccttcggggttggattaaaacctactttgttgctcctacgttgcacgtagggctattgttgttcaaccctttcagggttgttcggaactccttagccgaacagcattgacctaaagtccgttatacaaaaaaactatgaacccaaaaattccctattgcttaggcatcgacgttggcgttgcctctgcgggttgggcgttgcgaaccctgcaagccccctatcaaatcttggacttcggcgtgagaattgtgccgattgacactacacaagccaatagtttttcgaaaggcgaggcggtggaaaccgcaactgccctgcggactgccaaacggactgcccgccgaaacctgcaccgctaccgtctgcgaaggcacaaactgagtaaagccctaactgctttgggtatgttgcctgatgctcatctgtttgacttgtcggcagaggaaaaaacacagggcttaaccctttctaccaaactctatgggctgcgggacagggctttgcgtgaaaaattgtcgctgcaagaaattgggcggattctcctgcacctcaaccaaaaaaggggttacaaaagcagccgaaaagcacaaaatcctgaagaaacagaccagaaaaataataagcaaggtcaagaaacggaggggacaacaccccaaaaaggcaggacaagcaccaaaaccgcagaaaaaggttacttagaaaaaattgcggacagagaaagtgggttggtggcaagtggcttgacgattgggcagtttttttaccaaaagtttttggaaaaccccctgtttacgaccaaaaacgaaatttatgagagagaaacttaccaaaaagaatgtaaggctatttgggattttcaaaaacagttttatcccgcagtgttgagtgaaagtaactacaaagcaatttgtaaggagattatttactaccaacgcaggctgaaatcgcaaaaacatttggtaggtttttgtcaatatgaacccaaacacacccgaacagaaaaaggcaaggaaacaaaaacagtagaaattggctacaaaactgccccgcgaagttcgccgctgtttcaggagtttgtggtttggcagacggtcaataatttgcgtgtgcagacccgaaaagacaaaaaagggcagcccctgaccttagcacaaaagcagtttttgtttggtaaactcaaccgcaacgaaaaagctaaactttcggacaaagaatgtttgaaactattggctgagtttgacaattattttgcagacaaaacacaaggctattcgctaaattttgaggaggtgctttgcaacgcaacctacgcacaactgcacaaggttttgggcgaaaaccctgataatcaccactatttgcagtttgagttgagcaaaactgatgctatcaacaaagaaacaggtgaggtgtatgaggtcattgcacctgttgttgaacagcaacctttgtataaactgtggcatctgttgtatgcaacggaggaggacaaacacctgaaagaaagattagacgacaacaacggattttttaggtttgagaaggaaaccattgcaaaactttgcaaaatagactttaccaaaggtggttttgccaatgtgagtgcaaaggcggtgagaaaacttttgccccagatggaaaaaggcttgtcggtagaggctgcttgccaaacagtgggctacaaatattcggacagcgaaaccaaagaggaaagcatagcaagggaattgctaacaaaattagaggttttgccaaaaggagaattgcgaaatcctgtggtcgaaaaaattatcaaccaaattattttgttggtaaacgaaatcatagccaaacatggcaatcctgctgaaattcgcatagaattggctcgtgaactgcgtatgaatgtgaaaaaacgcaagaaaatgaccgaaaatattaagcaaagaaccaaagaaaggcagaaaaccgaagccgaactcagaaaattgatagacgaaggcaaggtaaaactcaaagaaggcagagataaaatttcgttgggagatttgactaaatatgagttgtggaaagagcaaggcggtttttcgccctacacaggcaaggctattccgattggtttgctgtttgatacgcagttttatgacaaagaccatgtttttccgaaaacaaggttttatgacgactctactaccaatttggtgatagtggagagggcagacaaccaaaccaagagcaacaagcatagttcggcagctttgtatatgcaaagcaagggtgaggtggcttacaaggagtttgagaaatttgtaaacgactgcaaaggtttttcgagggcaaaaaaggcaaggcttttggctaccgaaatccccgataattttatcaaccgccaattagccgatactcgatatgtgggcaaaaagttgagagaaattttgcgggctgttagtccccaagttaccagcaccacaggcagcgtaacggcgtggttgcgtgagcagtgggaactggatgcggtgtatttgaaagacgaaaaaggcaaaacaaaactcgaccagcgggggcaaggtatcaaactaaaagaggctttgctgaaagaaatgcggtttgagcagtatccgcacctgcaaaaagaagatgaggaattgcaagccaaaatagagcaaagcacaggcacagacaaggacatagaaaaatatagggctacgcaacgcaaaaaccgcgaagaccaccgccaccatttgctcgatgccatagtgattgcttttacagaacaaaaacatatcttgcacctcaacaacctcaacgctgcctacgaagactccacgaaggcgaaggaaggcaagcactacctctatgccgaaccgccgatgcccaattttagggaagtggtgaaggaagcactggcaagtacgctggtgtcgtacaggggaactaaaaaagtggcgggctggaaagtaaaccctaaaactgaaaaaagggagattgcaccgagaaactatctgcacaaagaaaccttatatgggagtgtaatgcggtataaaacggtgcctttggacaaaaaattgctggctgatgacgagcaaattaacagcatggtggacaccgaactgcaaactatgttgcaaaaactcaaaaagcagtatgggcaggaaataggggctttggaaaaatacctgaaaaagaaccctccgctgcaccaaggaaaacctgttgcaaaggttacgctgttggtgcgtgaaattacagcaaaatatgacttagcaagcatttcagcaaaggatattcagtatgtagtggacaaggaagtgggcagggcaatagcagcaaggctgaaaaggcacgccgaaatagacaaggaagttgaggcgttggacaacaaggggaaaaaaatagaggacgcaacggcaaaaactcctgaaatagaggcaaaaatcaagaatttgaaagatgaaaaattgttgcctttattcctcaaaaatggaatggaagtaaaaacggtgaaggtgtttacgaagaacgacaactctgtgacgccgctgtacgacaagcctactacgccttatgtgcagcaacgaaacaaccaccacatagccctctacaaagaccaaaaaggcaaaatacagaaatgtgtggttacgttttgggaggctgtgattcgcaaaaaagtagggttgcctgtggtgataaaagatgcccaagctgcccaccagttcattgccgaacaaaaaataacggacaggtttattgtgggcaaagaggcacacctgcccgaaaaagattggaaatttgtggaggctattgtaggtgatgaaatgttcattgtggatttgcctttagcagacctgcaaaaaactatgcaagaaaacaactacaaagtgctgagtaagcacttgtatagggttcaaaaagtgcaaagtggtgagtacgtctttagacatcatttagaagctaatttggacaatgacgaggctgtaattacacttacaaaatcttcttaccaaagggctatcaaagtaaaaattagtcgattgggcaaaatttccttagccgaatagacctataaaccttcaaggtttctaaaaccttgaaggtttgtataaactttacttattttttgggttcaatatataaattgatgatgtaatgccatacgcctaatatttctttgaggtcagtataaattttgttgtcaatacgaaaaacattgttttcaaaacacataaattgccattctattccatcagttgcacagccgtagagcatctgaatatttttcccttccatttcattaaatagttttgctgcatagagttgagctgcacattgccctctaccatactccatatcctcatcttttgcctctactatagaaataattggtaattcaagataaggactgcgaggcacaagagtaaagaaaaaatcacattcgcccgataaattttcaagggcattgacctctaaatcctcaccagagaatagagtcaattcgtttcgataaaacttagctatttctaataaaattggggaaacaatacgttcagactttactttttcattaatcaaaggaacatattttgccatttgtagagtttctttcagccaactgcttgcctctactggtgcaataaacacttcttcaaataattctacttctttggctgatagtccaaactgcttggtaacttgttttatttttttaaaatgactatatcccataatttttgtttttaagcaccacaaagatacaaaaaaaattaacattttaaaatttttgttttttatgaatagcatattttttgctcgataaaaaataaactattccctcaaaaaaatgctgaaaagaaccctttattttggcaatcctgcccaactgtctaagaaaaatgagcaattagtggtggttttgcccaccaatgcaggcgaaaccgcaaaacccgtaaccatacccatagaagatattgggttggtggtcttagacaatgcccagattcaactttcgcaagccttgatggctgctttgcttgccaacaatgtagcccttatcacctgcgacgagcagcacctgcccacaggactgctgctaaacctcaacggacacagccaccagacgctgcactttcgcaaccaaatagctgcctccgatacactgaaaaagcaactttggcaacagaccattaaagcaaaaattagcaatcaggcaaatcttttcagagaactgcaactgccccatgccccactacaaaaattagccgaaggcgtaaaaactggcgactccaccaacaacgaggcacaggctgctgcctattattggaaaaatctgttttcggcaattccaattatccaaaattttaggagagaaagagaaggcgaaagcccaaacaatttgctgaactatggctatgccatcttgcgggcaaccgtggcacgtgccttagtgggttcggggctgctgcctacgttgggtatttttcaccgcaaccaatctttgaaataggagagttttgaaaagatattcgtaaagatgacatcttttgaaaagatgtcatctttacgaatatcttttcaaaaacgggctaaagtccgttatacaaccatgcttgccgatagactaagccaatatagaatcatgtgggtacttgtattttatgacctgcccaccgaaaccaaaaagcaacggaaggctgctgccgagtttcggaaactaatgctcaaagatggattctccatgtttcagttctctatgtatatacgcccctgtgccagcagagaaagtgcggaggtacacaccaagagggtaaaaaaatggttgcccgccgaggggcatatagtcatagccagcattacagacaaacagtttggcatgatggaaatattttatggcagagaaccccaagcaaaacccgacgaacccagccaactaaccctattctgaaaaggtagcataggctttagcctgtgtaaaattaggattcaaaaaaacgaggtttttgctcaaaaaactgaacaaaaacctcatttctttcatttgaaaatcgttgtaacttcctcattttgaacaacatacagcaggtatgttttcaaatatcacattttgcaagcaatttacaactggtatgggctttgtccacaaagcataacgttttcaaatatcacattttgcaagcaatttacaactaataaaatcacataatttaagtttattctgttttcaaatatcacattttgcaagcaatttacaacaaatagtaaaaatttaggtagtggtaaaaaagtatgatgcttttttcaacaataattgtaatttttacaatgaatacatattttcatgccagcttcgtggttctctaatttgcgagttgtcgtaccattggagaaaccacaagtttttttaactgttcttctgtttcttgaccgaatatagtcgggaggcgtacctctgttatttccttctatgtttttgtgtactcttttaactaagcatcgccccgttttatgtttatttttaggcaatattttcgcaaaagtcttccaattaagtagttgaacctaagcaaagctatgtaagattgcaataccgtcttactctctatctattgccactttcactccgcaccaacatatctacccgattaaacttgtcgtttttatgttgtttatttgtttcactctccaatatttcttctgttttaacatcaaaacccaacaattcggagagaaaaccctccaaaaccccgaagtttgccttgtctcttaatagttttttgactgcccagtcaaaacgaatgagattttccattgctttttatgtttggtatttgttgcaagttgcttttataggtgacatctttttaaaagatgtcacctataaaagcaacttctaacaaatatcttgtttttatcgataaaatgcaaacaccgcaaagttttttaacctttgcggtgtggttgcaattaaaactaccattcgcctgaaggcgaatacacagaaaccgccgccattgtttgtgtcctcacaaacaatctcctatttatctttctcccgcagcgtagatttcgtttaccattttttcgtacttgctcataatggctttgcgttttagtttcaaagtaggtgtcaattcgccaccttctattgaccaacctgcgggcattaatttgaaagtttttacttgttcccaattgccaaagcctttgttaaattccttgatgtctttttctatcgcagctattacttctggatttttagacatggcttcgtctgttgtgtaagctattcctttttcttgactccagactttgatatactcaaaattaggcactatcaaggcagcagggaatttttggttttcgcctatgaccataatttgctcaatcaacggacattctttgaatttattttccaaaacttgtggggctacatatttgccacccgaagttttaaacatttcttttttgcggtctgtgattttcaaaaatctgttttctacaaaaataccaatgtcacctgtgtgaaaccaaccatcttttattacttcggcagtcatttcagggtttttgtagtagcccttcatcacgttgcgacctttgcaaagaatttcgccatcgtctgctattttgacttgcacgcccggaacagtaggacctacgcaaccaattcgcatatctttgtgagtggctatacaacaagcaataacaggggaggtttcggtcaagccgtagccttcgcatactttgaggcctgctgcccaaaataccctggacaaacgaggttgcaaagctgccgagcctacctgaatctgcacaatatttccgcccaaagcctcacgccacttgctgaaaatcagcttgttagccaaatctaattgcatattatagaaccaacctttgtagatgtgtggttcatattctaagcccaaattaactgcccagaaaaacagttttttcttgataccttctaaggcgtgtccttttgccactattttgtcatagactttttcgagcaaacgaggtacagtgcagaaagtatgcggttttacttcttggaggttagccccgatggtgtctatactttcggcatagtagatagagcaacctttatacatatagacatataaagctgttctttcgtaaatatggcacagaggtaagaaactcaacgcctttgcctgccccaacggaaggtctatggcttcgtgagaggctaaggcattgcttacgatgttgtcgtgagaaagcataacccctttaggttttcctgttgtgccagaagtgtaaatgagagtcaataaatcgtctgcctgtaccgcagctttgagtgggtctaattgtttgacatcttcatttttgcctaactcctctacctctgaccaatgggcagcaccttgtaccctctcgaaagtgaatattttttgcatacttaccaaaccttgtacggcttgcgtagcttttttgtataaatcacttcctgcaacgaaggcaaattttgcctcgcagttctcaaaaataaatttgtaatcctcaattgtaatcgtaggatacattggtacacttactgcacctatttgttggacagccaactcaacgatagtccattctggacggttgggcgaaatgatggctactttgtcatcttttttcacacccaatttgaccaaacccaaactaatgcggtttacgacatcaatgacatctttggtactataattaaaccacttgccattttgcttataactcaggcaatctgttttgggatatttggctgcttgataatacaaaaagtcaaatgctctttttatttccatgttttgcttacaattaaggttgattactataaattacctaattaacaacaagtatataaaattttggaattaatatgataaaaaaactaaactttttttttgttctccaaaaaaaaattaaatttgttgaaatttttatgtaagaaaactaccaaatttgcaaaaaaagttgtagtttggcacgttgcaaatcaacaataggctttttgcttgattgacaaagagttagaatgtgtagtgtggactttagtcggggacgcctagtccacacataacggttattaagtgtgtgggctaggcgtccccgactaaagtccacactacagtttggtacgaatttagaatataattttgtaaacagtttgtaaataatttctaatggtctaacatttacttcaaaaaataatcaaataagttatggtacgcaaattattaatgactgccctcatcattggttctaccagttttggtgtggtctatgcacaaggtcctgccaatggcgatgggctggagtttcttttagaggctgaaaaaatgaaagaagccaaaaattttcccggtgctattgcctcttatgacaaagccataaaagcagctcctgccaatcacgaatacgtattcaggaagggcaaggtctatatgataaatatgcaggacaaggacaatgctattttgtgtttcgaaaaaaccgtacaactcaaaaaagattatgtggacggacacaaagcattggctattttatacaagcaaaagaacaaattgcccgaagctgttaagcattatgacgaggctttcaaatatgagcctgaccctcaaaaaaaggcggagtataaactcaatattgtgaaaatactctccaaaatgaaaaagtttaatgaggcaggcaatcacattaacgatgccaaacaagtagccccagacaatctcgatgtgttgtatttcgactctcgttataacaatacctttggtaaatacgaagcagccaaaacaagtgccttgaaagccactacttcgcctgctctcaaaatggacgaccctaagaattatgcaaaatattttttcgaattgggacttgcctactacaaactggaaaaatatgatgatgccaatgctgccttcgcaaaagcaaacttcggaccttacaaaagatttatcttagaaatgagtccgcaatatttccaaaccttagctaactcttactttaaagtgttcgaattagacgaaagcaaaggctatttggaaactgccctcaaaatgaaaaaagatttttcggctgctcatgaattgcttactaaaatagccttgtctaaaaccgacaaagctgccgttatcaaagcaaaacaaacaggcatagaaatagaaagagaccaagtaaaacgtggacaactttgtggcgaattgaccgaaatgttgtttgaggcgggcaaatatgcagatgctattgtgtttgcagacgaagctgtaaaagcaaatccaaacaattacaacgccatgtttgtcaaagccttagctttgtctaaaatgaacaaacacaccgagtctattgatttgttgcaaaacaccttaaaatacccaggtttagaccaagaaaccaaagcccaattcaattttgctttgggattgatttacggaaaagcctctaactccaaattggctgatacttcgttcaaaaaagctgtttatggttctttcaaatacgctgccatggccgaactcaaaaaattgggtgaccccgcaggtggcgaagaaacagaccccgcagatgacggaggtgatgcagctgaggatatgaaagactaagcaataacatgaaataagaggtataaaatatgaaattaagtaattgattatcagttatttaatttcgtattttataccaattatttaatttcgtattttataccaattatttcttattaatgtactacaatttaacctgtaaaacaaatatcaatagcaaaagtaccttcaaccgtgctttcaaatggtttacaaaaaatctctaacctaatctaaattataattatcatgaaaaagttctttttattattcattgctatactctttttgggtttggcaagttgctcgtctgaagacccaaaaccagaaacaaaatgtttggttacaaagcaaataaatgctaatggaaactatattgaatatacctacaatggagatttggcagtcaaagtagaatctaaaactgcaagtggcaaaatacttctttcaacagaatatcagtataatggcacaaaacgtaccagactttcgcagtttgaccaccaaacaggcacacctattcttacctatttgcttattgaggagtatgcagggaataaccttgtcaagaggcaaagctcaaattatgatagaacaagcaaattgacaggtcaaagcactacgatttctgaatttgatgccaatggcaacaaagtaaaagatgttacaacaaacctatatactgaaccatcaggggcaacctctacattcgaaagcatgaccacgtatgaatacaatggaaaattgatgataaaacaaaataggttttctaaaaatagaacaacaaatcaatttgttttatctagttttagttctttcgaacatgactctaacggcaatgtcatagtacagaaatcatatatcagcacagggcaacttttttccactaccacaaatacttatagcagtaccaataaaatattgaaagtcgtaagagaagtaagtggaaaaagctatgtttctgccttgtatgagtatgatgcaaaagacaactcaactttgactgtattttttgaagaagatgggaaaaaatcttatgaaaataagataacttatgaatatgattcaaaaggtaacatcacaaaatctgtaacagtgaacaacaactactatgacccaaacactggcggagtcttagctgctccatttacaagcatcactactacctttacttacgagtatcaatgcccaaaataaatcgaaaaaattggttttagtattagagtttatgaataaatttttgttatgaggtttgaaaaaagatgtcatttttttgaaaaatgacatctttcaaaaattattcataaactctattggactttagcctaatgctgagaaacttaaaacttataactcctcaaaacctatgaaaaccataattttattgctcatttccaatatctttatgacctttgcgtggtatgggcatctgaaatttaaggaaatagacctttggaaagtgattttggtcagttggggaattgctttttttgagtatatttttcaagttcccgccaacaggttggggcatgggcagtttaatgctaccgaactcaaaactattcaagaggtcattagcttgtctgtttttgttgctttttctgtgctatacctcaaagaagaactaaaatggaactatattttaggctttgtgctgatagtggctgcggtatttgtgatttttaagaagtggtagtaggtaagtgtattaaatttaattgcaaaacattattgtattttcaaaattcattgctaatttgcttaacaatttattgtaacaaaagattaggcttattgtaactattttcatacatggcaaaaattacctttgacggaatagaaattgaagtacccgatggcacaacaattttgcaagctgcccgacaaataggcggtgacatcgtgccacctgctatgtgctactactctacgctaaaaggcacaggcggaaaatgtagggcttgtttagtaaaagtatcagctggctcggctaaagaccctcgtcctatgccaaaattggtggcttcttgcattacacctgtgcaagacggtatggtggtgcaaaatacaaccaatcccgaagttttggaggttcgcaaaggtattgtggagtttttgctcatcaaccaccccttagactgccccatttgcgaccaagctggcgaatgtgatttgcaaaattttgccttcaaacatggcaacgtaagacaaagatacgaagaaaaacgccgtatttttgagaaaatagatattggtaggtatattcaactccacatgactcgttgtatcttgtgctaccgttgtgtttatactgccgaccaactcacgaataaaagagtgcatggcgtactgaaacgtggcgactcggctgaaattggtacgtatatcagcaatgtaatggaaaatgacttttcgggcaacgtcatcgatgtgtgtcctgtgggggctttgactgacaaaactttccgttttaaaagcagagtttggttttctaaacctgtagatgcccaccgcaactgcgacaagtgctgcggaaaagtggtgctttggtacaaaggtgatgatgtattgcgagttacttcacgtcgaaatgaatacaacgaagctgttgagtttatttgcaacacttgccgtttcgaaaccaaaaagactgctgattgggtgatagaaggaccaagaaaaattgaacgtaattcggttattgcacaggggcattatgaaaaactaaaagaacctgcttttaccattcaatatgctcacgaacactacaaacagatagacgacaccagaacttcacaagtggagcaaatgaagttgatagaaaaataggctgtttttgctatattttgataaaccttacgaagtttctaagactttgtaaggttttgtgtttgataaggtatgtgaaggttcaaattaattacattgttggatagtaggtatccaatttttccaccaaagttttcatacggggcaaattaattgctttttgtatgccctctatgcttttgcgtttttccacttttaacttttctatttggttggttaccatttgtggtgtatcactcaatttatcggtagctgcttggtctaaaatagccaacatttcttggttatttttgtcaatcatggcaatatactgcccaaacaaaaattcaaaatctttgtgcattccaattacctcctctgttcttttgttcatattgactaattggggattaccttccaatattttgccgtagttgattttgcccttgtctgtaaattttttctctatttcgtccatatatcggtaggcagactctctattatagaccgaaaataggtaattgagttgggtggaagccgaattatcagcctcactttgcggtattttgggactaaaaccactttctactaagtttttggtaacaaattccctcaatttgttgtgcagattactgttagacaccttaaagctattcaaacttga

SEQ ID NO: 2963 - DNA, 23330 bp, synthetic construct
  source 1..23330: mol_type = other DNA
  misc_feature 1..23330: note = Synthetic
tgttttgtcgcaaattatcaattcttggcctaataaaaagcttatggattatagctatatagaacagttaaaggatattcttcctggtattggtttagctgcacttatgggcggatgcgtatattgtgttaactttttgcatttgtctaattggttgacattattaattcaggttccacttggtgcagtaatatatattggtttgtcagcattgttaaagcttgaatcgtttacatatgtttggaatatggtcaagccatttatcaataaggtttttaagaaaaacagtgtgcaaaattagattttacatgttttggagttatatatgaaaatatcaaaaattgcaaattccatacagccgtcacttactcgtcagctttttgatcgagctaaattatatgatgatgtgattgattttacattaggtgatcctgattatcaaacaccacagaacataaagagtgcaggatgtatggctattgatgacggaaaaacgcactattctgcaaatgccggtttgtctgagttaagaaatgctatatctgataatatttttgttgaaaccggttgccgtttcaatcccgatggaaaaataatagtcactgttggcgcaatgcagggtttgtatttatcgttgctttcaatattggacaagggtgacgaggttataattccctctccgcattggataaactatcgccatatgactcaaatgtgtaatgcaaatcctgttttggttgatgcttatgaagaagatggctttgtagtaaaaccggaggcagtagaaaaagcaataacatcaaagacagttgccataatattgaattcaccaaataatcctaccggtgcagtttatgataaggctactttagaagcaatttgcaaattgtgcaatgaaaatgacatttatcttatttgggatgaatgttacaagagcattgtttatgacgatacttttgtttcggttttgaactgcggtattgacaaggaaaaggttataattattaacagttgctcaaaaaaatggtcgatgacaggctggagattgggttatgttgcttcatcgcaaaaattgattagaaatatgacgaagcttcaggaaaatatggttgcctgtgcctcacttccatcgcaatatgcagctattgaggccttttcaaattcttcaaatgaagccgctgtaatgtgtgcaggtttcaaaaaaagaagagattgtttagtagacggtattaaccaaattgataagttaagctgcaaaatgccaaagggtactttttatgcaatggttaacatcaaggaaacgggtcttgacagcgaaacatttgcttacaaacttttggatgccgttcaggttgcagttgttcccggtattacatatggtgattgctgtgagggatatattagaattgcctatacgatgaatgaggataagattcgagagggcatttgtagaataaaaaaatttgtagagagtttataggagaacagatgaaaagggtattgatgttaggtggttcaacatctcaggtatgtgcgataaaaagagcaaaagagatgggtttgtatgtaataatttgtgactatcttccggataatccgggacagtttgttgcagacgaattctatttggttagtacaacagataaggaagcagtattagaacttgcaaagggattaaatttagatgcagtaatttgttatgcttctgaccctgctgctccaactgccgcttatgtttgcgaaaaattaggattaccgacaagtccttatgagtccgttatggtactgtctaataaagatactttcagacagtatttgaaagaacacaattttaatgtacccgaaacattctgctatacagattacgaaagctttatggcggataaagatatgttcaggttccctgtaatggttaaacctgttgattcatccggtagtaaaggaattaacaaggtttgctctgttgatgaattagattttgcatacaatgatgcaatgaaatattctcgttgtaagagaattgtcgttgaaaagttcattcaaaagaaaggctaccaaatttcaggtgacggtttttctgtcaacggtgaacttgtattccgttgttttggcaacgagttttattcaagtaacggtattaaggaatatgttcctcttggagagtgctggccttcagtgcttgacaaggcgacacaggataaggtacataatgagcttcaaagattgattacttgccttggaatgaaaacgggtgcatataatatcgaagttattttggatgaaaatgatgatgtttatatcctcgaactcggggcaagaaatggcggttcattaataccgcaaataacacaatacgcaaccggcgttgatatggttgaatacactattaaggctgcattaggagaggactgttcaggtataaaaatggttgaacctaagggctattggtgtaattatatggttcacagcaaggttactggaaagctgaaggatgtagttgttgctgatgagcttaaggataattatgttgaatatcaaactgatttccacgagggtgatgatgtgtttgcatttgaaaatgctggacacgctctcggcactatggtctttaagtttgatagtcaagaagaaatgtttgataaaattttaagattaaccgatttagttactgtagaggtagaatgatggaaattgttcaactaaatactattgaagatgtttataaagcatataatgatgtgaaaaacacttttgaaaatcttgaaaacgaagtaaacattgatgattatctacataaaatatttcagtttggaaaagtgtttggagtatatgaaaagaatgcggacaagtattttggtttttcagcagtttatatgaatgattttgaaacaaaaactgcttacattactttaattggagtatcaaaagattataaacataaacatattggcactaaattattgttatttagtgaagaaaaggccaaagaattcggaatggaatttatgagattggaagttaaaaagaacaattctgttgcgataagcttttataagaaaaataattatgagtatgataacaaagaaactgatacgagtttttttatgttaaaaaaaataattgattgaaattaagaggttgacaaaacaaatgaaacaagagaaaattttaacagacagacagacagacagacagacagacagacagacagacagacagagaatagattggcttgatatagcaaaaggcattggtatgctactggttatatatagacattgtatagatgattcttttgatcagttgccacaattaacattgatgattaaatcattttttatgccattgttttttattatttccggatatttatataaacttaagccaactaaagattacttatatagtaaggcaaaagctttattgattccattagtgtttgtatatatctacaatttttatacaggtgttttatctggagggttaggagttgaccatgcttatataaaattaggtggatattggtttattgaagctctattatacataactgtattataccattttcttaatgtttttttgttaaatgtaaaattcataaaaacggaatttgttaactatataatgtttgctttttctgtattggtgtcagcagttgctttaatttattgttatttatatggaggaaatccatcaataaatagtgcagcagttgctttaggatttttctcatttggtcatatatatagaagtattgaaaagaccgttggaaagaagtttaagtcaaatagaatagcatatttgattgttggaatttgttgcttatcgattacatttcttgtatcccaaaacttaaaggatttaagtatggcatataacaaatgttcaaatccagtattgtatattatatgtgcagtattaggaacattaggtactatatatctttcaaaagcgattaatacatcaaaagcattatgcttttttggaagaaacactttagtaatgcttttaacacaaatgggaattatcaacattttaagattaggcatagaatatatttctcaaaatgtattcggtattagcgaatctgtaaaggttattattattttcattggcacatcgtttattgaagtgtttgtagttatattctttaatagagtatttccaatttttactggaaaaccaagatttgaacaaaaatagtcttaataagaggtaattatgacagagattgaaagaattattgaaaaaggaatcattagtgaagatttcttaaaagaagaattaattgacggatgtgaagttaatacagacctaaaaaaaatatgggcggttctattagacctactatatgagtttgacaaaatttgcaagaaatatgatttgaaatattggcttgcttatggttcgttaattggtgctgtaagacataaaggatttattccatgggatgacgatctagatgtttttatgatgagaaaagattatgaaaggttgatttcaatagcttctaaagaatttgaacacccatatttttttcaaacaccacatacagatccagggtattatttctcgtttgcaaaaataaggaatagcaatactactggtacaagtaaagtatttgcttatgagaactacaatcagggaatatttttagatattttcccattggatgtaagcatagttgaaggcgcacaagaaaggtataatgaaattaaagagttaatattacagaactctactaatatgagaattcattatccatatcctgacgaaacagaattgttgagaagaaagaagtactgtaatggagaaaatcaacttgaaattgctgaaaaaattcaaaaaattgcaagtcaattcgacggtcaaatttcagaatatgttgttgcaggaacaaatacaatgagccctttagaaaaagagactttcccaaaaggtgcattttctgatacattatatgttgatctctatggtattaaggcgcctattccatatggatatgatgatgtattaaaatcaacatatggaaattatatgataatgcctgacgagaatgatagagtttggcattcaaatgggatctttagtgtagataaagattacaaaacacttttaaaagaaataaaagaaaaggatgataaataaatgaaaaaatatagaattggttatacttgtggcgtatttgatttacttcatgttggacatttgaacttgcttgaaagatgtaaagagtattgtgatgttttaattgtaggcgtttgcgatgataaatatgttcgtgaaataaaaggcaaggagcctatctatacagaagaacaaagagtacgtttattaaacgcactaaaggttgttgatgttgcagaattagtaactatagaagaaacagatgataaaatgttggctttaaataagttccattttgatgttttgttttcaggagatgactggaaaggttcagaacgttatttaaagacagagaaacaatttgaagaatatggtgcatctattgaatatttaccatatactcaaggaataagcacaacagatattaaaacaaaaataaagggataattaaatgattaatgttactcgttcctcgatgccaaattttgaggagtattgtgaagaaattaaagaattatgggatagtcgttggctaaccaatatgggggcaaagcatcaacagtttgaagctgatttgaagaattatcttcacacagacaatgtttgtttgtattgtaatggtcacttggctctcgaaaatataattgctgcgttggagcttactggcgaggttatcacaacaccattcacttttgcatcaacaactcacgcaattgttagaaatggcttaacaccagtattctgcgatattaatccggatacatatacaattgatgttactaaaatcgaagcacttatcacagacaaaacatctgcaatcattcctgttcatgtttacggtaatatatgtgatgttgaggcaattcaagctattgccgataagcataatttgaaggttatctatgatgcagcacatgcgtttggcgttacatataagggcgaaaatgttgctaattttggcgatgcatcaatgtttagcttccatgcaacaaaggtgttccattcaatagagggtggtatggtttcatttaagaatccagaattgtatgctgtgatgaatgacagaaagaattttggtattcgtggtccagagcatgttgtatatgttggtggaaatgcaaagatgaatgagttttctgctgcaatgggtatttgtaatcttcgtcaccttgatgatgaaatcgcaaagaggaagtcagcggtggaaagatacagagagaggttaggcaatgttgagggtatcactttgtgtccgattcaagagaatgttgaaacaaactacgcatattttcctgtagtgtttgataaagatatctttggtttatctcgtgatgaggttatggataacctcgctaaagagggaataggtgcaagaaaatatttttatccaatttcaaatacatttgattgctataaagtaagccacaatgccaagatggaaacgcctgttgcgtatgacatatctactaaagttttaacattaccgttatttgcggatttagatgttgaaacagttgataaaatttgtgatataattttgaaaaaataagaggaggttaagccaatgaaaggtattattcttgcaggtggaagcggaacaagactttatccgctcacaatggtaacatcaaaacaattgttgccgatttatgataagccgatgatttattatcctttaagcacacttatgcttgcgggtattaatgacattcttatcatttcaactcctaccgatttgccaaattttgaacgtttgcttggtgatggcagtcaatacggaattaagttatcatataaggttcaaccatctcctgatggacttgctcaggcgtttattctcggtgaaaaatttattggtgatgatagctgtgcaatgattctcggtgataatatcttttatggctcaggcttcagctcaatgcttgaaaaagcagttaaaaatgttgaggaaaatcacagagcaacagtttttgctcattgtgttgacgacccggaacgctttggcattgtagaatttgataaagaaagaaaagttgtttctattgaagaaaaaccaaacgatccaaagtctaattgggcaattacaggtttatacttttatgataatcgttgtgttgaatatgctaagaatcttaaaccttcagtacgaggcgaacttgaaattaccgaccttaacagaatttttcttgaaaatgatgaacttgatgtaacccttcttggcaggggattttcttggcttgatacaggaacaatggaaagtcttattgacgctgctgattttgttcaaacaattcaaaaacagcaaggcattcgaatatctgctcctgaagaaatcgcttatagaatgggtatgattgataatgaaaaattaatgcaggctgctgaaaaatatggtaaatctgattatggaaaatatctaaagagaatcgcagagggagaaatgatgatatgacaatcatagtaacgggcggtgccggttttataggttcaaatttcatattctatatgctcaaaaagcatcctgactatcgaattgtttgtttggataaacttacatacgcaggcaatctttcaacgcttgctcctgtaatggacaatcctaattttagatttgtcaaggcagatatttgcgataaagaagcagttgaaaaactctttgaagaagaacatcctgatattgtagttaactttgctgctgagtcgcatgttgaccgttcaatcgaagaccccggcatttttctcaagacaaatatcctcggcacacaaacgcttatggacgcttgccgtaaatatggtattcagcgttatcatcaagtttcaaccgatgaggtttatggtgatttgccacttgacagacccgaccttttctttacagaggaaactccgattcacacttcttcaccgtacagctcatcaaaagccggtgcggatttgcttgttcttgcatattacagaacctacggtttgcctgtaacaatcagcagatgttcaaataactacggtccgtatcattttccggaaaaattgattccgcttatgatagcaaacgcactcaacgacaagccgctccctgtttacggtgagggacttaatgttcgtgattggctctatgttgaagaccactgcaaggctattgatttgattatacataatggccgtgtcggtgaggtttacaacattggtggacacaatgaaatgaaaaacattgatattgttaaactcatttgtaaagaactcggcaaacctgaaagccttatcacttatgttgcagacagaaaaggccatgatatgcgttacgcaatagacccgacaaagattcacaacgaactcggttggcttcctgaaacaatgtttgcagacggaataaaaaagactatcgcttggtatctcgacaataaggaatggtgggaaaccatcatctccggtgaataccaaaactactatgagcaaatgtacggaaacagataaaaatgaagaatcaaagctaatgttttactgaagaataattatggggggaattatgaaaactgatttattcaaaggtgatcgaaattctaatcttgaattactaagaattatagctatgattttaatagtgatttctcattattcagttcacggttccataaaaagtatagatttgggatttgggcttaataaagtaattttagatataagtaattttggaaatcttggagttgcattatttgtgatgatttcaggatactttttagttacaaagccgtttaagttggatagaattattcgtgtagttttggatacactgttttattctgtcgccttttttgtgattttttccatattgaatcatgagtttagtgttgtttcaatgataagagcgatattcccaatagttcctatgcagtattggtttgtaacaacatatgtatttatgatgatgttatcaccattcttaaaccgttttcttaaaggacttactgagtatgaatttaaggtgtatattttagttatgctattaatagtgtcaataagttctatgatccctaaatttgatgcattttcttattctggatttcttggccaattttttctatattattcattaggagcatttattaaaatacatcctaaaagttgcaacaaaataaaaaatccaaagtgctatttattaatttctttggtgttattattgctattgataatgtctggtgttgtgattgatttgttaagtaactattttagtgtttttgttggtgaatattctttcttttttggcagaggttcaattttggttattgcaattgcatacgctctatttaagtatttcacaaatataaagccttatgaaaataagtttattaatattgtttcatcttgcacttttggcgtgtatttgattcatgataataattatatgagagagtatctttggggaaatatatttgataattcaaaatatgccgagtctaattatttgattgttcatttcattttaagtgtgattattgtttatgttgcttgcacagttattgaatatatcagaaaatatgtgcttgaaaagtatgtgttcaaaaacataataaacagaattaacagctgtgctgattcaatgtacggcaaactcttatcacttattgaaaaacgttagaaaacaactgattccgttttgcggggtcagtttttcttttttataatatgaaaaatattgaatatgggaattccaaaacaaaaagcattaacttataattttacaataatttactaagtgagtaaaggaaatgcataaaatagagaatatttatggacaagtgctatttattttggcaaaaacatttacaaagctgagaatgtgtggtatacttcaattgttcttataacataccaagaacaattgggttactacaaaaaggtagaaaaccgaaaagctctgacggctcctttttggagccgttatctttttctatcaaaaaggagaaacattatgaagtacggtatcggattggattgcggaattgcatctgttggctattgtgtaacagagctggattcaaatgatgagcctaaaagaattgttcgtcttggttcaaggatttttgacaaagccgaaaatccaaaagacggcagttcacttgcaaaaccgaggagagaggcgaggggacttcgccgaagaataagacggcatcagcacaggcttcaacgcattaggtatatgcttgtaagtgatggaattgtgactcaagaagagcttgacacaatgttccaaggtcaactgtccgatatatatgaaataaggacaagggctcttgatgaaccgataaacaatgttgagtttgcaagggtgcttattaatcttgcacaaagaagaggctttaagtcaaacagaaaagttgatgaaaacacaaaagataaagaaacaggcaaactcctcggtgctattgaaaagaatagggaaaacattgccaaaaacggataccgtacagtcggcgaaatgctgtataaagacgaaagatattcaaaatataagcgcaataagggcgaggattatctcaacacggtatctcgtgatatgattgccgatgaaataaagatgattttttctgctcaacgcagttttcgtatgccttttgcaacggaagaaattgaagcaaaatacacggatatagttatgtcgcaaagaccgtttgatttaggaccgggcgagggtaatgaaaaatctccgagtccgtattcaggcaaccaaattgaaaaaatggttggcagatgtactttcttccctgatgaatatcgtgcggtaaaagcaagttattcttttcaacttttttcgcttttgcaggggataaataatatcaccttggtcgatgacggcggcaacgcattttctctttcgcagcaggagcgtgatgaattaaaggaatattgttttaaaacaaagtcggttacttacgcttcaataaggaagaaactgaagatttcacctgatttcaaatttaagaacattacttataccgaaaaaggtgttgaggagtcggaggaaaagacaaaatttcaacatctgaatatttatcatcaaatgaaaaacatattgggcgatgctatgaattcgctctcacatgatgaacttgatgaaatcggcagaatatttacattctataaaaatgatacaaaaattattgaagctctcgaaaaaacaggcatagacaagggcctttatcctgcacttttgaatcttccgtcatttagcaaaacaggacacatcagtgttaaggcgtgcaaattgcttattccgtttttggaagaaggtaaaacatacaatgaggcttgcgaatgtgcaggcttggatttcaaggcgcacagcaatgccgaaaagcaaatgttgcttccgccaaaatcagatgaacttgacgacatcgtaaatcctgttgtaaggcgtgcggtgtcacaaaccgttaaggttgtaaatgcaataatcagagaaatgggagtttcgcctacttatcttaatatagaacttgcacgagaactttcaaagagcaagaaagagcgagatgagattgagaaaaactatctgcttaacagagctaaaaatgaaagaataaagaaagaaattgttgataattttggattcgagccaaagggtcaggatattgttaagctaaaactatatcatgagcaagacggaatttgtccgtattcattaaaatcaatcgagtatgacagattgtttgaggttggatatgtggatattgaccatataattccgtacagcgcttgctttgacgacagctacaataataaagttttgacattttcttctgaaaacagacaaaagagaaatcgtgttccgcttgaatatttgcctgaaaataagaaatcggattatcgtgtttgggtaaacagcaatatccgaaattacagaaaaaagcagaatttgcttaaagaacattttacagaaaaggacaaagaggactttaagcaaagaaaccttaatgacacaaaatatttgagcagagttctttataattacataaatgacaatttgatttttgaggattttgcaaacggtaaaaaacgacatgttatttctgttaacggtgctgcaacggctcatatgcgtaaatgttggggtattgacaaaatcagagaaaacggtgatttgcaccatgctgtggacgctgcggttatttcttgcgtaactcaagggatggtgaacaaaatatcaaagtattcgtttgacagagaaacaatgtttgatgttgattatcgcacaggagaggtcaaggagcgcttcccgcttccgtatccaaactttaggaaagaactcgaagcaagaagcgaaattgaagatgaaaagcgacttaaaagcgtgctgttgtcattttcaaattacagctatgacgatgccgaaagtgcaaaacctgcttttgtttcccgtatgcctcgccgaaaggttacaggtccggctcacaaggacacaattcgttcgggtaaggttgacggatgtaaaatttcaaaggttgagttgacatcacttaaacttaaaaacggtgctattgaggattattataagcccaaaagtgatactttgctttacaatgcacttttgcaaaggcttattgagtttgacggagatgcaaaacaagcatttgcagaggagttccataagccaaaagcagacggaacaccgggtccgattgtaaagaaagttaaactcattgagcgttcatcgtcaagcgttaaggcaagaaatgaaaataaactcggaattgcagataacggctcaatggttcgtatagatgtattctatgtcgaaaatgacggctattattttgtgccgatttatgttgccgatactataaagccgacattgcctaatttggcttgtgttcccggtggaaagccttggaaagaaatggatgataaagactttgtgttctcgttatatccaaatgatttaattcgcataacggctaaaaaagatatgaaattcagtgtggctaataaagacagcaccttgcctgcaaataaatatggaaatgagttgctgttgtattatggtggagcggatatatctactgcaagtataaatggaataacccacgataattcatataagtttaaaagttgtggtattaaatcattggttaatatcgaaaagtttactgttgacccgcttggaaatgttaacaaggtgaacaaagaaaagcgaatgtattttaattaattatggcttacagaaatatttttattgccaacgaagcaaaattgaaattgaaaaataatcagttgattgttttcaacggcgaggaactttcgttccctattgaggatattcgttctatcgtggttgacaatccgtacacttcgcttacgggtaagctgatggcaaagcttgctgatgacggagtttgtctgattatatgcaacgacaagcacattccatcttgcgagcttttgccgataggttcgtattgtcgaatgaataaacgaattaatcttcaattttctcaatcgaagccacggcttaaaaagatttggcaaaaaattgtgcaggcaaaaatcaacaatcaagcaaaatgtcttgaacttaatgaaattgatgaggcgcaaactctttattcgatttcaaaaagtgttgcatcgggagatacaacaaacagagagggctatgctgcaagattgtattttaaatcgctttttggtgatgattttaaacgagatgatgaaaacagcataaacgctgcgcttaattacggatatgcgattttgcgttcgtttattgccaaaacaattgttgcttacgggcttgagccgtcacttggcatacatcacaaaagccagcttaatcaatttaatttggcagatgacattattgagccgtatcgaccgattattgacaattttgtttatcaaaattatgttgagtggggcgaagaattctttactccacaaaaggcagaacttcaacttttgctaaactgtgcgaccgaaattgacagcaatcgtcacagcgtggcaaatgcaatagaacttacagttcaaagcataatttcttcgtttgaaaatgaagaaattgcattgaaattaccgaatttgattgatgtatcatattttaattatgactaagtttatgaggatgattgtattctttgacctgccggttacagaaaaagccgcacaaaaggcggcaactaaattcagaaattttcttatcaatgatggttatttgatggttcagtattcggtttattcacgagtttgtaatggctatgatgcggttaaaacacatgaaaaacggctgaaacaacatttaccgccaaacggctcggtgcgattgcttacgattaccgaaaagcaatatgagtctatgcagattttgcttggcgaatatatccaatcggatattcccgttgcatatgagcagttaactttgttgtaaaaaagagaaaaagcacagcagaaaattaattctgttgtgcttttttatctcaaatttttcttgaaacgccctaatttactgtgccttttgttcccatattataacataccaagaaaaattagggaactacaatgattttaggcttgacctaaataatatgtaattataacataccaagaaaaattagggaactacaattatcaaagttattttaaagagattttttaattataacataccaagaaaaattagggaactacaattcctgacccacaaactgctggcgatagagattataacataccaagaaaaattagggaactacaattactcctttcttttcacgatatttatatatattataacataccaagaaaaattagggaactacaatcacaatttctggaaaactttccgatataaattataacataccaagaaaaattagggaactacaatcgtagcaatggtgtattctctatattcttattataacataccaagaaaaattagggaactacaattgtgctgtcgcttatgcttctacaggttatattataacataccaagaaaaattagggaactacaatatgaacacgataatattgttttgaaatctcattataacataccaagaaaaattagggaactacaattgaaattgtgtcagatgaataattgtctggattataacataccaagaaaaattagggaactacaattgttttgaaacttttatggtcaatcataccattataacataccaagaaaaattagggaactacaattttataaggctgcttattatgttgattacattataacataccaagaaaaattagggaactacaatctctgtacctgtattttattatactactgaattataacataccaagaaaaattagggaactacaataatagtattagcatagtcaataaaattagattataacataccaagaaaaattagggaactacaattcacttatggatacttcgatatttttatgaattataacataccaagaaaaattagggaactacaatgtatacctttttggcacactaaatcgtgtaattataacataccaagaaaaattagggaactacaataaatactcaaggcagtatcacgatacggagattataacataccaagaaaaattagggaactacaatcttttcgctataaaacatttgatgaagttcattataacataccaagaaaaattagggaactacaattataatttttggaagacttttcgctataaaattataacataccaagaaaaattagggaactacaatgcattgttggttgcggtttaggcataattcattataacataccaagaaaaattagggaactacaattataatttctggagaaccttccgctataaattataacataccaagaaaaattagggaactacaatctaaagtgtgtaaatttgtgccaatgtgccattataacataccaagaaaaatcagggaactacaataggaacacgataatattgttttgaaagctcattataacataccaagaaaaatcagggaactacaataataacattagcataatcattaaaattagattataacataccaagaaaaatcagggaactacaatggggttggttttcctcctgcctttttaataattataacataccaagaaaaatcagggaactacaatttataccaataatttaactatttgcggaaaattataacataccaagaaaaatcagggaactacaatctaaagcgtgtaaatttgtgccaaagtgccattataacataccaagaaaaatcagggaactacaatttccggacttaaaagggtacttcataacaaattataacataccaagaaaaatcagggaactacaattttaatgacatatttatttttttgtggcaaattataacatactaagaaaaatcagggaactacaatctttccgttataaaaaatttgatgaaattcattataacataccaagaaaaattaataaactataattttttgaaatcaataaaaatttagtcagactttggtttttgttgaaattttgggtagaagttttgtgctcagcagtaggataatcgggaagattgtggctacgaggatgccgacttttaggttatcctttgccattgacgacacgaagccgacaaggcttggacctgcactgcatccgaggtcgccaccaagtgcgagcagtgcaaacattgccgttccgcctttggtgagcattgccgacgaaatcgagaatgttcccggccacataattcccacgcagaagccgcaaattgagcaacctatcagcgacagcgccggtataggtgaaagtgacacaactaaatacgctccgatacacacaatgcacgaaataggaattaatttcttttgcgaaattcggtcgccgaatttgccgtaaagtgctcgtgatgtgcccatcaacagtgcgaacgaaagcggtcctgcaaggtcgccgaccgttttggaaattcccaacccctctttcgcaaaagttgatacccattgcgaaattgcctgctcgcttgcacctgaacaaaccatcattatgaacagaattataaacacctttgatgtgaacagttcttttatgctcatacctttttcgcccgaatcaatcaagttcgctattggtacttttgcaaaaacaatgccgttgattattggtaatattgcccaaatcacggcgacaatttgccagttttcgatgccgaaaatattgaaaaacacggtgcttaacagcacgactgccatatgtccccagcagtagaacgagtgcaaaaggctcattgctttttccttgttatcggttgggcacgcttcaactatcgggctgaccaaaacctccaaaattccgcctccgactgcgtaaatcataaccgaaatcagcagtccgacaaacggacttggtaacacaaacggcagcacggcaaggcttgccagaccgagtgccgacagaaaatgtgccagaaccattgatgtgcggtagccgaccttgtcgattgcctttgccgacagcaagtcaaccaaaagctgaattgtgaaattgaaagaaatcagcaatgtaatttgcgacagcggaatgtcaaattctttttgaaaagtaacaaacagcaacggtgcaaaattgttgactattgcctgaactatgtacgctaaaaaacaagcgttgacggttgacttgaaattctgtttcatatttttacctttttgtaaaaaaataatgcgtgaatttgtcatacacacatcaattctattatatcataaaaaaggaattttacaatacttttattagctcataatacagggtataatgattatagggaggaaagatatttctctcactattgttcgaatggaggcataagtatgattaactttatagcaagaggcttcgatttgaagcagggcgcaaaagacggcattgaaaaggaactcaagagaattgaaagaatgctgccggataacgcaacatttgatgttacgctcagcaaggagcgtggagaatatgaatgtgatattacggtgaaaaatgtcggctctttcatcagaggtgaagcaagagcagaccgcattgagccggttgttgatatggcggttgacgatttgaagcgtaagcttcgcaaactcaagaccttctttgttgacaaaaaacgcaaaggcggaattgacgaaatcgcaactgcatttgatgatttggatgaagatgttacaatggacgatttcgaccaggtttattacgattcggttgatgtaaacagagttaagcatatcacaccaaacacaatgacggacgatgaagcaatcgttcagatggaaatgctcggacacacattctttgtgtatatcggcattgacggcgaaacaaagatagtttacaagcgtaaaaacggttacggcgttctcgtttgcgactgattcaaacttaaaaaatacgatgtccgtgagggcatcgtatttttatacttcttgttgacttatgatagcgtttgtgctatcataagtatagattaggaaagaaaaaagagaaacataaaaatgtataatgttgagttttatgaaaatcaaagtggcgaaagtgagctttggaactttttggaggaattgcgagttaaatcagcaacaagcaaggattcacgcatacaatataaacaaatagttttttatattgaattgctacaaaataatggtacaaatttgggggacaatattacaaagcatcttggtgacggaatttgggagttacgaccggggaataacagagttttttatttctttgcccgacaagatacttttgtcttattacatcattttagaaagaaatcacaaaaaacgccaaaaagagaaatagaaaaggcaagagcagaacgaactgattaccttaacagaagaaagggtggctgatatgaaaaattggaacgattacaaaaattatgctaaaagcgttgacgagcaggctaaaaatgacattgaacagatggaagaacttgcttcaatagttggtgcaataattgaaaaaagaaatgagttgggcttatctcaaaggcagttggctaaaatttgcggaattcctcaatcctcggttgcacgaattgaaacattaaaaatcacgccaaacttggatacattattaaaaataatgcaacatttgggattaaaattaaccgtgtctgttgcataaaaatacgatgtccgtgagggcatcgtattttgtttgcgtatttattttgaaatgatgagtttgaggacttcctgtgcggctgagcaggcagggcaatcgcagaatttttcgccttttgccttaagctcttttgcgtgtgcaaggaattcctttgcggtttcttcgccgaatttctctgtcgcctgcggtgaagccataaactcaaccattgcgtcaactgggatgatgtctgctttgatttcgtcaacaagttctctgaactttttgtcctctcttgttgtgccgacagcaacgaggtattcgtcagtctttgttttgagttcctgacagcagtacggtgcagaaatcatctctcttattttgtcgataatttgatatttaagctcttgtgtcataacgattactccttttatactttatattataattgtaacattacatttatcggttgtaaaggttgaaaatcattttttactttggtataataaaatataaattatatgaaaaaaggggattgctgtgagaaaattaaagaaaataacggcgcttgtgctcagtggtgctattgccgtgagccttgcgggttgcggtgcaacgcaggcacaaaacagtgctgttcaggaaatatttacagatgacaaaaaaatttcttacagtcttgactataaagaactgaaagataaatctaaaaataaaccgaacgcttggcgtgagggtatggtttcgggcaacggcttgcagggatttgttgaaagcggttcgccgtatagcgacacatttatttttcagaatatgcactttattatgcctaacaaaaattcacgcacctgtcctgacacggcaagcgaacttgaaacggtcagacagaacattgttaacggtgaggatataaccgatgacgccgaatacctggatgtgtacagctttcatccgggtggtcaacttcgaatttctatggacggaaaaggtgcaaaagattacatccgttatacagattttgaatcttcgcaggtcggagtgagatttacggatgaaaatggcacttgggacaggacatcgttcacctcaatggctgacggtgcggttataacaaagttgtcgcaatcatcggaggcttcacagcttaatgttatattgacgcttgatgacctttcgaccatggcgaattttggtgacggcaacgaagtggatatgcaatacaaaaaggttgttgacatcaatgcaaacacaatttcgcttgttgcacattatccaaattacgaaaacagcgagctgaaaaacggcggatatgccacaactacatatgttgtgaccgacggcacaaaggaaaaaatcgagcttgaaaagaagaacaaggaagatattttccgtggtcaaaacagcggtatcaaaatcagcgatgcacagaatatttatctcatcacaatcagcgacagaacctatgatatgggaagccttgacgaatttgaggacaaggacagctatgaacttgttgacgaattgacggcacaggcaaagaccattgaggaaaaatacagcaccaagaaagattttgattacaacaaggctttgaaaaatcatcttgatatttatcagccacagtttgatgctgttactcttgaacttgaggacagcgacaaatcgaatgacgaacttttgaaagagcaaaagggcgagaaagaactttctgccgcacttgcacagcgttcatattatgcaggcagatacgcatatctctgctgttcgggatattccacaagcagactgtacggaatgtggacaggcgagttcaacacaggttggggaagcaagtacacgatggacgcaaatgtaaatttgcagacttcttctatgaacacgggcaacctttcgtcatctccgattggatatacatatttcatcctccgtcagcttcctgattgggaggaaaacgcaaaggcaactcacggctttacagacgctattcaagcaccggtaaacaccgacggcgacaaggcggttatcacagaaacttgttatccgtatccgttcaggtattggaatgcaggcacttcttggatgcttgaacctttgtacgaaaccttgcaaacttacggaaatattcaaattccgctttctgacgagttcgatttgaacaagttgaagtccgtgctttcgattgataaggacgatattgcaagatacaaagagcaaggctatatgatgcttgaggaggatatattgttgcctgctcttacaaagtcggcaaattattgggcacagcttttgactcctgaatattacaccgacaaggacggcaaaattcattacgaaaaaggcaaaacaaagctgaatgacggcgaaacatattgcatagttccgtcatattctcctgaaaacaatccgtcaaattacgacagcccgtcagacgcaaactgtgctattgacatttcggcttgcagaagtaatcttgaaatgctaaaggctgttatggctgatgttgcacccgaggagagcttcaaaaaatggcaaaatcttatggataagttgccaccgtatctttatgatgaaacaggtgctctcaaagaatgggcaaccacaagttttgaagaaaacaacgaacacagacatttgagccatctttattgtgcatggcctctgtttgaaacacagcataatgaggaactcacaaaggcttgtgagcaggctatcgcaaacagagagagtgaaaacgaggcttcgcatgcgcttgttcaccgttcactaattgcggcaaggctcaaggacagcgaggcacttaccgatgcactcttgaaacttcaaaatcataagataagatatgcttcacttatgacaaatcacgattacgaccgtggaagctgttattgcacagattttgctatcggctatctcggaattatcaacgaggcgcttgtttattcaaacgaaggtgagattgagttcctcccggcacttccgacagggtttgaaaagggcacaatcaagggcatcagagcaagaacacgggcaaccgttgacagcctttcttgggatgccgactcgaatattgttgaagcaaaaatcacttccgatattgaccaaaaaattaaggttagatacggagatacagaaaaaacactcgacctaaaagccggagtgtcacaaacagttaatttttaaaattatatatggaggatatgttatgaacattgtttgtttggatatggagggcgtgcttgttcctgaaatttggattgcattcgcagaggaaacaggtattccggagcttaaactcacaacccgtgatgagcctgattatgacaagctgatgaattacagaatcaaaattctcaaggagcacggcttgggacttaaagaaattcaagatgttatcgcaaaaatcgaccttatgccgggtgcaaaggagtttttggacgaactcagaagtattacacaggttatcattttgtcagacacatttgagcagttcgcaacaccgcttatgaaaaaacttgattggccgacaattttctgcaacactcttgaggttgccgaaaacggcgaaatcacaggcttcaggatgcgttgcccacagtcaaaactcacaacggtcaaggcgcttcagtcaatcggatacgacacaatcgcaagtggcgacagcttcaacgaccttggtatgattcaggcaagcaaggcaggatttttgttcaagtcaaccgacgcaatcaagaacgattatcccgacattcctgcttatgaggaatacagcgaccttcttgacgcaatcaaaaaagcattataagaaagaaggtgtatcatcttgatacaccttttttacttgatttttgtggcttattgtattataatcttcctgtcagttcgcaaaatcctgaccagtcacatcctgtggcttctaaaaacaaaactaaggagataatttaatgagtatcaaaaagaaaaatgcttttattgcacaaactgcaataattgcggctatgtacgctgcgctgacttatgcgcaaacaatcattttgcccggctcaacaacaatggctgtgcagttcagagtg

SEQ ID NO: 2964 - DNA, 23240 bp, synthetic construct
  source 1..23240: mol_type = other DNA
  misc_feature 1..23240: note = Synthetic
tctctgaatattcagaatttgcagcaaatacaggaaaaggaagtaattattcaagtgttttgtattttgagcaggaatattttattggcataacagagaatacagaaacaacggaaaatgaaattatacttttcgacaaagaattaaatcaattagatataaaaaatctcactaatgcacacattcctacactatcaaaaagtcttgcaaaaaacgagaaagaaaatgtttttgctattcctgcatatttcactgatggtctaaagcgctgttatggtgttataacgtttgaaatagaaaacaatcatatagtattaacaaacgagtttaaaaatgaaaattccgatatgatgtatcagggtaattgtataattataaatgattatgtttataatgttgaaacaaatgattttttagctgacgataaaaaagtaaagatattctcatataaatactaaataattattcgttttgaaaattctttatattttatacatgttaatcaattactgttttcaccaacaatcgcatctcgcaaataagcaaatgtactttgtgttttgagttctgtttcatgtttatcaagttcttgcttaacggcattcaagattgcaacactaaccggcggtgcagaactttcactgtattcaccgggaggtgcatatggtcgattttctttgtttgaagtatgtggatatttttcgagtatactgcttattagttttttagacgatgcatacttaaccatacgattgcctcgttcattaacagcatatgcttcttcaaatctaataccccacttgaaaaataattgtaattttaccttcataggataaacgcccgttttcataacaataaattgtcctttgggcattgatttaagctcatcggcagtcattaaaggtcgttcaatcatttgaagtgattgtgaaggatcattaacactacgactgactgaaccgctcataacagtcctgctgccaagagcctttgacattgactcggcagtaacagagtttggagcaaagccaccaaatatagtgagctgagtattatcaacaatgattgcggcaccttccttgccgtagttcttttcaagctgttgcaatgattggataatcgcaacgatttgaagtcttcgagaacgagatgcggagaacatcatctcagctgattcaatctttggtaatgttccatactcatcgcacaagaatacacagcgattctttaatttgccaccttgctcatcagcaaccgaaaggatttctctgtatagctgttgaatgataagtgaaatcataaagaacttgtttggatcttcctctggcataataagaaatattgcacttttttgattgcaaaattcctctgcatcaatttcggtgtcaaaacaaagaatctgttcgagttccgagtcaagaaatgaattaagacgagaaagagcagtagacattactgaggacatgctctgctctgaagtattaagcgctgctcctgcaaaccatttcgctttatgctcatctggtaaaagctcaacgagcgcttgaaatttatttttacctttcatattagaaggggcaagcagttcctgtataatcttaaatacagatacaatatgacgctcatcggcttggcagaattcagcaactaaaagaattgtcgctgtaagcaatccttctgcggcatcatagaaatatgcgttctgtccgaatgaagccccatccataccggacattatgattgtcttagcgataatctttgcatatttttcagccttagctttatacatcaaagaatctggattctcacgatataggtcgtagtatttattaaccaagtgtaatagattgttgccgttactccttgtagggttacgcaagtctattacacttattttatatccataatacttctctgctattgttgcatagttacgcataacatcaccttttgtatcagtagaaagaaatgacattccgcaagcacaacaatattcgatttcgggatataaccaaaatgccgttttacctacaccggcagcaccgatcataagtgcatgaacatctcctgtatcaattaaagctcctgttttatctttccctacaagtaaaccttgtggcagaggctttccatcgcttgttgacggttgtacgccccctttgtgcctcttttctccatttctcaggtgtataaacgatgtgctcataagcacgcctaatttcagcctttgtagcccaccgtgccgttccgtgttgaccatctccaactgtcttacttttaattctgttaagagagtatatgtgactgactatagtaataccgccaagaataactgccataataacgaatgccatgataagtggcattatatttatatcgttcattttacctccttaaaaaagaaagaagtcaccaattgaatgatgacttcttattgttatgcttaaataagggatttaaacatttgcgtaggacggaagctccctagttctaataatgagttatagtctttcacatttattatttagatttttacattgacatatcaaaagatgaataatcctcggcaatatcgttttcaacatcttcgttgatgtcgtcattgatttgccaagttttttccaaagcaagattatgaatatattctattctttggttgattgaagatatgactttttgctttcttgcatcgtcaattaaatttacatcggcatcactcaatatgccaagtatttcattgtcgatatttttcaaagcgtcaaaatcaatccaatcaaaagatgtaaccaatcttaactgttcaaaatgagtttttttgaatggcttgcaaactatcaatgattgtttatccatattaggtgtaactttatcataaccgagcgaagaaccactgtcgaaaatcggtgcaacaccaatccattcaagcgtatttgcatttcttacaagtccaaaattgttaaggtgtctgtcctcattggctataataaaatcaactacaatcatttgattgattttatcaacgatatcctcaatgcccaaagatttgcaacagttaatataatgctgataaacagataggtgattaggtttaggatccctttgcaaaatcttccaagctgtaacaagttccgtatctcttgaaatgaaatcttcgcaaacactgtatggcttttcgtcatcaataatgacagaataattgacatggtcaacattcaacttatccataatcaatgatgcaatagcctcattaaacggctgttgctcataaggcaaactgcctgctttaagaagacaacgcttttgattaattattttccatcttttctttaagcaaccgtcagatgtgttgtcgggtgagttcaaactgatattttcagaatcttttgcttttccgaacagaatgtcaccgacatcttctgaaaaatcattatcaaagaaatttaccaattcccattccaaaccagaattaataggcttagcccaatactgatccgaaaggcttaatccatagcattttgccaaaagcagtttcggagtgcttacacgcaaaatttcaagtgcatctcttacacccgatctgcttacaggtattgaacgatcggtccaccatttattgagcaaagctctgtcggcagataaatcgtctttagttgtaccgataggaagatgagcaaagttatatatttcgcctattttaacgattgaaccggtttcttcgtctaatgataaatcggctacttttatgtttttgtgcatcaaagtatagttcataacaacgctccttcctaacttgttttcattaatcattatacacacttccttccctaaaatcaacttttaacacaaatcaatatcaatcttccgttcaatttgaattcaagttattttttcatctgcaaggggtcttgacagaaaattatgaatttgctaatatgaaaacggagagaaaattcaataaaactatgatgaacctatatgcatttttattttgagatgcgtataggtttttttatttttatctttagaaaggagaatgaaaaatgttatatcaaaaaattccaagcggaagattttggattatgccaaatgacttttttgaaaaatataaattgaacagccgtgactttatggtctattgttttttggtttctaaaaaagataaaaaaggaaaaagttattggtcaataagaagaatggctgagcagtgcaatatgagttacgaaagtgtaagacgggcaataaaatctcttgaggatcaatgcttgattgatgtagaacactgctcggtcaatggtaaaaaaaattcaaatatttatactgtgcatcggttgatttgattttgctttctacttttgcatttttgatgcataaacaatataaaagcccggaatgaaaaaagtgaatgaaaaaaaacgatgattttttaatgaaaatctgcggcttttggatcaattttgaagcggatttcaagccgtcgattttaaagcaggataaaggggtatgattttcgggcattgaaatgcccgaaaacgccgtccggcaaagcctgtcggcttttcgattcgtaatacttttgcgtatgattccaaattcgtatgcagttagggctgtttttcgcagaaaatcaagttttttgagtattcacggaaaggagcgcgtatgatgaacaaaacaaaagcggaaattgagcaaatggcgagctttatttgccgtgaaaaaggacaatatatgttcaataaaaaagaaatcggaatcattaccgggttatgcaaagacaaggttgcggagctctgcgagaacattcctgcagcctgtgacagcagagttaagttatatttcattaaagatgttctgaattatctctacaattcttgataaaatatataattctaactcggcatacaggtcaaaatctcacaaaaaatgtgtctcttttttgtcaggtattggtctggctatttgcaaaactgtgtggtagtgtttgtgttgccaaaaggcaaaagaattactatacggaggtaaattatgtacgaattatacgacaaaagcggtaaccaaatcggctaccgaatgaccaaaagaattaaaaatgaagatggcaaatacgatgtattgactgctcgatcaaagacgagtgaaaaggattgccgaaagaaacttgatgacatggtcaaggagtattatcaactccaagaaaagaaaaagagtggcggtgtcttctccgaaatgaaattaaaagactatgcagacaactggtatcaccttaatatcgagaaagcgaactgcacgcaaaagaacaaatacatgtacaaaaacatcgtctacaaccacatcattgaacacctcggttcgataaagttatgcaacttaactgaggatgactgccaaagattcataaacgaatatgcaggatggagtaagacattcgcatcaaaggtacgcatggtgttaaggcgtatacttacaaaggctgaaaagcaggaactcatcaaaaccaatgtggcaaaggatattgttctgccgactgtgtacgagaacaagcacagaccaatcactgatgatgaacgccgaatgatacttgaaaccataccaaaacactatgctggaacgatggtgcttacaatgttatgctgcggacttagaccgatagaaatccgaagaatgaagtgggattggatagattttgaaaacgcaattctgacagtcggcaaatccaaaacggaagcaggaacaggacgaaagataccaattccgcctgtacttttagatgcattaaaggaacataaagcaaaagaactcaacaacgaatatgtattcgtaaagtacgaaaagcacacacgcatggatgacaatgccttctatcaaagttggaaaaacttcgtaaaagaaatggacttagcaaacggagctcacctatatcgaaatcaagtaaagaactcaatcatagcacccgacttcgagccatacctactgcgacacaccttctgcaccgattgtcaggcagccggagtgccaatcaatgtggcaaaagaatggatggggcactctgacatatcggtaaccgcaaaaatctacacgcatatggtagatgaagtattcgagcagaaccgaatgagaatggctcaatatgcagtaaccaaatcccaacaagttgaaagcccaactgcaacaaactgatatacaaaaaaataaaaggatagtcgagaaataaactcggctatccttcaaattcttcaacaacatttattatatcgagaccattttgttttgcataatcaacagtgtatgccgtgccaccctcgtgctttgtcagaaagcaaatgcaagcagaactacaatcaacaaggtgtctgttccttttttgcatgcaaccgttatagtaataaggagcaagaacctttaccttatcagctctcgactgaatatcattatacacatcaatatcttgttgcttccaatatttcgtttggttttcacatggcaacactaagatgagtttaacttcgggatgagtttcttttaccgacaaaacagcctgtgcagcaatggtatcaaaccccaaagcaccgcctgtgccgaagtatttgaaacctttagaaacaagcagggtaacgatagcctttgtctgttcaaagaccatgtcgggcgtataaggggcaatgtcacgatgccctgtaaaacaacatgtttggcttttataatccattgaaatcaccgcagaaaagcaaaaagagcgtagccgaagctacgctcaaaaaacacttgcttcaaactttctgcgacgaaaatttcatagtccggaaaacccaagcgtatgacaaagaagcgtgtgtttttatcaaaagataaaaagccacgctcgggttttcaaaactaaaaaatactataaaattttcgtcgcaagataattatatcatctgcaagatttttagtcaatatgcactatttcatcattaaaaaaatagaaacaccctcattataacaaaatgagagcgttctaattattatgacttcatcttattcttgacttgtaagacaattgctgcaataacggtttcaacagatggttctttaccatcattggtaagttcatcccaaaaacctgttgctcttgattgagggctgttcattgcttcatgaatagcaaattcaatttctcgttttactgaactcacggttgtcccattttctaatgctatttgttttaagatttcttccatattataattcctctctatcactgattgtgtattatcatcactggcagttatagttatagcataatatttatgtcgaagtcccaaaaaatttgtcgacaagagaaaaataatatttatggaagaatttgctttgaatgtttcatcatcgtatcaattacttcataaattctgttcctgtcctccggtacaagtttttcaagtttctcattaagcaatgaatccttaactgtatatccattatcaagtacatctgaaagaaccatatcagctgaaacacccaaagagtttaatatatttatgaaagtttcaagtgaggggattttttctcctcgctcaatcatacctatataattagttgtcaaatccgttttttccgccaaatcttcttgacgcaatttctttatttcacgaaattttcttatattcttaccaattgtatcaagtttcatctcaatacctccttaagtgtgtttcaacaactaatagtatagattgtgtttgtttttacttacacgcactataaggaagttataccaactaatagtattgatttattctttttaatactatataatattaaaaagatagataacaaaaatctatcttgtaaatattgtgtcaaataagttcaatctaaagagtgttaatatttaaatcaagagtgtgtctttattgttcataaaaacacgcagttatattcatattctattttattgatatttaagtttatcacgctgaagccatacaatttatagcttcattctttttgttttactataattttgtcgattttttcgataattttgcactttttatttatttaatttgatataaatgttagttttaaaagtgaaacgcttttttacgcttctatagatttaatgcattttctctataaaaatttgttacgcaagtcttaattaactgcgatgaaaggatgagaaaatatgagaagttctaaatttacaaaccatagttattttatctatatagttgaggaaacagttaagtgtaataactgtaatactacaacagatggaatggtcatcatatttaatcagggagaaaaggttatatctttgtgcaaatattgcagtgcaaatttgcaagaaattttatattgctatctcaaaggaatagaacatatctcgacaatcaccaaaagcaaaatagatgtatctgtaaataaaatcaatgacgatcaaaatgaattaaagattttagattacaaaatagtcatgagtgatgaagattttttgagtttctatcgtaaagttaatgctgtaaattatttttattatgaaacatacaaaacaagttttaaaaagtgttcacatttatggaaaaacacaactcattattggctcaataaaaaataccaaaataaaaactattccagagattctgtaattccgcacgaaaaagctcttgaaataaatcttatccgaatgaacaaatatttatcaaaaaggaacagaatcaaagacaaaaacaaccttgttgttatgcctgatttattgaatgctgctccagtaaataggctgaaagtaaatcagcactgctcattatatgatttgaaatgttctttacacggaaacaaacaagcacaggcatttttctgtaccggcagagtagacggattcagttatgcactttgctttgattgctattccgcattatgtaaagtaatgttgaaattagtgaaagatacgaaattagaaaaagccgaggttgggttaataaaaataactcgaaacgagggcaaacatagatgctttatgtgtggaagatggacgaaatcaaattatacgattacaataaagagcgatgaaagtataactgtttgtgatagctgttttaaaaatatatacaatactctcttaacgaatagtttgactaaagagatattccccaacctatatagaaagcataaagaattaaagagaatttttattgaaaactctcgtaaataatcttatatgttaataaagcgatctgtttattacggaccgctttatttttttgatggctaccttttcatttttgatggataaacaatataaaagggcaatcttaaaagagagggcataaagcaataaaactttaagccctcattattttttgaaatgtctctcaaattttttgctcatttcaattcgtgttacgattttgatttgagcgatgtctctcaaaagtctcagtcataaatgccccaaatcgcaataaaatgactttggaattttgaaatttgctgtctcttagaatctctcaaaaactctcacaagattttgaggcaaagaaaaagtgcctgaataccgccgtaaaaagcagtattcgggcataaaaaaacctcggaacacgaatgttccgaggtaatggcagaggtataaggattcgaaccttaaatgacggagtcagagtccggagtgttaccgttacactatacctctatattcaattacgcctaactcagcgcgcttactattataaccgattataaaaatttgtcaagaacaaatttgcactaaataataattttatcacaattattgagaaatataaacacataatatcaaaaaatatttccatagtgtaatttattggactttataaacttttatttgcaaaagcctttacagagtattaaacttatgctacacttatattgttcttataacataccaagaacaaatcaggttgctacaaaaaggtagaaaaccgaaaagctctgacggctcctttttggagccgtcatcttttttatttaaggggaaatttatatgaaatacggtatcgggcttgattgtggaataaattctgtaggttattgcatcatggaactcaattcagatgatgagccaaaaagaattgtgagattaaattcgagaatttttaccgaggcggaaaatccaaaagacggttcatctcttgccgcaccgaggagagaagcgcgcggacttcgccgcaggattcgcaggcacaagcatagacttgaaagaattcgcgctctgcttgtcagagagaatatagtaacgcaggcggagcttgacaatatgttttccggcacactttctgatatatatgaattaagaacggccgctcttgatgctccgctgaacaacattgaatttgcaagagtgcttattaaccttgcgcaaaggcgcggatttaaatcaaacagaaaaagcgaaaaaagcagttcggataaggaaacaggaaagcttctctccgcaattaaaaaaaataaagaaagcattgaagccggcggctacagaacggttggcgaaatgcttttcaaagatgaaagatatgcaaaacacaagcgcaacaagggcgaagcttatctaaatacagtatcacgtgatatgattgaagcggaaattcatgccgtttttgcatcccagcgcaactttggcatgccgtttgcaaacgagaaaatcgagaacgaatataccgatatagcattatcgcaaaggccgtttgatttgggccccggagaaggacccgaaaactgcaaaagcccatatgcaggcaagcagataaaaaacatgatcggccagtgcaccttttttccggaagaaaagcgcgccgtaaaagcgtcctattcttttcagcttttttcacttttgcaaggaataaacaatataaccttggtgagcagtgacggcaacacatttcctttatcacaggagcagcgaaaaacattaaaagattattgctttaaaactgcaaatgttacttacgcttcaatccgaaaggtgcttcaaatcccgcaggaatacacattcaaaaacataacctatacggatgacgacattgaaaaatcagagaaaaaaacaaaatttcaacacctaaaaccatatcatgaaatgaaaaaggttttgggcagcgcaatacagactcttacgcccgaagaactcgatgaaataggtgaaatcttcacattttataaagacgaaacgataatcataaagcaacttgaagaaaccgaaattgacaaatcattatatgatttgttattgcagcttcccacatttgaaaaggcagggcacataagcacaaaagcatgcaaaatgattattccgtttttggaagaaggaaaaacatatgacaaggcatgcgagtgcgcgggattgaacttcaaagcccacaccaatatgcaaaagcaaatgctgctgccggcaaaatccgatgagcttaacgatgttgtgaatcccgttgttcggcgcgcaatttcacaaacgattaaggttgtcaacgccataatcagggaaatgggcacatcgcccacatatataaacatagagcttgcacgcgagctttcaaaatcaaagaaagagcgggatgaaataaataaaaaatacaaactaaatcaagcggaaaatgaaaggttaaaaaatgaaattattgataatttcaaaatcaagcctaacgggcaagatatcatcaagcttaaactttggcacgagcaagacgacggaatttgcccatacacgggagtgcgcataaaatatgaaaatcttttcgatgatggttatgccgaaatcgaccatattatcccttacagcctttcgtttgacgacagctttaataataaaattttaacaacggcaacacaaaacaggcaaaaaggcaaccgcattccgcttgagtatttgccggaaagtgaaaaagacggctttcgcgtttgggttaattcaaatatccgaaatcacagaaaaaggcaaaatctgcttaaagagcactttaccgaagctgataagaaagaatttaaatcaagaaatcttaacgacaccagatatttaaacaaattacttctcaattacataaatgataatttgttgtttacggatttttataacggcaaaaagaagcatgttacctccgtaaacggagctgttacggcctacatacgcaagcgctggggtatcaataaaaacagagaggacggcgatttgcaccacgcagttgacgcggctgtaatcgcctgcgttacgcaggggattattaaccgaatcacagcttattcggcacgaaatgaggcgccgtatgatttaaacaccgaaacgggcgaaataaaagagcgttttcccctgccctatccgaatttcaaaaaagagcttgatgcacggaccacaatcgaagatgaaaagcggctaaaaagagtgcttatgtctttttcaaattattcatatgacgatgttgaaaaggccaagccctgctttgtttcgcgcacgccgcaccgcaaggttacgggtgccgcgcatgaagaaacaattcgttccggcaaagttgaaggttttaccgtttcaaaaaccgaactaaccaagcttaaattaacaaacggtgaaatagaaggatattacgaacccgaaagcgacactttgctttacaatgcacttttgcagcgtctcaatgaattcggcggtgatgccaaggcggcatttgcagatgaatttcataaaccgaaggcagacggaaccccgggtcccgttgtaaaaaaggtaaaaacaataaagcgttcttcctcaaatgttaaagcgagaaacaaaaacggattgggcgttgcggacaacggttcaatgattcgcattgatgtgttttatgttgaaaacgaaggctattattttgtgccgatttatgtggcggacacggttaaagaaatgcccaatgaagcttgcccgtttggaaaagataaaaagaaaataatgacagatgatgatttcctgttttcactttatccaaacgatttgattaaaataacggcaaaaaaagatatgaaattcagccttgcgaacaaggaatcaggcttgccaaaaaacaaatatgctaatgaagtactcgtatattattccgcagcagatatttcaaatgcaagcatcagcgttataatgcatgataatgcatataaattccgaggatgcggcattaaatcattggttaaattggaaaaatataccgttgacccgctcggcaatgtgagcaaggtcaacagggaaaaacgaatgtattttaaataattatggcttacagaaacatttttatcaccaacgaggcaaggctgaaacttaaaaacaatcagcttattgttttcaacggcgaagaactgtcgtttccgattgaagacatacgctcaatcgtgattgataatccatacacctcgcttaccggcaagctgataacgcagcttgcaaatgacggagtttgccttataatttgtgatgaaaagcacacaccgtcgtgcgagttgctgccaatcggcgcatattgcagaatgaacaaaagaataaatcttcagttttcgcaatcaaagccgaagctgaaaaagatttggcaaaaaacagttcaggcaaaaatatgcaatcaggcgagatgccttgaaattaacgaaatcgacgaagcaaaaacactgtttgcaatagcaaaaaatgttgcttcgggcgattcaacaaacagagagggatacgccgcaaggctttatttcaagctgctgttcggcaccgatttcacaagagatgatgaaagcaatatcaatgccgcactcaattacggatatgctatattgcgttcttatattgcaaaaacaattgttgcctacgggcttgaaccctcgctcggaatacatcacaaaagccagctcaatcaatttaatttggcagatgatattatagaaccttacagacccatcgttgataatttcgtttatcaaaattatcaggaatggggcgctgattttttcaccgctcaaaaagcggagctgctgcttttgcttaacagcgccacggtaattgacggaaagcgccgcagcgttgcaaacgcaacagaacttaccgttcaaagcattatttcatcatttgaaaacgaagaaatcgagcttaaactgcccgatttaatcaacatttcatattttgattatgactaaatttatgagaatgatagtgttttttgacctgccggttacggaaaagcccgcccaaaaagcggcagcgaaatttaggaactttcttgttaaagacggatatttgatgattcaattttcggtttattcaagagtttgcaacggatatgacgctgttaaaacacacgaaaagcgcctaaagcagcatttgccaccaaacggctccgttcgtttgctcacaattacggaaaagcaatatgaatccatgcaaattttgctcggagaatatgttcaatcggatattccggttgcctatgagcaattaactttgttataaaaaagtaaaaaacacagcggaaaatgaacttctgctgtgtttttttatctcaaatttttcttgaaatgcccttccctgctcggcttttcgttcccatattataacataccaagaaaaatcagggaactacaacctattattaaggctcctatatctttactaaattataacataccaagaaaaatcagggaactacaacaatgcccacgggtcattatctgttttggaattataacataccaagaaaaatcagggaactacaacaattggaagactatgttttgcaattgcaacattataacataccaagaaaaatcagggaactacaacacaagcatatgattgtgttgatttgaatgtattataacataccaagaaaaatcagggaactacaactgaatacggcaatgaaaccgaatataaataattataacataccaagaaaaatcagggaactacaacccacggtatcacctaatggataagcgctttattataacataccaagaaaaatcagggaactacaacacctcattatattttgttgtgctaattttcattataacataccaagaaaaatccgttttctccgatatctgtattttaacacggcgtgggttgattttcaatactacaccggttatttcagcgctttattaacatattttactattgcaaattcacgacacgaaaccacaaaagccggtttagcgatacacctgaaaattcacattaaagttctgccgaattcatttcaggttgaattttttatttgcaaattattattgatttctttttttatatatgctatgctataaatgaataaacgattagttattaaaaggacttataaattatgagaacagagcaacaacacattgaaaaaaaacaggaaattatggaaaaatgctttgagtgctatgccgaaaacggcttaaccggcacgggaatcaaggcacttgcaaaggcttgcaactgcacaacgggcaatctttatgtttatttcaaaaatcttgatgaacttatactcgaatccaccgcatattgcatggcaaaggtggaggatgattttatggaaaaagcgccgaaagaccctaaagatgtgatgcgctttattgaagaggtgccgtattggacagcaaaaaagcacggcaaaaagtaccgtttgatgtatcagatctatagccatcctaaatatattgagcacggcaagaaattctttgagggcgtaaacgagcgctacacggaatatgcaaagcagcttgagccgaaaatcggcataccctacaccattacaacgccgcttatattcattttcgtccgcgcaagtgttcactatgccatgtttgaggacgaatattatttaaaatcgcaaatggaagtgcttaagcagggagtcactttatttgcagctaaatatgcaccgcaatatttaaacggaggtattgccaatgaaaaaaaagattcttagcattttgctcgccatttgtatggcgatgtgccttttgcctaccggggtgtttgccgacggaaaagcattcacggctttcggaagtgacggcaacaacggtgacggcacggtgattgataccgcctacgacacagccgcgcagaagcttgataatgactacggctacaccgaatatgacctcggagccaacattatcggtaacggcaaagacgaaaagatgagattcagattttggtcgcctacggcatctcaagtaaaggttaacatttttcaaagaggaaccgatgatgaacaaggcgcaacgaaaatcgccgcttatacgctcaaaaagctgtatgaaaacggcaagtggaccggtgtgtgggagataacgcttacaggcaactggtattctctttactacacctacagcgtaacggacgcggatacgggaaatacaaaggatattgccgacccttattctcgccagttcggcagggacggaaagcgctcatacacaatcaatttcgaccactattcttttaagcccgagggttgggacggcgacagccatgtgtattttgacagcgcaaaatcgcgctgtgtttacaggctcgatgttgcaagcttcactgaagattcaagcgcaaatgttaaaaacagcggaaaattcctcggtcttaccgaggcgggaacacggtatgacgatataagcgataatccgtctacagggcttgactacatcaagcagctcggcgtaactgcggtagagcttgacggcgtgtgtgatgcggaaaacgcattcgcgctcaatttgcaatgcgcaaccgatcaacagagcgctgtcagcgagctgaggcagatgataaaagtgctccattcggcgggattggcggttataatcaagctccctgcgggctttgtggaattaaacaacggcacatttgacaatgccgtgccaaactactacttccgcctaaacgaagcgggcgaaaagcttgacggttccggctttggaaacgaattggcaagcgagcgactgatgtacagaaactggctcatcaccactctgctcggctgggtaaacgaataccatattgacggtttttcgtttgagcaaagtgcgcttatcgattccgatacactcagtgctgccatcaatgcggtaagttccgttgataaccgcatagccttctttgccgacggcgaatgcaaaacgaaaaacagccacccgagcaccgtttgcacgggcgaaaccttcaggcgctcaacgaatgcaaattccgcatatctgccgagtgcgctgatttttgaggagcgcagcggcaaatcactctatgcggaaatatgcgaaagcctcggtgtttcgagcgatcagagaaacgaaacagccgttaaaaaagcaaaatttgcggcgggcctgcttgcggtttcaaacagaatattttatatcgacgcgggtgatgaaatatgcgcacccgagcttggcagaaatgtttttgaatggaaaaatattgccacctattttgatgtattttcgtattacagagggcttttgcaactgaggaatactttcccctatttttcgagcagcgaagcccaatttaagcgcggcaatattctctcggcttcaagcagcggaaacatacttgtgacaggccgcgaagcaaacgattggcaaacggtttcaatttcatataatgccaccgacaagcagacaaaagaagttgctctctgcgatttgagagattgggatattgtggcttctgcggactttgcgggaattgacagccgcgataagctgcccgaatccgcgaataattacttcgtgctggagccttattcgctgaaagtggcggttgattcaagcagtttcgcatcggcgggctttagctccggcacggaaacgcttacgcttgaatttatcaacgaaaaaacaaaagaaaagctcatgcccgatatgttgcttacgggcaaaagcggcgaaggcttcattcttcctaacagcggcaagccgaggctcggcaacggctatgagcttcacaaaacaagttcacccgtaaacggaaaattcggtgaaaccacgaaggtaacatttgaatacggatatatttttgacggaattgaggacggcggagaatattgctcccctgccgaattcaagcttaagggtattaacggtgtaacaaaagttaaagcaaacggcgcgacgcttacaccaaacggcgaaacctataccttagcaggttcgggcgagcaaaccgtaaccgttgaaacgggaaacggcactcacaccataaaggttaagcttcgcagcgaccacacttatcaatttataaccgaaaacggaatgtattataaaaagtgctcggcttgcgggcaaaccacttcaccgcaggcgataccgagcatagagataactgcacccgagcgcgtttgcgcggggcaggactgcattgtaacagtcggcacactgccgagcggcgtaacgattgaaaacggcttatatgaatttgaattcataggcgctgattttgaaataaccgagaaaaacggcgtttggagcggcacggtcagccatgattggtatcaaccggatgaaaataaattcgatgtatgtctcgtattaaaaaataccgacggctacatctttaccgtgagaaagactgtcaatgtgcttgccgagcacacgggcggcaccgccacctgcaccgaaaaagcaaaatgcgaggtttgcggcgaaagctacggagcacttgatgcaagcaatcacaccggcactgccgaatggttccgaaatgcacaggggcacgaaaagaagtacacctgttgcggcgcggtgattgtggcaaacgaagctcacgagtggcaaaacggcgtgtgcggtgagtgcggatatgtgtgcctgcatgatgatacggataaaaaccatgtttgcgactgttgcgaaaagatactctccaatcacgcagacgcggataaagatcatgtttgcgactattgcgaaaaggtcatctccgatcacgaagacgcggataaaaaccatatctgtgattattgcgaaaaggtaattaccaaccacaccggcggaaaagcaacctgcgccgaaaaagcaatatgcgagctttgcggcaaagcttacggagagcttaacgcaagcaatcacacaaatcttgtgaattttcctgccaaggcggcaacaaccgacgccgaaggcaacatcgaatattggcgttgcgaaggctgcggcaaatattttgcagactcggccggcacaaaggaaattacggcaaaagacacggttacgggcaagttaccgagcgataaaaaatcccctcaaaccggcgacggcaacagcttcacgctggggatcgcactgctgttcatcagcggcagcgtttttacggcgtttacagtaaaacgcaaaaaatcgtatcaacacggaggcaatgcgaaatgaagaaacgattattaagtatactgctcgccctttgtatggtgatatgccttgtgcctacaagcgtatttgccgaaagtgaaactaacaagaaagttgaaacggaacaggagcttgttgatgcactgtctgacagcagcacagacatcatcacactgaaaaatgacattgcaatcagcaccaccctgaccgttgaccgcgctgtcacgctggatgtttacggctatatgcttgaaataaccggcagcggcagcgttataaacatcaaaagcggcggtcaccttacgctgaaggacagcgaccccacagtggagcacaggttcgtttccgacaacggcctatggaagctggatgaaatcagcggcacagagaccgtccgcggcggcgtcatctacggcggcacaggtacaaaaatgtactattctacttacggcggcggtgtgctgattgagcccggcggcgcgttcaccatgaacggcggcagtatcgtgggctgtaaggccgacggcgcaggcggcggtgtggtggttcaatgcggtgatgcaaacggcatattcaccatgaatagcggcgccatcatcggctgcgtcgcggaaagcggcggcggtgtggaaacagacggcggcggagtaggggaatacggccaattcatcatgaacggcggcgtgatcgacagctgcgtggccaacggtagaaccggtggtggcggcgtccgaaacgatggtctgtttatcatggggaaggatgccacaatcaaaaactgcaaagccgtcgaaaacggtcaacgcaatattggcagcggcatagtcctcgccggtgatgaacggcaaaccatcggtggcacgatcatttcagaggatgtcgtggatgagaagtacatttttatgaaccgcagcacaatggccatcggtgaaagcgccaacattcacgcgaatataacgttggatggcggcaaaatcgacttggatggcagccgcgcgaccgtctatggcaagatcaccaacgatagctacggcggtgtcagttgctttgccgacggtcttgtcaccgtgaactacaaagtcaacggtgaagactacgccgttcagattctgcgttccggcagtttcgccacccggcccatcgaacccaccaagacgggctatgaattcgacgactggttcgtctccgacggcacgaagtgggactacaatacggctgtgacggagaatatcaccctcacgggaagcctgtatatccccgtaacgagtgagacagaactgagagccgctctggcggacgatacggcggatgtcatccggctgacgaaggatatcgacatcagcagctccctgaccgtcctccgcaaggtcaccctcgatctcaacggctatgttctgaaaatgaccggcagcggcagcgttattatcctcgataataagagcggcatcaccggcgacctgacccttatcgacagcaatcccacggcggagcacaaattcaaggttaacggcgcagaaccttgggtgctggacaacagcggtacagagaccgtctatggtggcatcatcacaggcggcacgggcagccggatcttcttctccaacggggtgtcaggcggcggcgtgatcatcggcagcggcgcactcaccatgaacggcggcaatatcgtcggctgcatagccaatagaggcggtggcctgttcctctcagacggttcgttcaccatgaacgccggcagcattgtcggctgctcaacaccaaacagattaacgaccggagaggcctttcacggcggcatatacgcttttggtccgatggcgaacgcagatacaaccggcgtgatcacgttgaccggcggcctgatcaaaaacaacggcagatacgatatcaatgctgcgtatatgaccacaatttacgccaacggcggcgaggtatacggtggggttcacctaaatcagtcaagtaagatcacctgtcttgcagaagataacggtattaccgccttcaaaggcaagacggtgatcggcggaacttccagtgtaaatccaagccatgttgactggggcctcttctacggcggtctggatatttacggcaatacgaccggcgtcatcgtgacctacaaggacggcgacagtgaacacgcaaagcaggttctgccctccggcactctcgcgacgcgtcccgacgaccccaccgccacaccgggctataccttcggtggctggaacaaggccgacggcacggcgtgggattatgcaagcgataaagtcaccgataacataacattgtatgcaaaatggatagcgaacacctacacagtgacctttgacaccgcaggcggcactgaaatcgctccgattacgcagggttacggcacggcgattaccgcacctgccgccccgacaagagaggggtacacctttatcggctgggatacggaaattcccacgaccatgcctgccgagaatatgacggtcacggcacagtggaaaatcaataaatacaccatcaccttcgacaccgcaggcggcactgaaatcgcacccatcacgcaggattacggcacgcagattgcctcccctgccgccccgacgagagagggttacaactttgtaggctgggataaatcgatccccgcaactatgcctgcagaaaacatcacaattaccgcgcagtggaaagacacggaaaagccgaccggcgagattatcataggcacaaataaatggcaaagctttttaaataagcttactttcggcttattctttaaggatacgcaggaggtaacgataaatgccgccgacaacagcggagccgtgtttatttcctattttgtaacggatcaggatctctccgaggcggagctgggctctcttgtgtactatgcatacgatgaaccgttttgcatagatcccaacggagaatatattatttatgccatgctcgttgatgagagcctgaacataacatatcttcgttccgaccgcataacgcttgacaatgttcggcctgtaatcaccggcattgaaaacggcaagacctattgtgaagcacaaacggtcaccgttgacgagaaatatgtagataccgtcaccgtaaacggaacagaggtcgagcttgacgaagaaggcagctttaccctcgctccagcaaacggcaaacagaaaatcatcgccgccgataaggcaggaaataccgccgaaatgactgtaacggtcaacgacgggcacaccttcggcgaatggaaatcgaacggcgacggtacgcatacccgtaaatgcacggcagacggctgcaacagttgtgaaaccaaaaactgctccggcggaaaagcaacctgcgccgaaaaagcgatatgcgagctttgtggcaaagcttacggagagcttaacgcaagcaatcacacaaatcttgtgagcttccctgccaaggcggcaacaaccgacgccgaaggcaacatcgaatattggcgttgcgaaggctgcggcaaatattttgcagactcggccggcacaaaggaaattacggcaaaagacacggttacgggcaagttaccgagcgataaaaaatcccctcaaaccggcgcaagcggcatgcttgcattatgcgcggcattattacttacaagcggtggcactgccgcggtaatatcaacgcgcaaaaagaaaaaattcggcaaggcagaatagcaaaagctttcctgccgaagcgatcatattaggcagggttaaatcaaagactttatcgttttaatgcaatattaaacaagcaagaattcatttaatcgattatgacttatgttatttccgaccttcacgcttgcctgccgaaaaagccgaaaacgatacttgccaagtcatttttacgagaatgatttttgtaaacaccgagca

SEQ ID NO: 2965 - DNA, 23234 bp, synthetic construct
  misc_feature 1..23234: note = Synthetic
  source 1..23234: mol_type = other DNA
aagggctggtctttgtccgaatgattggaacaaaggagttttgtctgacgtgttatataatgtgaaacgggttattccaaaaccaaaaaaatcgtattggcgaattggcataagaagtcatgcaaaaggaacttttcatgaatacatagagaatcctgaaatgattaatatggatgaattatatgttgtaaaagaaaatgatttgatattaaacattacatttgcatgggaacacgctgttgctttggctgataaaaatgacgatggtttattggtgtcgcatcgttttccaacatatgttttttgcgaagggcaaaatccgttcttttataaaaatgtaattgttcaagaaagattcaaagaaatgcttgtacaaatttctccgggtggtgctggaaggaatagagttatgagcaaaaaagatttcttaaaattaccttgtaatattccgtcatgtgaagaacagcaaaaaattgcagaaattcttatgcaatgtgataaattgattgaactctatcagaacgaaacagatgaattacagaaactaaaaaagatatgtttttgtaagatgtttcctaaaagcggaaatgatgttcctgaatggcgtttccctcaattcaccgatgcttgggaacagcgtaagttgggagaagtcggagaaacttatacaggattgtcaggaaaatcaaaagacgacttcggacacggcagcggaaaatttattacttacatgaatgttttttctaatcctgtagcttcatcaaatatgacagaagcaattgaaattgatgatcgtcaaaacaaggttcgatttggtgatgtgcttttcaccacttcttctgaaacacctaacgaagtgggaatgtcatctgtatggcttgaaaatgccgaaaatacttacttaaacagcttttgtttcgggtacagacctacggctgaatataattcgtactacctcgcttatatgttgcgttcttcatctatgcgaaagaagataacatttttagcacaaggtatttcaagatataacatttctaaaaataaaatgatggatattgaaatgccaataccttcaatagatgaacaaaggcaaattggcgagtatttccgtaacctcgaccgccttatcacccttcatcagcgtaagcttgcggaaatggaaaagcagaaaaaatcattgacacaattattattaacaggaatagtgagggtatagaaatgacggaacaaaatttaaaagatttatgtaaatgggcgttagaaaacagcaataaaccattatcaaaagaacaaaaagaacttctgaaacatgcaattgacaattcgaaaaccgttgaaaatttattcacaacagctattatttcaaatttaattagctgatttaaggagtaatcactatgccggatcacagaatatttaatgagcgtcctgaatcgcaggacagggcactcaaagttatagaaaaattaggatatacatttatttcaagaagtgaggctgaaaaaaagcgtggctttttaaatcacgtcttgtttaatgatgaacttgaaaaatatttgagtacacagacatatagatacggagaggatgaaaggtttttttcgggtggctccatttcttctgcaattcgtgcattagaggttaagaatattccagacctctatactgcaaataaaattgttcacgagcttatgtgtggcggcaaaagtatggaagaagatttacccaatggaacacgacagtcctttgacattggatttatagactttgaacaccctgaaaataacgtttttcaggttacagatgaatttgaagttgaaagaacgaacggaaaatttgctcgtcctgatattgttgtgttcatcaacggtattcctgttgtagtcattgagtgcaaaaaatcgagtgttgatgttatggaaggtgtaactcaaaatataagaaattggggacctgactacatacctcagttatttcaatattcacaacttgtaatagctatgaatcctgataaagttttatacggaacctgcggaactccggcaaaatattttgtatcgtggcatgaagctaataatgagtggcataatgaatggtgcagaaaatgttctcccgatggagaagtgcgggaacaagaccgtgctcttgtgtcattattgcatcctgaaagattacttgaccttattcagaattttattatttacgataataatgtaaaaaaagtggctcgttataaacagtattttgctgttaaaaagtgcatggatcgtattatgcttcgtgataatgccggaacaagaaatggtgttgtgtggcatacacagggaagtggaaaaacgattacaatgattatgcttacaaaaatgctgctgaaagagagtatgaagcgtaatagcagtattgaaaggccgagatttatcatggttactgatagagtgaatcttgataaacaaatcagagataattttataaatgctcaaatgcgtcctaatcgtgcaaagacaggaaaagggctaattgagttgctcaagaatgaagaaaatacagtaattactgcaattgttaataaatttgaggcggctatcaagtcaaactattgtaatgaaagtaaaaatatatttgtgtttattgatgaaggacacagaacgcagtacggaaagcttaacttatatatggacagagttcttcctaatgctgttaaaattgcatttacgggaacgccgttgattgcaaaaccaagaaaaaatgacaaaagagatattaaactgcccaaagatacattcaaaaaatttggtaaattgattgatagttacacttttaaagatgctattgatgataaagtgactgttccaattatttatgaaggcagggtcattcctcaacatgtaacaagtaaacagattaacgagcatttaaaatatataaccgttggattgagcgaaagtgcaaaacatgacttagagcaaaagtacagtcgttatgttgcagtatcccaaacagatcaaagattgagaatggttgcatttgacctgtatgagcattttataagttatgtcaaacctaaagggtttaaggctatgcttacatgttcgtcaagagcagcggcggtagaaatgttttatcttctcaacaagcttgatgggattactcctgctgtcgttattaccccaaactcagcaaaagagggagaggatgaaattaacacgacggaaacaaaaaaaagaattggagatttctttgccaaagagatagatccattgtacaaaaacaactatgaagcctatgaagattgggttacaaatgagtttgttgatccggaaggcgacattgatctacttattgtaaaagataaactattaaccggatttgatgcaccgccggcggctgttttatatgttgataaaaaactacaagaccacacattgttacaagctattgctcgtgttaaccgagtatttgaaaacaaagactttggattgattgtggattatataggaatatttaaaaaacttaatacggctttggatttgtattctgactccttttctggtatgaatgagtttaacagcaaggatattgaaaattcgattgtatctgtatctgaacaaaaaacaaagcttgaggaactacacaataaattatggtcaatatttgatgggatagatcgcacagaaacaacccctaatatatggcaagaacacctgagaaatgacaatacaagaaatttattttacgagacactttcgttatatgctaaacttattgacttgttgtattctagctgtgatttctttgaagcagtaggttttgaacaggctgaagaatacagaaaggattatcttttctttaaaaaattgaaagatagcgttaccctaagatataatgacagggtggatttttctaaatatgaagatggcatacgtcagttgctcaatacatatgttgctgccggagacgcaaaaatacttatagaaccacttgatatactcaacaaagataagatggaagaacaacttgccattcttggttccgacgaggcaaaagctgaagctattaaatcaagacaggttgaagtgctggaaaatgacagatatgatgatccgataaaacacctgtcttttatggaaaaaataaataaagccattgatgaatatatgaaagaaagagatagtgaaaagtatttgtcatcaatggaggatattgctgaggattatagacagggacgtaataatgcggcatatcctcaaaatatcgctcatgatagcgaagcaaagtctttctacggaagtatatgtagtggcctcaaaaaggctgtgggcagtgcagatggatatgatgatgaggttacaggcgtcttggcgttgcaaataaaagacattgttgcacaaaatgcaaaacgagattggcgagataatgttattgtacacagaaatataaaaaaattattggatgatgcattatttgattatatggaagataataatttggattggtctttggatactattgatattattattgatgagataatgctaacggcaaaaaaggtatattaagatgcaaacaagtattttagaattaaattgcaaaaatcaatcaatacctatcgtggtagaacgaaaaaacattaagactatccgtttaaaagtttatccggagtctgttgttaaaatttcttctccgtattctgtatcagatgaagtacttatagattttgtgtcaacacggcagaagtggattgaagaaaaattggaaaagtttgctgagacgaagggttatgctgctactacagtaattgaaaatggtatgtctataaaaatgttgggtgatgatttgatttttgcagtaagacaatgtgataaaaatttaatgtatcgagaaggtaagatactgcatatttgtactactgatactgaaaatcaagagaagattatgaaacaatttgataaatggtggagaaaagaatcacttgaaatcctaaaacaccaagtagatgccctttatccgatcataaaaaaatatgatattccatatccaagtatatacttaaagaaaatgaaaactctttggggtagttgtagtgtgaatcgtaataaagtcacattcaatcagtatttaaccaaggcgaagcctgcttgtattgaatatgttgttttgcatgagttagttcactttttatatcctaaccatagcaaaaagttttacgattttcttagtagttatatgcctgattggaaggatagaaaaaaagttttagatacagaagtggtacatgggttataaaggtggaattatattgtcagataatttatttgaattattaaaaaataaaagaattatagagatattggatggagatacatcttttggtgaaattgaaacaaacagtaataaagaaaacataaagattgcgatgccatatttatgcggttcaaggttgtgcgaaatttctacagattttgggttgcctaaaacgtatagttggaagggcggtgctcagagccggtggatatacttgcgagatataattgatcactgtatagaacataaaagaatgtccgagttgctttcgttcttattttcaaaagagcagtttggcaggatattaagtgggtatacagccgacataattgaatcttcttatggcaaaataacgacaactataatcgaacaaataaatggaattctgtattttggaggcaacgaactcatacaaatttcaggaaagtttttagttcgtccaattggaacagtagtaagtgttgcaacgccaacaattagaattatagatagaagctacataaaagatttgtctgaaagggcaatgaaagatgttacagacgaaaattatgatagtgcaattactaagtcgagaactttattggaagaagttttttgctatgttattgaaaagaaaaatgaaactcctgttgataatggtgatatcggaaagctgtataatcaggttaaacaattatataacatgcatcaaagtaaagaacttgataagagaattaatgtcttactttctggactcgaaaagattcttaatgcaatttcagaaatgcgtaataaagatagtgattctcatggtgtaggtgcaagaagaattagtatttcggagcatcatgcaagattgtttgtaaattcagcgatgacaatggctgattttattcttgccgtaggagataaaaattaaagggggggcaaaataagtatcaaaaggaatagtatatattttaataaacccatgtcttgatgggtgggttaaaatcggaatgactgaacgtaattatattgatagaaggttataagagttgaatactccaacaaacttacctttatcttatcgctgttatgctacttacgaagtgaaacaacctctagaagtcgaaaaaagaatccatagtataattgacagaattgatgatacccttcatgcgagagagcaattagaaaatgggcgtatcagagaaagagagttctttaagattaccctgaaacagcttatggaatatttaaagatattgcagctcttaggaatgatacagataatttgaaattgtaccgacctacacaagagcagtcgcaggaagaagaaattgcagaaacgagaacgagcctttctgttatctccgctattgtttgagagtagtgtaatttcataaggtacgcattattttctatatacgacacaaacagtgatattaaacatactcgttaaagcatttctacgatttgcgggtaaacaaaatttaaggctgctgtttcattttgaggcagaagccttttaatatgtataaaaccatcttttatatttaccgattttatggtattatttgtttgaatatacttttggtaatttaaattaaggagatattaggatgataaaacccaacgcgttaaaaaaaggagataaaattgcaatagtaagtttgtcttggggaggattaggtgatgaaaagctaatccataagtactatatcgcaaaagaaagattggaaaaagatttcgggctaaatgttgttcctatgccaaatgcacttaagggtagcgagtttgtatataatcatcctgaacttagagcgaaagatttaatggctgcttttagggatgagtcaattaaaggtatcttttgtgctatcggcggcagcgactcaataagattactaccttacatagattatgatgtaataaaaaataatcctaaaatctttatgggatattcagatacaacagtaagtcattttatgatgagaaaggcgggattagtctcttattatgggccatctgttatgtgcgaatttggcgaatatgttaaaatgtttgattatactaaagaggctgtagaaaacattttattcaaagacacaacaaattacgaagtaaagtttagcaattattggtcggatgattttgtggattggaaagagaaaaacataaaccgttctaaaaaactgcgtaaagaaaagcacggatatgaaattataaacggttcgagtgttattaccggagagttaatcggcggttgtcttgatgtgttcccaatgattgtcggaactgaaatatggcctaaatcggatgaatggaaagacaagattttactgattgaaacaagtgaagaaaagccaaagcctgattatattctgtattatttaagaaatttaggggcgcaaggtatattgaaatcaattaaggggattattgtcggcaagcctcagaacgagatgtattatgaggaatataaagatgttttcaaaaaaatcattaaagaatttgattgtgaacatttaggaataatctacaatgtgaatattggtcacgcatctccaacaggattattaccattaggaattgagtatcaaattgatttagatagtaaaactattacttttaaagaaagcggagttaaaatttaattatgtgaaattatatttagttgaacctaatgacatgtcgaatggattgatatattaaaatgacctgcaagccgttgggaactattcatttgccatatttgcaacatattttgcaacacgagtgatgataaagagaataagacaaagaaagacaacgctaaaacagcactaaaatggcttgaatagaggtaaaataagacaaatgataatctcggaaaagagtgggagtaaattcacattcgtgaaaaagccttattttactgggtttttgccgattgtatatgctttttggcaacaaaatggcaagcacaatttttgaacaaattggcggtacttatacgcaggttgaatttgcggaaaaattaggcgtttccaacaaatccgtatcacgctgaaaaataggaaaaaatatgcccgatgtgtccctgcttttgcctatatgcgatgtgtttgatatttcattcaacgagttaattatagatgaacacataccacacaagaaagcaaaaattaaaaacagcaaactaagagctgccggacatcaagtccgacagctctttaacattatatcgttgttgaattaatattccctgctgttatgaattctttacattataaagtttatccggatagtcggtcataatgcagtctgcacccatatcaagcagatatttcatatcctcttcgtcatttactgtccaatactgcactgccatattatgctcgtgagcatagttaatcatctgtgctgtgccaagatttactccaagatttctgtaaggagcgcaaaacggaatttgcaacacattacaaggcggctcataattcgggtcgttttcaagtgctgcctgccaaaactcaaatacttcgggaacggaagtgcttcgtgcaaggtcaggatagttttcgtctacataagtgctgacttccttatggaatgaaccaaaaataacattgtcaagtattcccttttccacaatggtgttgtaaagaatatcaacgccttccttacccaaatcctcaccgtttttgatttcgatgatgtacttgtatctgccctgtccctgctcgataagataatcaagaatatcgttaagcttgagtatcttcaaatcgtcgggaatctcgtcacctttaagctcggcatacggcgatttaccgttttcgttttcaaatttagcacccatattaagcgttctcagttcatcgtaagttttgtcttcgggtctaacatccttttcgccaaaaacctcacgactgtccgaggttctgtcaagagtgtcatcgtgcaaaagtacaagctgcttatcctttgtgatatgcaaatcaaactcaaaaacatcaatgctgaacgcaggattttctgcacagtttttgaatgcaagcatagtttcttcaggctcgattccgccaccgcttcggtgtcccgaaatgtcggtttgctcaagtatgtacttgttatcggtatcataagtttgaatttgatcaggaatggaacgatgctttcctgacaccgtcatcaccgttgcaagcgaaacgatgagcaaaataataacagccaaaacaatccatttcgctgtctttttacccgtttttttattttttgttttttccataaattatccctcgctgtaaatattatataaacattttacatagccaatgttgcaatgtcaacaaaagttttcagtaatttatacataaattggtaattatatataaaacaatcaaaaatcgatatgatacataaatcccccgatttttgcaagcaagtcaatataccgataaatacaaaaacacggtctgccttaaagtaggcaaaccgtgttttttactcaaaattaaattataacacaaaacattatcggtttgaataaaaatcattaaatggtacgcttttacgaccttattatgcaaatcattttgaccctatttacaaataaacgcaattatgttatactcaaattgttcttataacataccaagaacaaattaggttactacaaaaaggtagaaaaccgaaaagctctaacggctcctttttggggccgttatctttttataatataaaggggaacattatgaaatacggaataggattggatttaggaattgcatcagtaggatattgcgtaacacagcttaacgcaaatgacgagccaatgagaatagttcgtctgggttcaagagtttttgattgtgcggaaactgacaaaggcggttcgcttgcccagccaaggagggaggcaagaggacaacgcagaagaacgagacgacataagcatagattagacagaattaaatatatgctattacaaaacggcattgtcacacaagaagaacttgacaatatgtttgtcggcaaattgtctgatatatatgaaataagaagcaaagcacttgacgaaccaataaacaatatcgaatttgcaagagttcttatcaatcttgcccaaaggcgtggctttaagtccaacagaaaagttgaagaaaaaagcaaagacaaagaagtcggtatgcttttgggggctatcgaagaaaacaaaaagtgcattgtgcaaaatggctatcgtacagttggcgaaatgctgtataaggatgagcgatatgctaaaagcaagcgaaacaaaggcgaaaattatctaaacactgtttctcgtgatatgatagaagatgaaataaaaaagatattttttgctcaaagaaactttaatatggcttttgcaagcgaaaaactggaagaagaatacacagacatagtaatgtcgcagagaccgtttgacttaggccctggagaaggcaataaaaactcaccaagcccttatgccggtaaccaaattgagctgagagtcggcaaatgtacgctctttccaaatgagcctcgtgccgcaaaagcaacatattcatttcaacttttttcccttcttcaaggcattaacaatatttctcttattgataacgcatcaaataaacatatgctttgtgatgaagaaagaaaacttcttaaagaatattgcattaatacaaacaatgtaacatttgcgtcaattaggaaaaaacttggaatttcgactgattatagatttgccaatctgtcatatggcgaaaaagatgttgatgaagtcgaaaaaaaggctaagtttcagcatttgaaaagttatcatcaaatgaaaaaaatcctgggcgaatccataaaatcatttactacggaacaactggataaaataggaacgatattttcttattataaaaacgatgaacgaataaaagaacagctcaaagaaacagacattgaagaatctatgtttgaatcactgcttcaacttccttcgtttagcaaaatggggcatataagtataaaagcttgcagattgcttattccatatctggatgaaggtaagtcctacaatgaagcatgtgaatgcgcaggtataaattttaagggacattctaattctgaaaagagcctgaccctgtcacctgtgtcaagagaacttgaggatataactaatccggttgtacggcgtgcagtatctcaaacaataaaggtattaaatgcaataataaacgaaatgggggcctcccctacatatgttaatatcgagttggctcgtgaactttcaaaatcaaaaaaagagagggaagatattgcaaaaaatcacaaaaaaaataatgataaaaatgagaaaatcaaagctgagataatagacaattttaatattattccaaatggtcaagatattattaagttaaaactgtaccatgagcaaaacggaatttgtccatattctctaaaatgcattgaatacaataggttgtttgagataggctatgtggaaatagaccatattgtgccatatagtgcttgttttgatgacagctacaataacaaagtgcttgtcttttcaaatgaaaataggcaaaaaggaaaccgagtgcctttagattatttagaagacatcaagaaatctgattaccgtgtttgggtaaacggaaatgtaaagaattataaaaagaagcaaaatcttctaaaagaacattttgataaaaacgacgaaagagaatttaagcaaagaaaccttaatgatacaaggtatttaagcagattgctatacaattatattaatgataatcttttgtttgaagcatttagcagcggcaaaaaaactcatgttatgtctgtaaacggtgcggttactgcgtatattcgtaagcgttggggcatagaaaaaatcagagaaaacggcgatttgcatcatgctgtggatgcaacggtgattgctcacattacgcaaggaatgataaacgaaatcatttcttatagtttttcaaaagaaacagaatacattattgacaataataccggagaagtaaaagaacgcttccctcttccttatcctaacttcagaaaagagcttgaagcaaggagtgaaattgaagatgaaaagcgtctcaaggacattcttcattctttcccaaactattcatacgatgatgtcgccttagcgaaaccggcctttgtttctcgtatgccgaaacataaggtgacaggtgctgcacatgacgcaaccattcgttccggtaaagttgaaggctttatgatttcaaaaactgatttgacatcattaaaattaaaaaatggtgaaattgaaaactattataatcccgaaagtgattctttgttatataatgcgcttttgaaaaggctcattgagtttgacggcgatgcaaaaaaagcttttgtcggagagtttcataaacccaaatcggacggttctgtgggtccgatagtcaaaaaagtaaaactcatcaaacgctcatcattaaatataaaagcaagaaatgaaaacaattttggcatagcagagaatagcaatatgattcgcatagatgttttctatgtagaaaatgaaggttattattttgttccgatttatgttgccgatacagttaagtctaccttgccaaatatcgcttgtccttttatcgatgggaaagaaaaaataatggaagacaaagatttcatattctctctttatccaaatgatttaatcaaaataactaaaaaagaaatgaagtttaatttatcaaataaggaaagtacgttgccgtctgtaaaatatgcaaatgaagcactcgtatatttcaagagcgcagatatatcgactgccagcataaatggtataacccacgacaactcttataaatttagaagttgcggaatcaaatcgttaattaatcttgaaaaatatacagttgaccctttagacaatgttagtaagataaaaaaagaaaagcgaatgtactttaattaattattatggcttatagaaatatttttgttgctaatgaagtaaaaatgaagttaaaaaacaatcaattaataatttcaaacggtgacgaattatcatttccgatagaggacatccgttcgatagtaattgataacccttattcaacacttacttctaaattaatttcaaagttggctgacgacggggtttgcttaattatttgtgatgagaagcatattccctcttgtgagcttttacccataggggcttattgtcgaatgaacaaaaggattaatcttcaattttcacagtcaaagcctaaattgaaaaagatatggcagcaaattgtgcaatcaaaaataaacaatcaagccaagtgtttagaattaaatagtgtcaacgaatcgaatttgctctttggaatcgcaaaaaatgttgcctctggagacacaacaaatcgagaaggttatgcagcaagattatatttcaaggcattatttggtaaggaattcactcgtaatgacgaaaataatataaacgctgcgcttaattatggctatgcgattatccgttcgtatattgcaaaaacgcttgtcacttatgggttggagggaagtctgggcatacatcataagagccagttaaaccaatttaatttagctgacgatattatcgagccgtacagaccgattatagataattatgtttaccgaaattttaacgcaaacagcgaagaactttcaacccatcacaaagcacagctgcagcttttacttaacagtgcaaccgtaatagacggtactcgtcatagtgttgctaacgcaatagaattaacggtgcaaagtttggtttattcttttgaaaacgataaggctgcacttaaattgccaaaattaagtgaaatttcatattttaattatgactaaatttatgagaatgattgtattttttgacctgccggttaaagaaaaaactgcacaaaaagcagctgcaaaatttagaaactttttaattaaggacggctacttaatgattcagtattctgtatattcaagagtttgtaatggatatgacgcagtaaaaatgcatgaaaaaaggctcagacagcatttgccgcctaatggttcagtgcgcttactgacaattacagaaaagcaatatgaatccatggaaattttgcttggtgaatttattcagtcagacattcctgtatcttatgaacaattaactttattgtaaaaaggaaaaggcacaacaaaatcaaatgattttgttgtgcctttttatctcaaatttttcttgaaacgccctgttttcccatgttttctgtccccatattataacataccaagaaaaattagggaactacaactatgcctgttcacgaaagcagaaaccatatattataacataccaagaaaaattagggaactacaaccgctccccttatcaaggggagatgtcaatgattataacataccaagaaaaattagggaactacaactgattttttctttttgtctgttataataaattataacataccaagaaaaattagggaactacaactatgatagttatttcttctatagtggataattataacataccaagaaaaattagggaactacaacttaataacactcgtgatgaaatgcaatatattataacataccaagaaaaattagggaactacaacttgttctggaaacttttttaattcctcataattataacataccaagaaaaattagggaactacaacctggtgtgcgacttatggatgtttgaataattataacataccaagaaaaattagggaactacaaccgaatacctattactcaaccgttcaggacaaattataacataccaagaaaaattagggagctacaacgcgttgtactccactttcgtcagggcgaaaattataacataccaagaaaaattaggggactacaacgaaaatattgactttagaacgcccgatacattataacataccaagaaaaattaggcaactgcaattatgtaaaaggtatcggttttgttattaattactctttaagggttagtatagcaagctgttatttcgttttaagctttagaaattgaagtattgtcgaggagggtggttgttataaattgttcctcggatattttataggtgtatttgccgttatattttttaacggtatcgctgataatcttttgaccgtagccgtgaaaatccttttcccttatttttttattggctgtatttttatatgcgtttatacctttaattaaaataatctaaggcgtaatacggatagaaagttctatcgcttttttctccgaaaagctttctgtcgcttcgatttgattatcaataagattagtcagaactctgcataaatcgtaatttgatattttaatttcagcgttttcctcgaccgtcattacaagttcaattcccttttcctttgcttgctgacacttgattgtgtaaattgtatttatagtttcgtttttgcaaattatctcatatgcggaattatgaatatcgtcattagccttttgcagaatttccaatgcgttttccgacttgtctatttcaataaaaccgacagcagttgtaatgatatttgacatatcgtgtctgatttttctgaatcgttctcgttcggttttcagctgcaaatatttttgataatcaagttcgtttttagtaatcaactgcttatattttaagttttcgatttctcttttttcgagagcgtcaactgcaaaaataatcgaaaaatcaattacaaagcaagcaataaaatatatgcaagaaatcagcgataacctttgagaataatcatttgccttagtagcaagctgctgttcaaacgcataaacaagctgaattgcaaaaacatgcgttaaaggaaaaagataaaaatacaggtattttatattatgctccagattattgtcaagcttgttttttatcattttaataccaaaagcaacaagaaatgaaaacgcaaccataaataaacataggcaaatcagcgacaagcgggttgttgtattaagaaatgcgtctgtgctttcttttccaaagataaaagttattaatgcataatataacgcagaggataaaagcaacgacaaaaatgccgatataacagaaatcagcttcaaatataatttgctctgagttaaagcgaccacaagtataaattgaatgataaaatatattgtcagacaggcatactcaaccttttgggacatatccttgaactgcaaggtcgcatacgaatataccatacacactccaacataaacaacaaaggttttaactatgccgtactttctttttgtcaaagcatttacaatattaaatgataaaacggctcttgcaaaatgtaacatccaagcccacgggaaaaagtcaatagttgaaatttcattcattattttattacctcatttatagattcagcaaataatttttgtaatcgtttaccttctttgaatacgactttggagatatttgaactttatcattattctttaatgtaaattgataacgctcataactgataatgtaattcatattaaccaaatagcttttatgacaacgcaaaaaattaggcggaaactcttttgaaaaagacctcaatgatgagtacagtgtatattcctcattggtaatcatatgcaaaacaatattgttattaaaggtttcaatataggcaatattttgcatattaataatacaattttttccgttactttttataattatttgttgggcgactttttttgtaatattatttattgcttttttaattgcacttaaaagctgctcgtcggacattttggattttatcaagaaataacagctttctgtttctgaaaggcgatagctttcaatcggaaacgaggtcataagaatgtactgagtcgaacgagtgtttaactgcttttctatcatccaatcaatagagtttttatcattaatcattatatcaagaaaaacgatattaatattatccgaattcaaattagcctcaagatcaatcaaattatcacagtatccaatattatattctacatttagatttttttcaaataaatttgaaattttgttttcaagcagtaatttacattctgtatcatcatcacaaataagaatattaaccaaaacatcatctccccttataatttatcgtaattatatcataaatgattatctttgtcagttgcttttgccctgcgaaattcatattataccctgtaattattgtaatgttacaaagtttgttttagtatattgtcgagccgtcggttgccgataaacaggcggattaaaaagattaaatacgcaaaaaatgaaaaggagaaaacaaatgagaaatgaaaaacaccctgacccggccgcttcaaacgcttctgcaagcgagtccaaaaacaacaataaaaaagataaaaaatcaaaggttaaaatcattatcggcattgttgcagtgcttcttgttttaattgttgccgtgtcaacatctaaaagtggcaacaaaaaccaagaaaaaattcctgcagcaagtgagatgtatccgattggagaggatatgggttacgattcagacgacaatgacgatagtaacgagtgcagttacaccatcgacccatatgagataattcaagaaatcgttgtcgacataaacgacaacaaggcatatataaaatttgatacctcttataataaggaaaaagacggtattaaacttatttacagcggtgatacggacccatatgacggcaacggcttattagtaaagcttcctgacggaacaaatcacagtgtcagctatgatgttgatattttaagctttaactcgaccggtaaggttacagttacaccgtcagcgtcaaatgaaattgtattcacaaagccatctgccacatttgatgcgataacttgcgactatttgaccgacccaagcaaaataaaagacagcgattacaagctgcttaaagaacacgcaaacaaggtctatgcagaggcttcggagaaaaccgacaacggtaaatattataaaacatatttttctatgcaaaattctacgggagtagaatacggtcgcattgagtttatgtattcatatgttcatgaaggccagacttattatcaatcagtggcttttgaagaattaaagattacagaaaacggtgacttgtgcaatataagctacactaaggaaaaaggcataaaattgattgacttaattgatattgacaattaccaaaattcaaaatatgttgaggttaagcgataaggaggattaaaatgaaaattaatgataacaaaaccgaagcttcaagagcaaataataatttagacaacagctcgccgaaaaagataaaaagccgcaagcccattataataattgcggtagtcttagttgttataattgccgcttcaatgattaattcaaatcattcaaaaagcaaatcctctcatacggaaaatccaaaaagtaactattcatattccgatgatgactttaaaaaaagcgacaatgataatgcctcaatagatttattcgatgcaatagagaatgtttattatgatgagagtgataaaacctgccttgtaaaatataaaagcgattataatgtagattgcttggattataatatcagctatgggattgacacgtccgacaacgactataccgaatgtctgaaaataacacgaaacggtgtaacaatcgggcagtgcgattttataactgataacagcacctatgtcgctaccggaacaatttccgttaaattagttgaccatgataacagcgtcataatgcttaaaggccgagaagacaaacaaggcaatataaatgaccgcaattcgttatttggagaaatcgaattaaaacaaattgaaaaggaaattaagccgttaaagtgttcatataatgttgaccacagtgccattcccgacagcgacattgacaaaatgcttgaggtcgcagaaaaagaaatcaaaaaaacctaccctcttgcaaagcttgaagccgtttattacggatacgatgagggcggcacaggagacgagagtttgtatggaatcgaccatggacactataatgaggttaaatttgtttacagctatgttgataacggtcacaaaggactccaaaatgtaaacttttatgatgtaaagtatgctcaagacggaaaggttattgaatctatttccgtacttccgataaaagtcaaaacaacgacaagcagtattacagaaattgacgaatatgaaaagacacaaaaagaaagctggagagagctttacaagctgagataaaactaaaaaacatcattataaaaagtggcttgaacattcaagccacttttgacattttatatgtcgagcatagtcttttaagcactgactctttgtaaaagttttatatcaacataacgaaatgctgtcgatgagttttaattcttcatcggtgaacggtgtgcagttgattgccttgatgttgtcgagaatttgctgtggctttgacgcaccgattaaaacgcttgtgacctcgtccttttggagaagccagccgagcgccatatcagcaagcttttcgccacgctttgacgccaaatcgttgagttgacggatttgctccattctcttttcatcgagcgtgctttcctttaggtatctgccgtcggtacggatacggctgtcctcgggaattccgttcaaatagcggtcggtgagctgtccctgtgcaagcggactgaatgtaatcagacccttattcagttcgctgacagcttcctttaagccgttattttctaccgttctgtcaaagattgaatagcgattttgattaataacaaacgggcaattcaaatcacttaaaattgaagccgctttttttagagtttttccgtcataatttgaaagtccgacataaagtgccttaccgctgttgacagcagttgcaagcgcacccatagtttcctcaagcggagtgttcgggtccattctgtgatgataaaaaatatcaacatagtcaagccccatacgctttaagctttggtcgaggcttgcaagaagatatttgcgactgccccaatcaccgtaaggtccgtcccacataagatagcccgcttttgttgaaattatcatttcgtcacgataagcgtgcaaatcttctttcataattctgccgaagtttttttctgcgctgcccggctgcggaccgtaattatttgccaaatcaaaatgcgtaataccgttgtcaaaagcagtaaaacacaatgctttcatattttcaaaattagccgtgtcaccgaaattatgccacaagccgagcgacaccttgggaagcattaagccgctttttccgcaacgactgtattccatggcagaatatctttctttagacgcaatatacatagtcattcctcctatatgtgtgaaaaccacttgttgagcagtcaaaattttggctgtaaattttcaacgctctacatatgaaatatagcacatattttcacaacaatcaatccttgctttgcggttgccaaaaaaattaaaaaagtgtataattatatttcaaagattagcaattttaattgaaaggtacatacataatgctgaaaattattcctaccccggcatttgctgatattgataaaaataaggtacttaaaatcaaatcgttgtcgcttgacgagagcaaaatcaataaagccgttgttgacgatttttatgattttttgtataaactcaaaattaaagtcggtgatgactgcacggttgattttatagacgagccgtcactttcatacgaggaatacagacttgaaacagacgaaaaaatcaaaatttattcaagcagcctcggcggcagagtttttgccttgcaaacgctcaagcagattttatttcaacagggcgaaaatgtgccttatcttgtaatcaaggacaagccgagatgtaaaatcagaggctttatgcttgatgtcggaagatatttttacactgttgacgaggttaaatctttcataagaaaggcgtcgcttcataagcttaattttctgcattttcaccttaccgaggatcaaggctggagagttgaaatcgacaaatatccgctgctgacccaaatcggctctgtaagaaaaaagactaattttaacaatactccgcacggcggattttacaccaaggcagagcttaaaagcattgtagattatgcccaaagcttttcaatcagcgttatgcccgagtttgatattcccggccacagcaggagtgctatggcttgctatccgtatttaggctgctttgacagagaactgccggttgcagaccattggggagtgaagcacgatgttctgtgcgcgggtaaggattcgacatatcggttcgttgaggatgttatcgacgagctttgcgaaatattcaccgacggatattttcatatcggaggcgacgaagtccctaagcataggtggcatttatgccctcattgtcaggcgaaaatcaaggagcttggcttaaaggacgaggaggaacttcaatgctactttatgaacaaaatcaatgactactgtataagtaagggcaagcaggcgtttatgtggagctgggatttgaaagatgataagcttcttaacgaggatttaggcttcacgaaatgcggggatattaacacaggcaacagaccgttcattgacacaagtacaaatgcgtattatatcgacctgccgtacggttatatcagcctaaaagatacggcaaatcataagctctacgacggaaattgcttgggcgcagaagcaacgctttggacagagtatgttcccgatatgaaaaaggcggacaaaatgacctaccctcgtctcggcgcattggcagaaaccgtgtggcacggtgataacaattacgacagctttaatagcgtgcttgattactactattcttatcttgataaaaacggtatcggctactctgagcctcaaattgcaaatccaaataaattcagaggctttttccaaaacctttggtttgaaagacgccaactcacctgggagggcttaaccaacatcttcgacgatataaaagtcgaacgcctcgcaaaaaagcaataaaaaaggctttcgctcaatcaagcgaaagcctttacttttattcggtttgttccttcttgctgttgtttccaactctcgaccagtctacaagaatgttgttgttatagaaattactgcgcttttcaagctcctcgtttacgaaatcagttccgtcacgctcaaataatgttggagtttcggagaaaagatttgtaccgataccaagcttatcaccctcgatttgaacacctatacttgcaagcattgtaggaagcatatcgaaggttgcccactcacgattgttaaagcggtctgccttagccgatgtgcaatttggtgtcggattaagcacaagattgaagcaggtgcgtctgtaagcagggtcgaagtccttaaagaaattctgatccatgctcaagtggtcgccgttgataacgattgtggtgttctcatagaaaggctgactctgaatccaacgaacgaatttaacggtttcagcctgactgtaaaagataacatttgaatactgcttatcaaacggtgtttctgcatttttagaaaggtaaccgtcagggaaatgagtatctgcggtttccataacaaagtagaacggcttgtcctcatttgcaagacgagtaatttcatcctttgcaaattcgtaaagtttatcgtcttcataaccccaccatacatgatagtcgggagcaacaagtccgttatctcttgcatactttgcgtccattattttatagtcgccatgctcttcaaacaaatactgaagtccgccaaagcttgcatcggcaccgaacataacggtttgattgtagccctgctcctttaatatatcaccgatggttctggcacccgggaggaagttgttggcagtaccgtattggtt

SEQ ID NO: 2966 - DNA, 23174 bp, synthetic construct
  misc_feature 1..23174: note = Synthetic
  source 1..23174: mol_type = other DNA
tttgtcaacgtcggcaagtgtcttaacagcaagagccttaacctcgtcgtcaagcggctctgccgtgtcgttcggctgaataatgccgtcgaaatactttttctgcattgcgattgtacggtttacaagattgccgattgtgttcgcaaggtcagaattataacgctcaataagtgttgcataggttattgagccgtcggaagcgtgaggcatctccgaaagaagataatatcttacagcgtcaacgccgaatacctcaatcaaatcctcagcatagataacattgccctttgattttgacattttgtcctcaccgaacaaaagccacggatgaccgtaaacctgcttgggcaacggctcgccgagagccataagcataatcggccaataaatcgtgtggaaacgaacgatatccttaccgataatgtgcacgtctgccggccaatactttttgtacaaatccgagctgccgtcgggatcgtagccgagagcggttatatagtttgaaagtgcgtcaagccaaacatagatgacgtgcttttcgtcaaatgtaacgggaataccccatttgaaagaggttcttgaaacgcacaaatcctgaagtccgggacggataaagttgttgagcatctcattctttcttgattcgggataaatgaaattctcgttagactcaatatagtcttcgagctgcttttgatattttgaaagcttgaggaaatatgcctcctcctttgctttcttaacctctctgtgacagtcgggacaacagccgttctcgtcaagctgactttcggtccagaaactctcgcagggggtgcaatacattccctcgtactcgcccttgtagatgtcgcctttatcataaagctttttgaaaatcttttgaacagccttttcgtgataatcgtcggttgttcttataaatttgtcataggtggtgttgaggctgtcgcagattgcacgaatttcgcctgcaaccttgtcaacatattccttaggagtaacgcctgcctcttttgcgtattcttcaatcttctgtccgtgttcgtcagtacctgtcaggaagaacacatcatagccaagcattcgtttatacctcgcaatagcgtcggtcaaaacgatttcgtaagagttgccgatatgaggctttctcgatgtgtaggcgatggcggttgtgatataaaactttcctttatcgctcattttattacttcctttctataatttttttgtaacttatatattttaccatttattcgtaaatatatcaacagtttaattgttttttacaacagagcatacggtatgatatgtttttctaatccgtacaaaaacggattttgttgatttacaataaattacgattgctgtcaaaagcacaaaactaaataaatccatgttttttaccacgcaaacactgttgtttaccacgaatatattgaaacgaaaatggcaaagagttaatataaatgtgtcaatggcacaaaaattttttaggagaacaaaaatgaaaaagacaagaaaaatcatttcgttattgttgtcaattttgatgataataacaagcgtaccgcttatggcggtaaactcatttgcggctacaagcggcacaaccggagagtgcacatggactcttgacggtacagtgctcacaatcagtggcaacggaaaaatgaaggattatagctgggacgatgcttcgccgtggggaacttcaattacaaaagttgtaattgaaaacggtgtaacaagtataggcgagtatgcttttagatattgcacctcgcttacaaacataacaattcctgacggcgtaacaagcataggtgattatgcttttggcaattgcacctcgcttacaagcgtaacaatacccgacagtgtaacaagtataggcgaaagggctttttataacacagcttattacaatgatgaatcaaattggaataacggaatattatatatcggtaatcatttaattgaagcaaaagagaatgtttccggcaatgttgagattaggcagggaacaaaaacaattgccgattctgctttttacggttgcaactcacttacaagcgtaacaatcggaaacggtgtaacaagtataggttacagtgcttttgaaggttgcacctcgcttacagaaataaatgttagcagcaataacgcaaattatagttccgaaaacggtgttctgtttaataaagaaaaaactgagttaattagatatccggaaggaaagacgaaatcgaaatacacaattcccgacggtgtaacaagaataggtatttttgcttttaaatattgcacctcgcttacaagcataacaatacccgacagtgtaacaagtataggcggttatgtttttatgggttgcacctcgcttacaaacttgtcaatcggaaacggtgtaataagtatagatgataatgctttcaatgattgtaattctgttacaacagtagaagtcaatagtgaagtagttttctctgcccttaaagaaataaatcgtattgaaaacattgtaattggagatagcataacaagcatagatggcaaattttttaatggtcgcacctcgcttgtcgaaataaatgttagcagtaataacgcaaattatagttctgaaaacggcgttctgtttaataaagaaaaaaacgagttaattaaatgtcctcaaggtagaaaggaatgtgtaattcccgacagcgtaacagaaataggtagttatgctttttatgattgcaccttgcttacaagcgtaacaattcctgacagtgtaacaagtatagacaagtatgcttttaatggttgcacctcgcttacaaacttgtcaatcggaaacggtgtaacaagcataggctacgaagcttttagtgagtgcacctcgcttacaagcataacaattcctgacggcgtaacaagtatagacgatggagcttttgcatattgccactcgcttgcaagcgtaacaattcccgacagtgtaacagaaataggtgattatacttttaagaatactgcttattacaatgatgaatcaaattgggaaaatggcttattatatatcggtaatcatttaattaaagcaaaagatgatgtttccggtaatgttgagattaggcaaggcacaaaaacaattgccggtggtgctttttattattgcaccttacttgcaagcgtaacaatcggaaacggtgtaacaagtataggcgagtatgctttttgcgattgcacctcgcttacaaacataacaattcctgacagtgtaacaaaaataagtaataatgctttttggggttgcacatcgcttacaagcgtaacgatccccgacagtgtaacagaaataggctattatgctttttgcgattgcacctcacttgcaagcgtaacaatcggaaacggtgtaacaagtataggcggctctgcttttagcggttgcacctcgcttacaagcataacaatacccgacagtgtaacaagtataggcgatagagcttttgaaggttgcacctcgcttacaagcgtaacaataggaaacggtgtaacaagcataggctacaaagcttttgcatattgccgcttgcttgaaagtgtaactattcccgacggtgtaacaggtataggtgactccgcttttcatagttgcacctcgcttacaagcgtaacaattcccgacagtgtaacaagtataggtaaatgggtttttgtagacactgcttattacgataatgaatcaaattgggataacggaatattatatatcggtaaccatttgatctatgctaaatatgatctttccggtaatgttgagattaggcagggcgcaaaaacaattgccggtcttgctttttataattgcacctcgcttacaagcataacaattcccgacagtgtaacaagtataggtgattccgcttttcataattgcacctcgcttacaagcgtaacaatcggaaacggtgtagcaagcattggcgatcgagctttttataattgcgcttcgcttacaagcgtaacaatcggaaacggtgcagcaagcattggcgatcgagctttttataattgcgcttcgcttacaagcgtaacaatcggaagcggtgtaacaagtattggcacagaggctttttataattgcacctcgctaaagcgtgtttatatttctgatacagtaacaactattggcgaaagagcttttgggtatgattgggacagtgacttacaagactatataagaattgaaggatttacaattataggtaagcccggttctgctgcacaaacgtatgcgaaagagaacggctttaacttcgctcaggcagcacctgcgcccacaatgtcattccccgatgtcagaagcggcgattggtattataacgctgtaaaatttaatgctgaaaagggttatgttacaggctattcaaacggcacattcggaccgtcgaacaacattcagagacaggactttgttcttattcttgcaagaattgcaggtgcaaacctttcggcatataagggacagaacggtggcttctcagatgttcaggcaggtgcttattacgcttcggcagtagcatgggcaaaggataagggcatagtaacaggctattcggcagacaattttggtgtaggcacatacatttcaagagagcagataagcttgattttgtgcagataccttaacggttctgcttcgggcgacgttgatgcaattctcaatgcttattccgacggcggaaacacaagtccgtgggcaaaggcaggagttgcttgggcagttgaaaacggtataatcggtaattccgattacctcaatcccaacggcaacgcaggcagagccgaagtagcacagattatttacaatatgtccaacaaaggcatgctttaatttattcaaattaaagattaaattaaatacaaataaatacaaaaacagaatatataacacaacaaactccctcttgagagggagtttgtttttgcgtaaaagcgtatcaggttgaaaatgcggttgtacgaaatctatatcaaatttaatttgtgcttccgccccatctttgagggggctgtcatttttccgcagaaaaaatgactgagggagttttataatttaaaataacctttataactccctcagttacgctacgctcaacagctccctcggagagggagcggatttatcttttcagtttgcggctgtccgccaaaggctcccttgtaaagggagctgccgtttttttggaacaaaaaaatgactgagggattttacaaattcatataaaatcaaccttacaatccctccgcctcacgttcgttcggcacctccctttacacaagggaggctgaatatgcggttgttcgaaatccgcaaagtagaggcttcgtatggagtgataaattatattccacggtgtagggcggtggcttgctgccgccgagaaaatcagcgaaaacaaaactgctttcaggtgctatcaaattaacgattatatgaaaataaagccttcctctgacgaggaaggtggcaagccgcaggcgtgacgaaaggagagataacgaaagcttgatatttattgctttctctccttcagtttcgctacgctcaacagctccctcgtcagagggagcctaaatatacggctgtccgcaacaaattagatgtataatcgagccgacggacaaccgcaagggttgtccctacggattgttggtatatttcaatgtgatttcaatcaaaaagagagcctgaaaggctctcttttaatgtgtttatttttaattgtatatcaattgttcatcagctttttgatttcttcttttgagaaatgatattttttattgcagaaattgcacacgacctcggttgtatcgtcctgcgccatttcggataaaccgtctttgcctgttgcaataagagcctttgtaactctgtcctttgagcaagtgcagcgatactcaacctgtgcatcatcaagcttttcaaggttgaacgacggcagaacggcacggcaaatttcctcgggtgtcattttgtcgaacagcatggcggttacaggctttataccttgaatatccttttcaagcttgtcgataatcgcatcttccgcaaagggtaataactgaattaaaaatccgcccgagcagataatattctttgtgtcgggatcaacaagaacaccgagagcgcataccgtgggtgtttgctcgcttgtcgcatagtaagcggttatatcttcggcaatttcgcccgatacaatcggaatttgacctacatacggctctttcaagcccatatccttaataaccgtaagcgtgccgtctgtgccgacagcaccacgaacatcaagtttgcccttttcgttaagcggaagctcaacgcttgcgtcgccgatatatcccctgacgtttccgagagagtcggaaaccgccaaaaccgtaccgcaagggccgttgccgtttatcttgacggttatactgtcctcggcactttttagcatactacccataagtgaagcggcggttaaaagtctgcccaacgccgccgagcatacctttgaggtgttgtgtatgcggtgcatttcggtaactatattagtgctgtcaacagccattattgcaagctgaccgtcatcagacatcattcttataagatttttcatctcggaagcctccttgccacgtaaaccgtcctttgagttgcctcggtcggtttatttcttgtcatttcttcatatctgtcaacaagctcgaagcctgtttcgttaagcaatttttctatcgtttcgttgctgtaagccttttcctgaaagctctccgaaaaacgctcgtaggtgttttcgccgattttctcaaaaaagtcaaggtcgatatttattgttgcgttatcctcgcaaagagagttttgccaaacgcagaataaatcgtcatattcatatatataggtattatccgcaagaattttcctgtgcttgtacagggtgttcatatcgaaaatgaaaattccgttatcctcaaggaaaagagcgacattttgaaacgctttttttacggcattttcgtcttttagatgattaagactgtcaagagtacaaaccgcacagtcgatagttccgtaaaggtctaatttgcacatatcctgacacagaaacaatatgttttcgcccgaagcgtacattttgttctgcgcttgagcgagcatttcctcggataagtcaacgcccgtgacctcaaagcctctttttgcaagctcgacagacatacttcctgtcccacaagccaaatcaagcaaaagccctccgtcgattccgttctcggacaacagagagcaaatataatcggctctttcggagtatttgacgttttcggtcaacagatcgtaaacctgtgcgaaataagaatagctcattttactccttgccctcttcgacacggttgaaaatttcctcataaccgttacagccgtattgcaacgaacggtttacacggctgattgtggcggtagaagcacctgtttcttccactatctttgtatagatttgattttccgagagcattttagcaacgacaattctttgtacgattgactgaagctcattcattgtgcaaaggtcctcaaagaagttgtagcactcctcttttgtctttaatgataaaatacagtcgaataagaaatctgtgcgctcattgtgaattttatcgttcatagctgcctccaaaagttttatctgtttattattttagcacgttaaagagtgaaagtaaacgtcaaattatcaaaaatagatactaaaagagacgggagcacaatatatagtggtggaataaaaaaatgaaaaaaatctgaaatttttttgcaattttagttgacaaccggaaataattgtggtattcttattcagccgtcagacgaaacggcgcatgtgggagcatagctcagctgggagagcatctgccttacaagcagagggtcataggttcgagccctattgttcccaccacttttatggcccggtagttcagttggttagaacgccagcctgtcacgctggaggtcgtcggttcgagcccgatccgggtcgccataaaaaatgcctctgtagctcagtcggtagagcagaggactgaaaatcctcgtgtcattggttcgattccgatcggaggcaccataaaatgcggatgtagctcatccggtagagcgccaccttgccaaggtggaggtagcgagttcgagcctcgtcatccgctccaaaggacgcttaaaatcctaagcgtccttattttttaccaatgacaccaaacataaggcgacatagccaagtggtaaggcacgagtctgcaaaactccgattccccagttcaaatctgggtgtcgcctccaacgaatcccaattgcgtttagcaactgggattttttcttttatactaatgaaatttaagtgcggctaaaggagactatatggatttctttatttgtatcggtttttgcttttgtgtaataattgcgtttaccgtttgtatcgctcttgaagtaaagcgagctaaaaagagagacggcgaaacgggaattgctgcggcaaataaatttgaaatcagatcagagtttgaaacatcaacttttaatgctgaaatagttgatttgagctgccgtgcgatgctgataggcggtaagtttcctgaagccgtaaatgtatatacggttgtttttgtaaccgacaaaaatgagcaaataaagctgaatgttccgcaagaaatgtatgacggtcttgaagtgggtcaaaaaggagagcttactcttgtggagggagagctgtacagctttgtcgtttaatttgtttttatatttttcaatagcttaacagtataactacgcagtttttcggagggattatgactaaaccaaaaaatatgagcttgattgccaaagcaatgcttttcctaagcacgataatatggggcagctcatttttcatacttaaaaatacgcttgatgaaatgccactctattttattttgagcatacgctttttagtgggtgcgctgttgctttttcttgtcggctgtaagaattggaagaagctcaataaaaaatatctgtgggcaggcggtataacgggtgtgtttcttgccctcgcttacataacgcagactatcggattacaatataccacgccgagcaaaaacgcttttttgacaacggtttattgcgttcttgtgccgttcttttgctggggaattaccaagaaagcacccgacaaatttaatcttgtagcggctgtggtttgccttacgggaatagggcttgtttcgctcggctcgggcgatataagctttaattttatgggcgacggaatgacgcttgtttgcggaattttcttcgctttgcaaatagtggcgattgagttttggggagaggatatggacgttgtcctctatacggcggtgcagtttttcacggcgtttataatatgctttgcgggatttttgattttcgaagaagctcctgcgagcatttcgctctcgacgataggctcacttgcatatgtatcggtgtttgcgacaacgctggcgtttttgcttatgaacgtgggcgtgaaatatgcttccgcaagctcaagctcattgattttgagctgcgaagcagtgttcggcgtgctgttttcgattttgttctatcccgacgagcatattacaccgagaattgtctgcggcttcgtggtaatgtttatcggaattgttatcaacgaaacaaagctgagcttcttacgaaaagaaaaagtgaaggcataatgtgaaatatgcataattttattccacagtacaacaatatttttgtaaaactctttacaaaacgaaacttttgtggtatgataatattgttcttataacataccaagaacaattgggttactacaaaaaggtagaaaaccgcaaagctctaacgacttcctttttggaggtcgttatctttttataggggagttataaaggagttgtacttatgaaatacggaattggtttagactgcggaatagcctcggtaggttattgcgtaatggaattggactttaatgacgagccgagaagaatcgttaagctcggttcgagaatttttgatactgccgaggttccgaaaacaggagcttcgcttgctgcgccgagacgagaggcaagaggtatgcgaagaagagttcgcaggcatcagcacagacttgaccgcataaagcatctgcttgttgaaaagaacatcataagccaagcagagcttgagaccttgtataacggacagctttcggacgtatatgaattgagagtgaaagctctcgacgagcctgtgggcaattgtgaatttgcgagaattcttatccatttggcacaaagacgtggctttaagtcgaacaagcgtaacgacggaaaggacaaggaagcaggtaagctgttgaaggctaccgaaagcaatgaagctcttttggagcaaaagggttacagaactgtcggcgaaatgttcttgaaggatgaaaaatttgctgagcacaagcgaaacaagggcgaagattacagcaataccgttttacgctcaatgatagaggcggaaataaaggcgatatttgaggcacagcgcagcttcggaatgacctttgcaagcgaagaaattgagacaatatatgcggatattgcattgtcgcaaaggccgtttgatttaggccctgcaaaaggccctgaaaattccccgagcccgtatcatgatatgttgggcgaaaacttggtcggacaatgcacattttatcccgaggaaaaacatgcggcaaaagcgacatattcgttccagcttttcaatttgcttcaaaaaataaaccacatttatcctttaacggatttcggagctaaatattccttgtccgacgaggaaagattgtcaattaaaaatctttgctttaggaaaaaagcggtaaattatgccgatataagaaaattgctcggaatttcatacgattacaagtttaattgcatttcttattccggcaaagaggttgagaaaatcaagcaaaagctcgaaaatcaagaccaacaggctttgattgacgaaattgagaaaaaggcaaaatttgaatatcttaataattatcatcaaatgaaaaaggcgttgggcgacgtgttcaatgcactttctgaggatgaccttgacgctctcggaagaatttttacggtgtttaccgataaagacagaattaaggaagagcttgagctcacggatatacctaaatctctccacgaaagcatttatgagtatatgccgtatttcaagggctacggtcatataagcgttaaggcgtgcaaggagattattccgttccttgaaaagggaatgacgtacgataaggcttgcgaagcggcaggaattgatttcagagcacattcaaatacggaaaagcacgagcttttaccacctgcggaggatgctcttgcagacattccgaatcccgttgttaagcgtgccgttacgcagacgagaaaggttataaatgcgataatcagggagatgggcaacagtcctgcgtatataaacattgagcttgcaagggaattgcctaaatccaaaaaagaaagagacgaaattgaccaacataacaacgaaaacagagccgcaaacgaaagaataaaaaacgaaataactgagcatttcggaattgtaaatccgacaggtcttgatatagttaaattgaagctttatcacgagcagaacggaatatgcccttatacgcaaaagacttttgaatatgatagattacttgagccgggctatgttgacgttgaccatataattccgtacagcaaatgctttgatgacagttactcaaacaaaatactgacattttcatcggaaaacaggcaaaagagcaacagaatcccgatggaatatatacccgaaagcaaaaagtcggattatcaggtttgggtagcaaacaatataagaaatcccagaaaaaagcaaaatcttctcaaggcaaagctcacacctgaggacaccgagggcttcaaagcacgcaatcttaacgatacacagtatttaagccgtgtgttatataactacataaacgacaaccttttgtttgacgattacaagaacaaaacgaagaaagtcagggcagtaaagggcgctgttacggcgtatatgcgtaagcgttggggcatagctaaggttcgtgaggacggagatttgcaccatgcggcagacgctgcggttattgcttgcgtaacggacggtatgattcaaaaaatcaggagttattccgattcgcaagagatgaataactatgcggtcaataccgatacgggggaggttattgacaagcttcccatgccgtacagagattttagaaacgagctgcaaaagcgtcttgagtcggaaaacttggatgagctgaaattgtatctttccaagcttccgaactattccaaagaggcgctggatgacgtaaagctctgctttgtttcaagagcaccgaagcataaggcgacaggagctgcacatatgggaatactgcgttcgtatagcggcgacggctatgctgtttcaaagaaaaagctttgcgacttaaagctcgataaaaacggcgaaatcgagggttgcgatttttggaagaatgacgacaggcttttgtacaatgcgttgagagaagtgcttaccaaattcagagacaataaagaagcaattcctaaaaactttgaattccacaagccgaaatccgacggaagcgacggaccgattgtcagaagcgtcaagtgcagagaaaaggtttctcaatatgttccgctgaataccgaaaacgaccttgcgcaaaagacgggtgcaggaaacggctcaatgataagaattgacgttttctatgttgaaaatgacggatattactttgtgccgatttatgttgcggacaccaagaaaaaggaactgccgaatcttgcgtgcgtgcaaggtaaaaagggatggaagcctatggacgataaggattttgtgttctcgctttatcctaatgatttgataaaggtggaagcaaagaaaaatatggtatttagcgttgctcaaaagggaagcagcctacagcctaaaattgagaggaccactatgcttgtgtattattctactgcaaatatttctaccgcttctatttttgttattacacacgatggcgcatatgaaaaagacggtttaggaataaagagccttaagaatatcgaaaaatatactgttgacccgttgggaaatgttcataaggtaggcaaggagaagcgaatgaggtttaactgatatggcttacagaaatattttcatttccaatgaggcaaggctcagacttcgcaataagcagctgattgtcgataacggcgaagagctgtcatttccgattgaggacatacgctcaatagtaattgacaatccttatacaacgctcagtgcaaagctgctttcaaagctttccgaggacggtgtttgtgtgattgtctgcgacgataagcacacaccgtcggcagcgatgatgccgataggggtctattgccgagtcaataagcgtgttacacttcagtttgaacagtcaaagccgaagcttaaaaagctgtggcaggaaattgtaaaggcgaaaataaacaatcaggcaaaatgccttgagctgaatttcgttgaaaaaagtgccgagctttattcgatagccaaaactgtagcttcgggagataccacaaacagagagggctatgctgcgagaatgtattttcgcagtatgtttggaaacgagtttacaagggacgacgaaaacgggataaatgctgcattgaattacggctacgcaatttttcgctcttttatcgcaaaaacgcttgtcgcttacggacttgagccgtcgatagggattcaccataaaaatcaactcaatgcgtttaatcttgccgacgatattattgaaccgttccgaccgatagttgacaattatgtttataagaattaccgtgagtggggcgacagcttttttacggcacaaaaggcggagcttgttttactgcttaattgtgcggttacggttgacgggaaaagacattctgtcgcaaacgccgttgagcttgcggtacaaagtatcatttcctcatttgaaaacgatgaagcaaggctgaagcttcccgtgctcaatgagctgtcttattttgattatgactaagtttatgagaatgattgtattttttgacttaccggtaaaagaaaaagccgcccaacgtgaggcggcaagattcagaaaatttttgattgaggacggctatcttatggtgcagttttcggtctattcaagggtgtgcaacggatatgatgcggtaaaaacgcacgaaaacaggctcaaggcgcatcttcccgcaaacggctcggtgcgattgcttacaattaccgaaaagcaatatgaatcgatgcaaattttgctcggagaattcaagcagtcagacacacaggtcgcctatgagcaactgactttgttataaaaatgaaaaaagacttggaaatttttatttctccaagtctttttttcatcgcaattctcctcggtaacgccgatactgcgttgtttttcgttcccatattataacataccaagaaaaattagggaactacaatacatataaccctattgaaaactacgaccgtattataacataccaagaaaaattagggaactacaatgacggaaatttacggttgaaatgtggttgtattataacataccaagaaaaattagggaactacaatctaacggagaagaagcagggctgttaattgattataacataccaagaaaaattagggaactacaattatactcgattatcaatttatttaccctacattataacataccaagaaaaattagggaactacaatctttgacccgggaacaataaacactacgggattataacataccaagaaaaattagggaactacaatggtcgctccacaatcgaagcgattgtaactattataacataccaagaaaaattagggaactacaattctataagctcaatttcggggttattgattattataacataccaagaaaaattagggaactacaatattacaagcgctcttgccgcctctcattgaattataacataccaagaaaaattagggaactacaataatgaatagagagggttttaagcttcgttaattataacataccaagaaaaattagggaactacaatcgttacgagattatcaacgatattgaagaattataacataccaagaaaaattagggaactacaatcaaacgacgaggagtacacataccgtcgtaattataacataccaagaaaaattagggaactacaattccccaacattgctcaactgcttctctcggattataacataccaagaaaaattagggaactacaatacgacttcaacatcatatacagcgtacgaattataacataccaagaaaaattagggaactacaataatacggtggctattcaggatggtgcagtaattataacataccaagaaaaattagggaactacaatgtgctcacaatcgtatcttcggacacgatattataacataccaagaaaaattagggaactacaattgtcgctgattacgcttattttggcgacaaattataacataccaagaaaaattagggaactacaattgtcattgcgtcatttctccgatttctatgattataacatatcaaggaaaattaggaaaatacaattggagctatcacacaatctcattgaatgagtctttttttcggcaatatttttcgttggaaatctgcctgcccgctacgccgtaaacatcaatgggctcggtaatgttctcttcgccctcgccgtacaaggtgaactttctatttccaactttcgtaaaatactcggtaacattctgtacggtaatattatcgaactccttatcaaccttaccgttcttatcgtagtattttccgtcaacccgtataatgttttgtttgctccttgtagtacgaggcttatcggcaacgggaaatgtaacaagtacagcatcctgcccatacttcttgcaaagcattactgcaatctcggcaaacttctcgggcgtatatttatcgtttatcgcacaatagaaataatcgtttacatcgatttcatcgccactgccatcgttttcggtatatccgccgacaatttttatataggataaatcccagtgatttatgtcgtttatgagttgcttgtcccgtcctgcattttccgtacggctgtaactgctcctaaatgcagtaatgaacatacactcagcttcttctatatgtgtcataagtctgctaaatgatgatgcttttacatatttcgccataatactcaatccctttcatatatttcaaggcgcccgcttatttcctgattatacactgattataacatactaaggagaataataaaaaatatcttttggaatatttatataaaaatttttattttcccgttttcttaacaaggattttatgtcgggtgtgatataatgcggataaaatgaagggagtgttcagtttgttaagagctaaaaaggctatatttcaaggcttgttattgatagtcggcgtggctatgctgtgcttcggtgcaatgcgtggcgaggttgatacggttttgagcaaggctgttagattgtgcttggagtgtgtcggaattggataaaaataaaaacagattttcaaagcagctcagccgtttccgtggctggattcaagcggcggcaacactgcttacaaatatacatttgccgaatttcattaagggcggaatttatcagggcaagggtaaggcggtgtgcgtgccgggcttgaactgctattcctgccccggtgcagcaggtgcgtgtcctatcggctcgtttcaagcggtggtcggctcgtcaaaatttcgcttttcctattatataacaggctttttgatattgctcggcgtgctgctcggacgttttatatgcggatttttatgcccgttcggttggcttcaggaattgctccacaaaatccccggcaagaagctgtcaacaaagaaattgaagccgcttacatatttgaaatatgcaattttattgcttgcggtggtgctgctgcctgcgatagttgtaaacgatttgggcatgggcgacccgttcttttgcaaatatatttgtccgcaaggtgttcttgagggcgcaattccgttggctgcggtcaacgagggcatacgctcggcattaggtccgctgtttaacagaaagctgataattttaatagtggttgtcgttttaagcgctttattttaccgcccgttctgcaaatggatttgtccgctcggtgcattttacgcattgatgaacaaggtgtccctgctcggcattaaggttgacgaacacaagtgcgtatcctgcggaaaatgtgcaagggtgtgcaagatggacgtcgatgttacaaaaacgccaaatcatacagagtgtattcgctgcggcaagtgcataaccgcttgcccgacagacgcaatcaagtttaattatggttttgagatgccgaaaaagataacggacggcattgaaaagcccgaaaataaaaagaaaataaataacaacaggaaaacggaggattgattatgaaaatttcaaaagcttcaaaaattttagccgtacttatggtgattgtgttgactttgggtcttgcagcctgctcggctaacaagaaaaattcggcaaatgacaattcggacattatccccttgcttgcacaggaggcgaacagccttgacgaggcgacagctcttcacaaaaagcttatggaggcagaaaataaaattcttaccgacaactctgccctttgggaaaaggttttcctctccgcaaacaaaaatacaacaatgattgaggacggctcaaattacggcgattttcttctcaatacaatcgagagtgcaaagagtcagtttaccgcagacgaattgaaaacgcttaaagacggagcagagcagataaaggaaatcgagggcaagctcacgattttggagcagaagtatcccggctgcggaagcacaccgggtagcggagagagcgttgcggcagaggatgcaggaatgagtggggacaaaagcaaattgatgcaattcccgagctttcagggaaaagaccttgacggcaacgacgtaaacagcagcgagcttttctcgggcaacaccgtaacggtggttaatttctggtttacgacctgcaagccctgcgtcggcgagcttgaagaattagaggcactcaacaagaccctttcagcaaagggcggtgcggttgtcggcgtaaactcctttactcttgacggcgataaggcggctatttcggaagcaaaagacgttttgtcgaaaaagggcgttacctacaaaaacatttggtttgactcgaagagcgaagcgggtaagtttacctcgggactttattcatatccgacaacctacgttgttgataagaacggcaatatcgtaggacagccgatcgtcggcgcaatcacttctcccgagcagtcggagaagctcaacaagcttatagatcaggctattgcaaacagcaagtaatttaatctcatatttataacagaagaaaggctcaacggcagttgggtcttttcttttataatcggaaagcggatttacgtcgcttgctttattatgcctgttgtggtagaatggatacaattacaatataaaaagaaggctttaatatgtgggcgatattagctgttctgtccgcagtgtttgcggcattgacctcgattttcgcaaaggttggcatacaaaatgttgactcaacccttgcaaccgcaatcagaacggttgtcgttgtgcttatggcgtgggttatggtgttcattacgcatacgcaaagcggattgtctgaaattgaccgtaaaagctggatatttctcatcctttcgggacttgcgacgggtgcatcatggctgtgctattacaaggctttgcagctcggcgaggtttcaaaggtcgtaccgattgacaaattgagcatactttttacacttgtgctggcatttgttttcctgcatgagaaattcaccgtgaaatcggcagtcggcacggcgtttatcactatcggcacgctgataatggcattgtaatttgtaaataatctgtaacaatacacgattgtatttgaattgacattaaaataatgataaaatctatctattatataagtatagggaggcatattcttggcagataataaagaaaaagacctcgaagggattttccccgagcaggacgacgaagccttgaagaaggagctggaggagttaaaagagacttttcagcaggagcttgacaaggcgaccaccgaggctgaggcttcggaggaggaaaacgaaaacgagtcggagcccgacgaagaggaagagcttaccgaggatatgctctgcgagtgctgcggcgaaaataaaaggggaacggagaaggatcccgagtcccatttttgcgcagaatgtgaaaaggcattaaggcactatccgtttgattttcttaatattataataatgctcatagttatcggctttagcttttacgcttgctatgtgtttgcgggaaatgcgaatgtttatgttgatgcgttgaacgctcaaaagtcagcaaaggaaaatatgcttttcaccgcacattccgagtattccgagcttctcgacacaatggaggacgaaaacatcagaggcgagatggtctacaagagggcaattctcaatctttcaaaggtcggcggctatcaggatatggagcaatatacttcaagctttaagtcttgggagctgaagcttccgcacctcaaatccgtcgcaaaggcttttgaggagaaaaacgctttcgagagaacaagggacgcttgctatgagataatctattccaacattccgcaggaggcggttgacccgtccgaggttccgtatgaaactataatcgaacagctgaaggctcttgaaaataagcctcttgagcccgtaacctacagtgccgaggatatacaggacggacttgttaccacaacggcggcgtattccattgaagcgaacgcttacagtcaggcaatgatttcatatttcaagttctatactgcggcgataagcagtcagcctgccgaaacacagatcggcttccttgaggaaataaagaacggttatcccgaaatgacgtggctttacggtcctatgctcggagatctctacgtcaaagcgcaaaaggacgttacggaatattgtgcgtttcttaaagaggtcaatgccgaggatgcgtatgctgatgttgcaatggctacctccttgcgtattcagggaaaatacgaggatagcatagcgatttgtaaaaacaaggtgcttgaaaaggatgactattcatttgagtattacagacaaaccgcactttcctgtcttgcactcggtgagtatgacaacgccagcacagctgccaagtcggcatatgagcagtacaattattctattcaggtgcttgatacccttgctctttgctatgcggcaacgggtaatgatgagggctatgccgaggttgagaagatttttgctcaaaacagcatggcagtcagcgacgaggtcaaggattacaaggacggaaaaatcacccttgacagcattctcaaggaaggagattttgacgtagaatgacaacggtatatataatagtaaaatatcttacatttgtcggcgcatatatgaagggctttttcgagcagctttcctgccgtgtgtacgaggtgcttatcgaggacggccgttatcttcccgcaaccgagctttgcggtcatgtcgagcacgaaataattaaaaaaagaagcgtcagcttcggcgtttgcttcttcccgtttctctttaaccttatattaggcttggtttttgtatcggtaggctcaatgaacgtgtattttctcggcgagttttttacctataataaaggaatagttcatattctgaattttgtgtttctttggctcggaatttcaatgcttacaaatctctttccgcagattgaggacgcattgaccttgcgtgagctgatttacggtaaaaacaccaacattgttttgaaaatacttgcagcaccgatttttgcggtactctattgcggagcgttccttgaaaggtggggaataaccttccttacctcgatagcattttctcttgccgtaccgtcgatttacgcaacgtttttgccgtctttgataggcgcaatgcagtaaaattaaattaaaatccgaagcggtagcgttcagacctgccgtttcggatttttctatttgcattatatatagtaaaatgctaaaattgaattggtgataataatgaaaaggttaacggcgataattataacatttgctttgtgtgttactcttgcgtcttacacaaataaaaaagctgacgaactgataacgaacaacacaagcactgttgcagaatcaaccgaaatacaatcacagaccgaagcggaaagcacaactcaagagccgacaacagaagctccgcaaacacaggcacctactaaggctgtgcctcagactcaaaagccgacacaagcggcaacgaaagcaccgactcaagctcccaagccgcaggcggcaaccccgccgaatacaattacaggctttgaaagtgaaatgcttgagctgtgcaatcagcagcgccgtgccaacgggaagcccgaccttacgctcaacaagactctttgtgccaacgccgccgtcagagcagaagaaatttcaagagacaattggttttcccaccaaaggcccgacggcacgacgtgctttaccgcagttaccgtggattatatgacctgcggagagaatatagcttacggcacaaggacggcatccgctaccgttgcggcgtggatggactctccgggacacagagccaatattttgtccgacgaattcacacaagcaggctttggctgctacgagcttgacggagtccgatattggacgcagttttttataggataggctaactgcaaaaaacgtgacttcctattgttacgataacaggtcttgttcgtatccatttgttagaggtctttgcaggattataatagtatatggcaccgcccgttggatcccatccgttgatggcgtctcgggcggctttttttgccgtgtcggtcggctcgaccttccagttgctgtcggtaacacatgaaaaagcaccggcttggtaaacaacacccgaaatgctgtcggggaacgacgagtgctcaaccctgttcaatatgactgcgccgacggcaacctgacccgtgtagctttctcctctcgcttcggcggctattacctttgcaagcagataaatatcgttgcttgtaaatttgcccgtagaggatgagctgcttgaaatgcccatagcgttgagagtggccttgccggctattccgtctgcggtcaatccgttctttcgctgaaagctttttacggcgttttgcgtttgcgttccgtatattccgtcaacacctccggagtagtatccccaatttttgagcttttgctgaattttgcgaacctcctcaccccttgaaccgagacgggaaagaacctgcgaggactcatattcctttatatgacggttttgacaggcagttatcgagccaagcaaaagaattgccgcaagcaaaatacaaagcagcttgaattgcttattgagattaaaaagatttttcataagattactcctgtaatttatttacttatattgttaaacggataatgaaaaatatacttgccgaagcgtcaaaactgaagaaattgtgtattaaaaacagcttgaccacaagatatgtgggcgcaataaaaaagttgaaaaaaattgcaaaaaaattaaaaataagtgttgacaacgggcttgctctgtgatattatatcaaagctgtccgcaagacagcgggacacaaacgaaaacgtcaaaaagaaatttcaaaaagttgaaaaattcctattgacaatgagttttgaaagtgctataatgtgcttccacccgtgagaaaagcggttggcacggaccttgaaaattaaacaacgacttaagaaaaaggaaaccctgaaattccttg

SEQ ID NO: 2967 - DNA, 22784 bp, synthetic construct
  source 1..22784: mol_type = other DNA
  misc_feature 1..22784: note = Synthetic
gattctgatcttctctgcgtttgagaaaaacctgctgatcggcccggtgcgggagctgcttgacttcaacctgaagcagctcggcgagttctgcgcccgcgcactgcccgtcatgtcgaacgaaggcctgtgggcgctcggtatgctcatgctcaaccgcatttatgccaacatgggctatgaatattacgcgggcatgaccatcttcaagacgttttccgagctggccttcgcgttctatgtcggcctcggcaacgcctgcgtcatcatggtcggcaaatccatcggcagcggcaaaattcagcgcggcgtgtccgacgcccggcgcttttccgtgctggtgccgctgatgggcctcgttgtgggcctgacgatgatcgccgcgcggcacccgctcgtgtccctgttcgccatgggcgacaatctttcggccacgaccatctcaacggcctacgccgtgacgatcttctgctcgctggaatactgcttccgcaatatctcctatgtgcaggtcgtgggcgtgttccgctccggcggcgatacgctgacgggcatgatcttcgaccttgcaagtctctgggtcgtcgccatcccgctggcgctgctgggtacgcgggtgctgcacgtgtcgttcctcggcgtcgtgatcctcgcgtatctgggcgaggacatcccgaagagcatcctgtgtctgctccacttcagatccatgcgctggctcaagcccgtcaccgaagagggacgcgcggggctgaaggcgtatagagaggaagaataaccgccgtaccaaaggctccccgtgttccaaaggggagcctttgccgcttcatagaagatgggaatgctgcagcgcactgccggctctgcctgcttttccctgcccatgtcccgactgtatccgcgcggcgaatctgccacactaagggcagaactttcggaagaggggatgcagatgaaaaaacagctgcgggggcttttctgcgcagcggcgctggtagcggtgctggcgcttcctgcgcgggcagcggagcagacgcactgcgcctatctttgcggctacccggatggaagcatccagccgggtgcgcccgtcacgcgggcgcagcttgcctgcgcgctcgtgcggctggcggaggagccgctgccggagccggagcgcgtgacgttttttgatgtgccgggcgaccactgggcctgcgcgcagatcggaaagctcacgggcctgggactgctgccgttcggagacggcggctggttcctgccgtctgccgcagtcagctggcgggagctgtgcggcgtgctggacacgctggcggactcggagacgggccgcgagatatttccggcgctgaccggcgcgtgggaagagaaaacggtttttgaagcggggcaggggagcgccgcaggcagcgcggcggtcagccgggcggagcttgcgcgcgcaatgaacagtttgctctcccgcagtccggacagggaagatgcgcagctgcgtgccgccgcgtggtactgggacaatcaggacgagacggcgtggtattacgccgatctgatcgaggcggcggtcgatcatacctgccgcgtcccgggcgcggcggagcagtggacgggcatcggctagatattgttccgcaatcgcaaacggcgtgcaaaatgctcaaaaatgaggcgcgaagtttgtaaaaaatggcgggcagaaaatttgacaggagcattgaattttttttgcccgccctttataatgaaactacaatctaagattggtagctgtaaggaagtgtttcgcacacgggctgcaactatcactcggcttgcacggcagagtgtttcagatgaagatctgaagcacttttgttatatgcaccggtgagcatcacgaaaaggaggactccccatgaacttactcacaaacggacgcgtcatcacccgcgacgagggcggcaagggctattacgaaaaaggcgccgtcgcctatgaagacaccaaaatcgtcgaggtcggcgaagaagccgcgctgcgcgcaaaatacccgcaggccgagatcatcgacgccaagggcggcgtcatcatgcccgcattcatcaacgcgcacacccacatctattccgcgctggcgcgcggcctgtccatcgtcggcaacaaccccacaaatttctatgaagtgctcgacggcacatggtgggccatggaccgcaagctgacgctcgaaggctcccgcgcctccgcagatgccctgtacatcgactgcatcaagcagggcgtcacgactattttcgaccatcacgcggcctactgcgagatccccggctccctgttccagatcggcgagagcgccaagaaattcggcatccgctcctgtctgtgctacgaggtctccgaccgcgacggcgaggaaaagtgcctgcaggccatcaaggagaacgccgactggatcacctactgcgaacagcagaaggacccgatgctcgccgccatgttcggcggccacgcgctgttcaccatctccgacaagaccttcgaccgcatggtcgaggccaacaacggccgcaccggctatcacatccacgtctccgagggcatgaacgacgtctatgacagcctgcagaattatggccgccgccccgtgcagcgcctgcacgaccacggcatcctgggagacaagaccatcctcggccactgcatccatgtgaacccggctgagatcgagcttatccagaacacccacaccatggtcgtcaacaaccccgaatccaatatgtccaacgctgtcggcgtctgcccggtgctgccgctttccaaggcgggcatcctgctcggcctcggcaccgacgcatggacgaacgacatgatcgaatcgctcaaggccgcgctctgcgtccagcgcctgaacgcctgcctgccgaacgtcgcatggtgcgaagtcacgggcatgctctttaaaaacaacgcgaagatcggcgcaaagtatttcccggacgagctgggcgttctgaaggccggtgccgccgccgatatcatcgtcatggattacaagccgttcaccccgttctcggatgagaacatcgatggccacatcctcttcggcatgaccggcaaactctgccgcacgaccatcgcaaacggcaagcttctgatgaaggaccgcgagctcatcggcatcgacgaggaagccgaaaacgcgcatatcctcgaagccgccaagaagctctggggcgcactgaaccacagagaatattaagccgcttctgcgttttgtaggggccgatgcccacatcggcccgcgcagaatatacctgtttttgcggaaatctacggcgaattcgcagttgcccaacgggccgatgtgggcatcggcccctacagtgaagaacaggagggttcccaatgtacgaaaccacccgtcagagagtctgcaagtggctcctgcttgccgtgcttgtgttctctacgctcgacgccgctctgtttgccctcttcgacatcggcatggagcggctcggcctgcgctgtctcaattcgttctttgaattctacctgccggagctgtttccggggaagctgaccgtgtatattgccgcgtttgccgggctggccgcgctggtcggctgggtcctgctgctctgcggaaaacgtgcgggagtaaccgtaatctttgccgtttcagtccttccgtttttcaaaagtattctgatcttcctgaccagcattctggccctgttcagcgcagcggatctcggcgcgcaggcgctggcattcgcaaaggatttcgtgacattcgtcacagccggactgcccatcgtattgatgctgttctggaagggccgcggctattaaaacttaggaggtaatcaaatgtctgaaaaaatgtatccgatcccgttcaagtctctgatgaactggatcgtcaccgaatacgcccgcgagggtgagatcttcggcgtgcatacgccgtattatgccaccggcaagacgctccccatcttcggcgagacgatcgagacaccgttcggcccggcagcaggccccaacagccagctggcgcagaacatcatcgccgcctattttgcaggcgcccgcttcttcgaggtcaagaccgtgcagaagatggacggcgaagagctggcccactgcgtgccgcgtccgtgcattctggccgctgacgagggctacaaccaggaatggtcgaccgagctcgaagtcccgcaggcgcagaatgagtatatcaaggcctggtgcgcgctcaaggtcctgtccagggtctacggcctcggctccccggacggcttcgtgttcaacatgtctgtcggctatgatctcgagggcatcaagggcgagaaggtcaacagctacatcgacaacatgatggacgcgtcgaacaccgcacagttcaaagagtgtctcgccgttctgaccgagctgttcccggaggaaaaggacttcattgccgctatctccccgcgcgtcagccgcagcgtcacggtttccacgctccatggctgtcctccgcaggagatcgagcgcatcgcgtcctatctcctgaccgaaaagggcctgcacaccttcgtcaagtgcaacccgaccatcctcggctacaagaccgcccgcaccatcctcgactccatgggctatgactacatcgtcttcgacgagcaccacttcaacgaggatctgcagtgggccgatgccgtgccgatgttcgagcgcctgcaggcgctggcagactccaggggcctggaattcggcctcaagctctccaacaccttccccgtcgacaccacccggaacgagctgcccggcaccgaaatgtatatgtccggccgcagcctcttcccgctgaccatcgagatgtgcagccgcatcagccgtcagtttaacggcaaaatgcgcatttccttcgcgggcggcgcggaattcttcaactgcgacaagctgtttgccgcaggcatctggcccatcaccgtcgcgactaccatcctgaagcccggcggatacaaccgtctggcccagatggtcgaaaagacggaaaagctgccgtatcacgcgttcaatggcacggattccgccgcgatcagcgatatgtccgccgccagccacagcgatttccatcacctcaagcccatcaagcccctgcctgcccgcaagagtgaggacaaggtgcccctcatcgactgcttcaccgcaccctgcaagggcggctgccccatccatcaggacattccggagtacatggagctcgtccgccgcggactgtacggcccggcgctgaagctgatcacggaaaagaacccgctgccgttcctgaccggcacgatctgcgcgcaccgctgccagaacaagtgctcgcgcaacttctatgatgaatccgtccacatccgcgacaccaagcttgtcgcagcggagcacggctacggcgcgcttatggcgtccatgaagccgaccgcgaagctgcccggcaagaaggccgcgatcatcggcggcggcccgaccggcattgcggctgcctacttcctcgcccgcggcggcgtggaaaccacgatcttcgagcgcgaagcgaagctcggcggcgtgccgcgctatgtcattcccgcgttccgcatctccgacgaagcactcgacaaggatgttgcgctcatggagcgccttggcgtcgaagtcaagtgcggcgcaccggctcccagcgtggaagagctcaagaagctgggctacacccacatcctgatggccaccggcgcatggcaggcgggcgaactcggcatccccggcaatgtcaagggcgtcatcggctggatgaaggaaatgaagcagcaggtcaagccgtgccttgagggccatgtggtcgtcgtcggcgcaggcaacaccgccatggacgcagcccgcgtcgccaagcgcatgggcgcggcctcctccaccatcgtctaccgccgcacgaagaaggaaatgcccgccgatgagcatgagctgaagcttgccatcgacgagggcgtgaagctggtcgagctggcggctcccgtcgagcagaaggacggcaagctggtctgcaatcagatgaagctcggcgagcccgatgcatccggccgccgcagccccgtcgccaccggcgaaacgtttgagattccgtgcgatctcgtgatctccgccatcggcgagaaggttgacgcgaagctcatggccgaaaacggcatcgaaatgggccgcaagggcccggccttccagaccaacgtggaaaacgtctggtcggcaggcgatgcgcaccgcggcccggccaccgtcgtcgagggcattgcggacgccgccgcgtttgcggaggccgtcatcggcaaggcgcacacgtatgaaattcccgagcaggcttatcctgccaaggctgatgcgattgccaagaagggcatcctgaagatggcctcctgcgcctgctgtgagggcggacgctgcctcgactgcaataccgtctgcgaaaactgcgtcgattcctgcccgaaccgcgcgaacgtcgtggtcaagctggccgatggccgccatgagatcgtccacgtcgacaagatgtgcaacgagtgcggcaactgcacgcagttctgcccgtatgcctccgagccgtgccacgacaagttcacgctcttccagaccgaaaaggacatgaacgagagcgagaacaggggcgtcctgttcctcggcggcgacaagatccgcgtccgtctggaaaaagacgaagtcctcgacctgtcccagccgaacgagctgccgcaggatattgagactctgatccttactctccgcggcaaatacagctacctctacaccgaataagataagccgcagtgtgcccttctccgacccggagaagggcacacttgcgttggcgtgcaaaactccgtcttgacaaggtgcaagatgcgatttataatcatcgatacgtattggatgatttttattcaaaacgaaaacagaacagcacagacagccagacgcgaagacgcagcgcagcccggataaaccggattgtgctgcatttattttttatcaggagttatatgagaatgaagcaaattgtggtatacgtccacggaaagggcggctcggcggaggaagcggagcactataagttcctgttcccggacagcgaggtgatcggctttgattaccgtgcgcaggccccgtgggaggccagggaggaattcccacagttttttgctgcccagcgcgcacgctgcgggcggctcacgctgatcgcgaacagcatcggcgcgtttttttcgctgctttcgctggatgagacgctggtcgacgcggcggatctgatctctccggtcgtggacatggagaagctgatctgcaatatgatgaagtgggcgaacgtgaccgagcgggagcataaagactgaaaaacacatgcgtgcgtgaaaaatcttcttgttcggctttttgcgtgatttacagcaattaccttgctttttttcgctccgcgtagtatagtatgctaaaatacctgctctgctttcaggaggttcggtcatggcactcaaagagaattaccgggaattgctgatcgacgcggtcgtccgcgttgctgcgcgcgaggggcttgaccgcacaacgaccaagctgatcgcggcggaggttccgtgcaatgaggtctatatctaccggaatttcggcagcaaggacgcgctgcttcaggccgcgttcagccgcactgacctgcgcttcgtgcagacgattctgaaaaatctggacgtgatggacgcgcccggccagccgctggagcagcgctgccgcgcgctgtgggagccggtgtggcgcttttgcctggcccagccggacgacattcggttctatctgcgctattattattccgcgcagttccttgccagcgcccacgagctgcaccaccgcaattaccagcagcttcaggcccggctcagccgctacttcatctcctcgcacgacagctggctgctgatggcgcatatatttgagacgatcctcagctttgtctcgcacgtgctctgcggcgatctgcaggatacgcccgaactggacgagcaggtcttcagcctcatcttccgcacgctgcagccctatatgctgccgtaaatatccgcaaatctcgaaaaaaacacttgacttttccggaacttctgctataataaacctgcaatttgagttgcgggtgtagctcatccggtagagcgccaccttgccaaggtggaggtagcgagttcgagcctcgtcatccgctccaaaggacgcttaaaatcctaagcgtccttattttttaccaatgacaccaaacataaggcgacatagccaagtggtaaggcacgagtctgcaaaactccgattccccagttcaaatctgggtgtcgcctccaacgaatcccaattgtgtttagcaactgggatttttttctttttatgtgataacctaattaaatttaagtgcggttaaaggagcttatatggatttctttatttgtatcggtttttgcatttgtgtaataattgcgtttaccggttattatatctctcatgtagtaaagcaagccaaaaagggagacgaccaaacgaaaattgatatggcaaataaatttgaaatcagaacagagtttgaaacatcaacttttaatgctgaaatagttgatttgagctgcagtgcgatgctgataggcggtaagtatcctaaagccgtaaatgtatatacggctgtttttgtaaccgacaaaaatgagcaaataaagctgaatgttccgcaagaaatgtatgacggtcttgaagtgggtcaaaaaggagagcttactcttgtggagggagagctgtacagctttgtcatttaatttatttttatatttttcaatagcttaacgatataactacgcagttttttggaggaattatgactaaaccaaaaaatatgagcttgattgccaaagcaatgctctttctcagcacgataatatggggcagctcattttttatacttaaaaatacgcttgatgaaatgccactttattttattctgagcatacgttttttagtgggtgcgctgttgctttttcttgtcggctgtaagaactggaagaagcttaataaaaaatatctgtgggcaggcggtataacgggcgtgtttcttgcccttgcttacataacgcagactatcggattacaacataccacaccgagcaagaacgcttttttgacaacggtttattgcgttcttgttccgtttttttgctggggagttaccaagaaagcacccgacaaatttaatcttgtagcggctgtggtttgccttacgggaataggacttgtttcgctcggctcgggtgatataggctttaatcttatgggtgacggaatgacgcttgtttgcggaattttctttgctttgcaaatggtggcgattgagttctggggagaggatatggatgttgtcctctatacggcggtgcagtttttcacggcgtttataatatgctttgcgggatttttggttttcgaagaagctcctgcgagcatttcactctcggcaataggctcacttgcttacgtatcggtgtttgcgacaacgctggcgtttttgcttatgaacgtgggcgtgaaatatgcttccgcaagctcaagctcgttgattttgagctgtgaagccgtgttcggcgtcttgttttcgattttgttctaccccgacgaacatattacaccgagaatcgtctgcggcttcgtggtgatgtttatcggaattgttatcaatgaaacgaaactaagctttttgaaaaaagaaaaggtaaacgcataatgtgaaatatgcataactttattccgtgatacaacggatttttgtaaaactctttacaaaacgaaacttttgtgatatgataatgctgttcttataacataccaagaacaattgggttactacaaaaaggtagaaaaccgcaaagctctaacgacttcctttttggaggtcgttatctttttataggggagttataaaggagttgtacttatgaaatacggaatcggtttggactgcggaatagcctcggtaggttattgcgtaatggaattggactttaatgacgagccgagaagaatcgttaagctcggttcaagaatttttgatactgccgaagtcccgaaaacaggagcttcgcttgctgcaccgagacgtgaggcaaggggtatgcgaagaagagttcgcaggcatcagcacagactagaccgcataaaatatatgcttgttgaaaagaatatcataagtcaggctgagcttgagagcttgtataacggacagctttcggacgtatatgaattgagagtgaaagcgcttgacgagcctgtgggcaattgtgaatttgcgagaattcttattcatttggcgcaaagacgaggctttaagtcaaacaagcgtaatgacggaaaagacaaagaagcaggcaagctgttgaaggctaccgaaagcaatagggctcttttggaacaaaagggatatagaaccgtcggcgaaatgtttttgaaggacgaaaaattcgcacagcacaagcgtaacaagggcgaggattacagcaataccgttttacgctcaatgatagaggcggaaataaaggcgatatttgaggcacagcgtagctttggaatgacttttgcaagtgaagaaatcgaagcgaggtatacgtatattgccttgtcacaaagaccgtttgatttaggtcctgcaaaaggtcctgaaaattccccgagcccgtatcatgatatgctgggagaaagcttggttggacaatgcacattttaccctgaggaaaaacgtgcggcaaaggcgacatactcgttccagattttcaatttgcttcaaaaaataaaccatatttatcttataacggatttcggagttaaatattctttgtccgatgaagaaagattgacgattaagaatctctgctttaagaagaaagcggtaaattatgccgatatacgaaaaagcctcggaatttcatacgattacaaattcaactgcatttcttactccggtaaagaggttgagaaaatcaagcaaaagctcggaatccaagaccaacaggctttaattgatgaaattgagaaaaaggcaaaattcgaatatcttaataattatcatcaaacaaaaaaggcgttgagcgacgtgttcaatgcactttctgaggacgaccttgacgctctcggaagaatttttacggtttttaccgataaggacagaattaagaaagagcttgagcttacggatatacctaaatctctccacgaaagcatttacaataatatgccatatttcaagggctacggtcatataagcgttagggcgtgcaaggagattattccgttccttgaaaagggtatgacatacgataaggcttgcgaagcggcgggtattgatttcagagcacactcaaacacggaaaagcacaagcttttaccgcctgcggagaatgcacttgcggacattccgaatcccgttgttaagcgtgccgttacgcagacgagaaaggttataaatgcgataatcagggagatgggcaacagtcctgcatacataaacattgagcttgcgagggagttgcctaaatccaaaaaagaaagagatgaaattgaccaacataataacgaaaacagagccgcaaacgaaagaataaaaaatgaaattacggagaatttcggaaatgtaaacccgacaggtcttgatattgttaaattaaaactttatcacgaacagaacggtatatgtccatatactcaacggcactttgattatgatagattgcttgagccgggctatgttgacgttgaccatataattccgtacagcaaatgctttgacgacagctattcaaacaaaatactgacattttcatcggaaaacaggcaaaagagcaacagaatcccgatggaatatatccccgaaagtaaaaagtcggactatcaggtttgggtaacaaacagtataaggaatcctaaaaagaggcaaaatcttcttaaagcaaggctcacgcccgaggacaccgagggcttcaaagcccgcaatcttaacgatacacagtatttaagccgtgtgttatataattacataaatgacagcctcttgtttgacgattataagtacaaaaagaacgtcagagcggtaaagggtgcggctacggcatatatgcgtaagcgttggggtatagcaaaggttcgtgaggacggagatttgcaccatgcggcagacgctgcggttattgcttgtgttaccgacggaatgattcaaaaaatcaagaaatattccgcctcgcaggagctggataactattcggttaacaccgatacgggagaggttattgacaaacttcccatgccgtacagtgattttagaaatgagctgcaaaagcgtcttgagtcggaaaatttggatgagttgaaaatgtatcttttcaagcttccgaactattccaaagaggcgttggatgacgtaaaactctgttttgtttcaagagcaccgaagcacaaagcgacgggtgctgcgcatatgggaacgctgcgttcgtataacggcgacggttattcggtttcaaagaaaaagctttgtgacttaaagcttgataaaaacggcgaaattgagggctgtgatttttggaagaatgacgacaagcttttatacaatgcattgagagaagaacttgttaaggtcggaggcaagggaaaagattttccgagcgattttgaattccacaagccgaaatcagacggaagcgcaggccctatagtcagaagcgtaaaggtaagagaaaaagcttcgcaatatgttccgctgaataccgaaaacgaccttgcacaaaagacgggcgcaggaaacggctcaatgataagaattgacgttttctatgttgaaaatgacggatattactttgtgccgatttatgttgcggacaccaagaaaaaggaactgccgaatcttgcgtgctcacaagggaaaaacggctggaaacctatggacgacaaggattttgtattctcgctttattccaatgacttgattaaggtaacggcaaagaaaaatatgacatttagcgttgctcaaaaaggaagtagcttgcaacctgaaatcaaaaggaacgagattttggtgtattattctaatgctgatattgctactgcttctgttttagtgagaacgcacgacggtgcttacgaaaagagaggtttgggaataaagagtcttaacagtattgaaaaatatactgttgacccgttgggaaatgttcaaaaggtgggcaaggagaagcgaatgaggtttaactgatatggcttacagaaatattttcatttccaatgaggcaaagctaagacttcgcaataagcagttgattgtcgataacggtgaggagctgtcatttccgattgaggacatacgctcaatagtaattgacaacccttatacaacgctcagcgcaaagctgctttcaaagctttccgaggacggcgtttgcgtgattgtctgtgatgataagcacacaccgtcagcgacgatgatgccgataggggcttattgccgagtcaataagcgtgttacgcttcagtttgaacagtcaaagccgaagctaaaaaagatttggcaggaaattgtaaaggcaaaaataaataatcaggcaaaatgtcttgagctgaattccgttgaaaaaagtgccgagctttattcgatagccaaaacggtagcctcgggagacaccacgaacagagagggctatgcggcaaggatgtattttcgcagtatgttcggaaacgagttcacaagggacggcgaaaacgggataaatgccgcattgaattacggctatgcgatttttcgttcgtttattgcaaaaacgcttgttgcttacgggcttgagccgtcgatagggatacaccataaaaatcaactcaatgcgtttaatcttgctgacgatattattgagccgttcagaccgatagttgacaattatgtttataagaattaccgtgagtggggcgacagcttttttacggcacaaaaggcagaactcgttttactgcttaactgtgcggttacggttgacgggaaaagacattctgtcgcaaatgctgttgagcttgcggtgcaaagtataatttcctcatttgaaaacgatgaagcaaagttaaaacttcccgtactcaatgagttgtcttattttgattatgactaagtttatgagaatgattgtattttttgacttaccggtaaaagaaaaagccgctcagcgagaagcggcgaaattcagaaagttcttgattgaggacggctatcttatgatacagtactcggtctattcaagggtgtgcaacggatatgatgcggtaaaaacgcacgaaaacaggctcaaggcacatcttcccgcaaacggctcggtgcgattgctcacgattaccgaaaagcaatatgaatcaatgcaaattttgcttggagaattcaagcagtcggacacacaggtatcctatgaacagctgactttgttgtaaaaaatgaaaaaagacttgaagatttttacttcttcaagtctttttttatcgcaatttttctcggtaacgccgatactgcgttgtttttcgttcccatattataacataccaagaaaaattagggaactacaatccaaatgttgagggtgtatcggatgtcaaaattataacataccaagaaaaattagggaactacaattaagtatgtgatatggtatcttgtaatgaattataacataccaagaaaaattagggaactacaattactataattaacagtttttttgttacgcaattataacataccaagaaaaattagggaactacaattgaggttataaataatattactttcaatcgattataacataccaagaaaaattagggaactacaattattttccgccatagcttcaacggcgtaatattataacataccaagaaaaattagggaactacaattaaatcggtcgccgaatatctcaaggaataattataacataccaagaaaaattagggaactacaattcgcgtatacggggaatagtccgcaaaactattataacataccaagaaaaattagggaactacaatctatcagatagcggcgaaagaattcggctaattataacataccaagaaaaattagggaactacaatcgtgcttttgattttaatttttcccatttattataacataccaagaaaaattagggaactacaatgcatctgtgttccaatagtcatttgccgcaattataacataccaagaaaaattagggaactacaataaaaggtatcgaattaaaagataaaatgaaattataacataccaagaaaaattagggaactacaatttattcgcacaaataaacatttgtctattgattataacataccaagaaaaattagggaactacaattatcgatgataacacgcacgatattgttttattataacataccaagaaaaattagggaactacaatattgcggtatttatggaattgtgaggtaaaattataacataccaagaaaaattagggaactacaataatcatatcacataatgttttacattgtcaattataacataccaagaaaaattagggaactacaatggtggcgcctgcgttgacgattatttaacgattataacataccaagaaaaattaggaaactacaattgcctttccgttcaaaaaacttaagctaagattataacataccaagaaaaattagggaactacaattcgtattgcgtattcgttccgcaagtgaaattataacataccaagaaaaattagggaactacaatcttgatatacagtaaacgcaaatatgaatgattataacataccaagaaaaattagggaactacaatccgtgaccaatacggtgttagagaagttgaattataacataccaagaaaaattagggaactacaatagccgttgataagttaacttctcttatgagattataacataccaagaaaaattagggaactacaatgtcatatcagtttgcctcgctttcatcgcaattataacataccaagaaaaataattaaagaatcttttgttataagatatttatattaaaaattttcattttcccattttcttaacaaagattttatgtcgggtgtgatataatgcggataaaatgaagggagtgttcagtttgttaagagctaaaaaggctatatttcaaggcttgctattgatagtcggtgtggctatgctgtgcttcggtgctatgcgtggcgaggttgatacggttttgagcaaggctgttagattgtgcttggagtgtgtcggaattggataaaaagaaaaactcgttttcaaaaattttgagccgtttccgtggatatattcaagcggtggcaaccttgcttaccaatatacatttgccgaatttttttaaaggcggaatttatcagggtaaaggtaaggcggtgtgcgtaccggggctgaactgctattcctgtccgggtgctgcgggtgcgtgtcctatcggctcgtttcaagcggtggtaggttcatcgaaattcaagttttcctattatataaccggctttttaatattactcggagtgttgctcggacgatttatatgcggatttttatgcccgttcggttggcttcaggaattactccacaaaatccccggcaagaagctgtcaacaaagaaactgaaaccgcttacatatttgaaatatgtcattttattgcttgcggtggtattgttgcctgcaatagttgtaaacgatttaggcatgggagacccgttcttctgcaaatatatttgtccgcagggcgttcttgagggtgcaattccattggcggcggtcaacgagggtatacgctcggcattaggaccgctgtttaacagaaagctgataattttaatagtggttgctgttttgagcgttttattttatcgaccgttttgcaaatggatttgtccgctcggcgcattttacgcattgatgaacaaggtgtccctgctcgtcattaaggttgacgaacacaaatgcgtatcatgcggtaaatgtgcaagggtgtgcaagatggatgtagatgtcacaaaaacgcccaatcatacagagtgtattcgctgcggcaagtgcataaccgcttgtccgacagacgcaatcaagtttaattatggttttgagatgccgaaaaagataacggacggtttcgaaaagcctgttgataaaaagaaagtaaataataacaagaaaacggaggactgattatgaaaatttcaaaagcttcaaaaattttagccgtgcttatggtgctggcgttgactttaggctttgcatcttgctcggcaggtaagaaaaattcgtcaaatgacaattcggacattatacccttgcttgcacaggagccgaacagccttgacgaggcgacagctcttcataaaaagcttatggaggcggaaaacaaaatttttacagacaactctgccctttgggaaaaggtattcctttcggcaaataagaatagccctatgattgaagacggaaaaaactacggcgattttcttcttgacacgattgagggtgcaaaaagtcaattctccgcagatgaattgaaaacgcttaaagacggagcagagcagataaaggaaatcgagggtaaactcacaattttggagcagaaatatcccggctgcggaagcacaccgagcagcggagagagcgttggagcagaagaagcgggaatgggtggaaacacaagtaaacttactcaattcccgagttttcaaggcaaagacctcgacggaaatgatgtaaacagcaaagaccttttttcaaacaataccgtaacggtagtaaatttctggttcacgacctgcaaaccgtgcgtcggcgagcttgaagaattagaggcactcaacaagaccctttctgcaaagggtggtgctgttgtcggcgtaaactcctttacgcttgacggcgataaggcggcaatttcggaagcaaaagacgttttgtcgaaaaagggcgttacctacaagaatatttggtttgactcaaagagcgaagcaggtaagtttacctcgggactttattcatatccgacaacctacgttgttgataagaacggaaatatcgtaggacagccgatcgtcggcgcaatcacatcccccgagcagacggagaagctcaacaagcttatagatcaggctattgcaaacagcaagtaaattaagctcatatttataacgaagaaagactcaacagcagttgggtcttttcttttataatcggaaagcggatttacgtcgcttgctttattatgcctgttgtggtagaatgaatacaattacaatataaaaagaaggctttaatatgtgggcaatattagctgttttgtccgcggtatttgcggcattgacctcaattttcgcaaaggtgggcatacaaaacgttgactcaacccttgcaaccgcagtcagaacggttgtcgttgtgcttatggcatgggttatggtgttcattacgcatacgcaaagcggattgtcgggaattgaccgtaaaagctggatgtttcttatcctttcgggacttgcaacgggcgcatcgtggctgtgttattacaaggcgttacagctcggcgaggtttcaaaggttgtaccgattgacaaattgagcatactttttacacttgtgctggcatttgttttcctgcatgagaagttcaccgtgaaatcggcggtcggcacggcgtttatcactatcggcacgctgataatggcattgtaatttgtaaataatctgtaacaatacacgattgtatttgaattgacattaaaataatgataaaatctatctattatataaattgagggaggcatattcttggcagataataaagaaaaagacctcgaggggatttttcccgagcaggacgacgaagccttgaagaaggagctggaggagttaaaagagacttttcagcaggagcttgacaaggcgaccgccgaggctgaaacttcggaggagaaaaatgaaaacgagtcggagcccgacgaagaggaagagcttaccgaggatatgctctgtgagtgctgcggcgaaaacaaaaggggaacggagaaagatcccgagtctcgtttttgcgcagagtgtgaaaaggcgttaaggcactatccgtttgattttcttaacattataataatgctcatagttatcggctttagcttttacgcttgctatgtgtttgcggggaatgcgaatgtttatgttgatgcgttgaacgctcaaaaggctgcaaaggaaaataagcttttcaccgcacattccgattattcagagcttttcgacactatggaggacaaaagcatcagaggcgagatggtctgcaagagagcaattctcaatctttcaaaggtcggcggctatcaggatatggagcaatatgcctcgagctttaagtcttgggagctgaagcttccgcacctcaaatccgtcgcaaaggcttttgaggagaaaaatgctttcgagagaacaagagacgcttgctatgagataatctattccaacattccgcaagaggcggttgatccgtccgaggtcccgtatgaaactataattgaacagctgaaggctcttgaaaacaagcctcttgagcccgtaacctacagtgccgaggagatacaggacggacttgttaccacaacggcggcgtattccattgaagcgaacgcctacagtcaggcgatgatttcatatttcaagttctatactgcggcaataagcagtcagcctgccgaaacacagatcggctttcttgaggaaataaagaacggttatcccgaaatgacttggctttacggtcctatgctcggagatctctatgtcaaagcgcaaaaggacgttacggattattgtgcattccttaaagatgtcaatgccgaggatgcgtatgctgatgttgcgatggctacctcattgcgtattcaaggaaaatatgaggatagtatagagatttgtaaaaacaaggtgcttgaaaaggacgattattcatttgaatattacagacaaaccgcactttcctgccttgcactcggagagtatgacaacgcttgcgcggctgctaaggcggcatatgagcagtacaattattctattcaggtgcttgatactcttgctctttgctatgcggcaatgggtaatgatgagggctatgccgaggttgagaagattttcgctcagaacggtatggcagtcagcgacgaggtcaaggattacaaggacggaaaaatcaccctcgacaacattctcaaggaaggagattttgacgtagaatgacaacggtatatataatagtaaaatatcttacaattgtaggcgcatatatgaagggctttttcgagcagctttcctgccgtgtgtatgaggtgcttatcgaggacggccgttatcttaccgcaaccgagctttgcggtcatgtcgagcatgaaataattaaaaaaagaagcgtcagcttcggcgtttgcttcttcccgtttctctttaaccttatattaggcttggtttttgtatcggtaggctcaatgaacgtgtattttctcggagagttttttacctataataaaggaattgttcatattctgaattttgtgttcctttggctcggaatttcaatgcttacaaacctcttcccgcagattgaggacgcattgaccttgcgagagctgatttacggtaaaaacaccaacattgttttgaaaatacttgcagcaccgatttttgcggtactctattgcggagcgttccttgaaagatggggaataaccttccttacctcggtagcattttctcttgtcgtaccgtcgatttacgcaacatttttgccgtctttgataggcgcaatgcagtaaaattaaattaaaatccgaagcggtagcgttcattcctgccgtttcggatttttctgtttacattatatatagtaaaatgctaaaattgaattggtgataataatgaaaaagatgattgctgtaattacggtggtagctttgtgtcttgctttttcgtcttgttcaaagaaaagtgccgatgagcagacaaccgatgaaattagcagcacagctgaagtgacggaagctcaatcgcagaccgaagaggaaagcacgactcaagagtcgacaacagaagcgccgcaaacacaggcacctactaaggctgtacctcaggctcaaaaaccgactcaagcggcaacgaaggcaccaacgcaagctcccaagccgcaggcagcaaccccgccgaatgcaattacaggctttgaaagcgaaatgcttgagctgtgcaatcagcagcgtcgtgccaacggaaagcccgaccttacgctcaacaaaactctttgtgccaatgccgctgtcagagcagaagaaatttcaagagatgattggttttcacaccaaagacccgacggcactacgtgctttaccgcagttaccgtggattatatgacctgcggagagaatattgcttacggcacaaggacggcatccgctaccgttgcggcgtggatggactctccgggacacagagccaatattttgtccgatgaatttacgcaagcaggcttcggctgctatgagcttgacggagttcgatattggacgcagttttttataggataagctaactgcaaaaaacgtggcttccgatcgttacgataacaggtcttgttcgtatccatttattagaggtttttgcaggattataatagtatatggcaccgcccgttggatcccatccgttaatggcatctcgggcggctttttttgccgtgtcggtcggctccaccttccagttgctgtcggtaacacacgaaaaagcaccggcttggtaaacaacacccgaaatgctgtcgggaaacgatgagtgttcgactctgtttaatacgactgcgccgacggcaacctgacccgtatagctttctcctctagcttctgcggctattacctttgctaaaagatatacgtcgttgcttgtgaatttgcccgaagaggacgagctgctcgaaatgcccatagcattgagcgtgtccttgccggctattccgtctgcggtcaatccgttctttcgctgaaagctttttacggcgttttgcgtttgagttccgtatattccgtcaacgcctccggagtagtatccccaatttttgagcttttgctgaattttgcgaacctcctcgcctcttgagccgagacgggaaagtacctgcgaagctttgacttcgtttgtacggcgattttgatatagtgtaattgagccgaataagagaattgccgtaagcaaaatacaaagcagcttgaattgcttattaaagttgaaaaagtttttcataagattactcctgtgatttatttacttatattgttaaacggataatgaaaaatatacttgccgatgtatcaaaacaggagaaattgtggattaaaaacagcttgaccacaagatgtgtgggcgcaataaaaaagttgaaaaaaattgcaaaaaaattgaaaataagtgttgacaatgggcttgctctgtgatattatatcaaagctgtccgcaagacagcgggacacaaacgaaaacgtcaaaaagaaatttcaaaaagttgaaaaattcctcttgacaatgagttttgaaagtgctataatgtgcttccacccgtgagaaaagcggtggcaacggaccttgaaaattaaacaacgacttaagaaaaaggaaaccctgaaattc

SEQ ID NO: 2968 - DNA, 22542 bp, synthetic construct
  misc_feature 1..22542: note = Synthetic
  source 1..22542: mol_type = other DNA
tgtgtatatcaaatcacatttttggacggatgtcaataaaaccgctgccacattttgcaagaaaaagataaggattcgaagaatcgttattacgagcgaagcgagtaacaaggttatcaagacccattcaaaatctgtgattttgtaaatgggtgatgttcttattatgggtttataatgcaaataaacccgtaacatcgttccgtcaagtctttaaggtggagatttgcaaagcaaatactaccgtgacatgacaggttgatataatctgccacaaaaaagagctgaaaattcagctctttttttatttattttcccctatttttgcttgtgtttatgatattgatatttttagaattttgtgatatattgagcatgttagcattggttttaaaaggcacaacggctactataaataaatacaaaggatatgtttaatatgaagaaaaaatcgaaaatcatattactttctgtgttggcgttggttttgatattgatatctttgattgctatattagctaataattcacacacagttgttggtgttaaaaactattacaaaatatcaagtgaaaattcggattatattcatttttctttagatgatttggggaattataaaaatctctattttcagtcgaacaggatacattctttaatgtctgattcatacggtagtatgtttattgccgaatatgacaaaaaaagctttaatgatcaacttttacgactcaaatctttcgaatatcaaactgatgttattcttgattctgatgaatatattataccgcaaacaagctttaacattggtgattggaattttaaagtgttaaaaccacagtcacaaacacaggaatttcctaaaaatatagattttgtttgcattaacatttccgaatgtaaaattggttatatgaccttttatgacgaggatattgattatttgtgtaaatccggcaacgaaaatgagtatatgaaacattttgtgaaaaaatattttaaatacaattttaatagtaaagtcaagtgatttctttttaaaaaaacaatttacggataattcagttcacctttgacatgttgatataatctgccacaaggctggaagttttactttcagcctatttttatgcccgaatactgctttttgcggcggtattcgggcagagcttctgcgttctttgcaaaatttcttttatattattcaaggtgtactcgggcggaagtcctatgccgatgtcattcgttccgattaaaatcacaagattttttgggtttatgttcaaggcgttacattcgagcctttccaacaatctgtcgcttgtgtcaccgctgattccacggttgtaaactgcctgccccgttgtttgcgaaaaggcataaaacagctcatagctgttgaatatttccgtaatcgagtcgccgaacagcaccgtttgtctgtgccgggcgtacttctcattcaaaaaataaaattctctttttcgtctgctttacatgttcgtaagccgttttttctgaaagttcttgttcatttgcttctctgcgaaattaggtttatctgtcgctgtcaacggcaaacaatcccgcaccgattgcaccgcaaaattcaggcttatcggatatgaaaatctttgtgttcaactgcttttcaagttcagtcacaacgcccttgttatttgcaacaccgcccgtcatcattacaccgtctgcaccgactgccttgcttgcaagagccttcgtctttatcgcaacgcttttgttcaagccgtgaataatatcggctatctttttgttttcggaaatcagcgatataacttcgctttcggcaaacaccgtgcacatatttgaaattgaaatatcctcgctgtattttaaaccgtcattcgccatttgctccatactgatttcgagagcctttgccatattttcaaggaatctgcccgtgcctgctgcgcatttgtcgttcataacaaatgatgcaacattgccgttttcatcaagggtgataaactttgaatcctgtccgccgatgtcaataatatatcgtgcttcgggatacaaaaacttcgcccctcttgcgtggcaagtgatttccgttacatcatcgtttgcaaaatcaatattttttctgccatagcctgttgcggttatggtttttatttcgttaagactgatttgtgcctcatcaagtgccttttgcgcccctgcctgagcgtttgcacctgttctgaccataacagccttgacaatattcttgttttcgtcaaaaatgacaagctctgttgaggttgaaccgctgtcaattcctgcgtaatattttccgttttcgttcatttttatctttgaattattctccgtgttcaaggtttcgcaaaaagcctccagccttgttgaaagctgacctaattgctgtgtggtgtagtccgtttcgattttcaaaatcggtgttttgctgtctgcaagttttgtgtattcaaagcaataataatcgcaaaacttgattgtgtgatatacaatacctgccaaattttcactgtttagcagttgctttcttgatgtcgtgtcgctcatacgcatacaaggagtttgcgccatcaacgctcttgcgtatttttccatcagctcgtcaaggctgtcgttttcgctcatattttcgtttgaaacacagcgattgtttgagcaagtcatattgattactggcatttgaaacgactctctgattacattcattaggcttccgtttgcatttgcgccaagcaccaaaataaatttgctgtttggaaacgcaatcggcttgtcgctgaaattactcaaaaattcttttgcgtcaaacgctttgcccgtctgtgcttcaaggtcttttatgagaaaaagcaaatcatttttcaatcgtttcacggcacaagcaccgttatcaatcggcaggtcaagaatggttttgtatttaatcttgctttctgccacatcaaacaaccgccttgtgctgtcacagcagttcataaaaacaagcttgtcatagtcgccccgatgtatttcctcgcaaatcgccttgatgtgtgagcaaacatttgagtgcatagcctgtgaagaatagtcaaaatgctccgcttcgttgttgattaaacgataatcatcaaagcatgccaaaatctccaccggtgtatatttgcagttatatccaatcattttctattctccaacagttctaaaaacgcttctgttctcgtcacggtttgaccgtcgttgacattgttccaattacagccgtcaccgtcaagaatgagcgttggaaagccgtttgactcaaaggtcgattttgcaatatttgaaagccctgccgtttgcttgcaaccccaatggcagtaccaaacaatgccgttcgcattgagctttttggcaagttcaagcgttgcgtttattctgttcgtgccgtttccgttgacggtgtttctgacaagtcggtctgccataaatctgtacgggtcggcttcttcaagattgcaatacatagcatccataaccatatcgcaagcgacaatttcgcaacggtcggtaaagttaatcaaatcacgcaaagcgtcctgccaataaggcaaagtatgaacccaaagaagccttacgccctttttgcctttgggaacagcggcaagctcggttttcaaatcattactgtatttcaatgcgttgtccgtgccgagcataacatgtgttgcaaaaaccgacagcatttgagaagtcatttcgtccgacaacgaacgatttgcacgaagtgccaatatatcattgaaattctttagtgtctgttttgatttttcaaccgtttcagtcagctttgcctcatcaaaagtatagccctgtttttcaataaaggtcaccatatctttgatttgctttgcaacataatccaccgcaccgcttgaataattgtacggcacatcaatcatatattgaggcacattgtagtgttccgcagctcgcctgaacgacaagtgatttgcgtcacatgcaagggttgtgttgataataaaatcaggctttggcaaaacgcctgtttccaccattccgatgaaagccttgtgataagagcacatagtttgcgaaacaaaattttgctccgccgtgtcgatgaacacctgctccgaccttgccgcagccaaatagcaggcaagagcctcgggaaacagtgtgctgatgcccatggaatgcaaaatttcacacggcagatacaggcttacgattgcagaatttttgcccgttttcagcggtgtaattgcagaatcggcagccgcccactgcataaattggcgtgacggcaaaagcttttttgttgggaaatatttgcacataaggcctgccgtgctaaatgcaaagcacagcttttttctggctgacaaaggatttgtcggtgcggttttatatatgtgattgccaaataattctatcaaattgttcattgggttatagtattccttgtgttatttaattttgattatagcacagcgatatatgaaaagcaaagcgttttcacttcattgacagcaagccttatttccttgacggcacaatttattgcgacaacggaaaaatcctttgtgagcaggtgtcggatgttgatttcaaaaacaaaatcacattgacaaaaacaggcaaaagaaaactgccgtataatcactatcagctttcaacagacaagcttaattttggcagaggaaacaaattcaaattgtttatttaataattatgattataagtatttgaaatacaaaataggtgttggtaagtcgttaaaacaaagggcttatgaggaaatcttttctcctgtttttccaaatgaattagtattacataattatgctttttgttctgaattaaaatgtgaaaattgtttaaactatgtatcttgtcgaagtgattatttaaaagaaatagaaagccaaatgcttaaaataatagaatggagaaacagagatgaaatttgtcaagcaatttctgtatttcaatctataattgattcaaactattgtattgaaaatgaaaaagaattagaagaaataaaaagagaatttagagaaaagcaaattaaaatcaacaaaaatataaataaaatattccctaaaattaaaagatggacaaacataacatcagttatagctactccatttgcaataagttctgctttagcaaataatactaaacttgctataacaggatcagtgtttgcgggcacttccactattgttaatgaattgatgaaatattatgaaaataaaaacaaatgggttggttttataaataattcacacaataatactctgtgactatgaaataggtgctaggaagaaaatatatgttttctgcagtcggataggtatagcaaattgaattgctgtacctatcataatcatatactcttctatgtaatgttcgcaatttctcatacgaatttgcggtttaagccaaaataaaattccgagagatttttgagagacgcaattatcagcgaaaaatagagacataacttaagaagaggtttgccctaacatttggggcaaacctcttttaatgatattcaattttgtacttttatgttaatttgttttatgatatagtactaatataggggggttataatatgaaaaaaacaaagaaaattggaatagtatttttaattgctttattattgtatgttattatgacgatattgtttgtttctgtattcccgagaatatatttggctaataaatatgacaccaaaatgagtgactacaaagtttacgattattgtccgggaaactttcattatgatatagattattgggctgtcgtttggcacgattcttatttggtatataaagcaaaagatgacggtcgcatatttaatgtaaaatttatgaattttagatattatgacgcttaccaaatgaaagaggtttcagagtggctgacggatgaattgaaaaatactgttgatgaaaatattgatatggtcaatattcgcgatacggctgtttatggtatttataacgaagaaaaggataaatacaaaaatgttgtttggacgaaagataatgtcggcgaaattatcaaagcaggaagaacaggcgagatatttattaaaacagatgatattaaccggtacataaatgaatcaagaaacgaaaataaatatactgattcattatatggttatgatatgaattctaaattcagagattatatggcaaaacttgatgctgtatttgttgaaaaatatcatgatgataacattcatattgttttacaccaaaatgaattgcctggatgtaaatcatattatggattttacggtattgatttgaatgaatttgataaatatgcaggagaattcgtaaatataaatttggaggataattatgattattaaaaagaaaattacagctcatctgaacttatacaaaaaagtcaaatacataattttttagattttgcattaaaagattacaacaatgattttgttgtttattattcagtaaatgatatatctccttatattgacgatacagaagcagcaaccaaaatcaaaagcgatttgcaggataaaatatgcaaacattttaattttaacagaaaaccgattgtttatattgttgatggtgaaatcactgaaaataatatttattcacataaagaatatttcttagaatacaagcaaattgaattgttaaaacaagaaaaacatttaatttaaagatggtgagaaatatgaaacaagtgaagaacagttcgcaaataaaagctttaaaattaagaaaacaatcttatggtaaataagaaatagaaaaggagatttatatgaaaaaaggtaaaataatcattttacgaatattagcaataatatttgcggcttttttgatatttggtatcgcgcatattatttatgttcaatgccacagagcagaggttgttgaatacctggttaataaatatgattttgacaaaaaggacatagttctgctcgattacgaaggcgaaagatttcacgacgatagcgatttaggtattctctttgattggtatactacgcctccaacttggaaaatcaggtgcaacaaaagaactttcggtgtggtaaaaacacaaaatggctttagtgacaattatcaattagaagatgttttcgagtggtcggttgattatttaaaaacagttgactctaatgttgtcggtataataatcgattacggctatttgcatgatattgtaaaaaaagataatattgaagattttttgattaacgataacgattcttttgtgatttattataaggtaaatgatttaagcccatatcgcagaatgtcaataaataacaattcggtgctttcaacggaaaagtataaatcattaagagaaaaacttctaaacaaatattcgtttatatgtgaaaacatagaaaataagcatgtaatattagtgaatgtagaaattgaattcacaagaaaaaaatatgacaattttgcaagttattattatgatacaaaaattggaaatataaaattagaggaaaaaggaaaggcgatagggtgaataaaaacaacaaatcaactttcaagaaaatcaaaaaatatgtttgtattgctttaatttttgctatattttcagcagcttctatcattttatattcaaattcattaactcgtaatgcaaaggagtatattgcatacaaatacggcgttactcaatccgaaataactgaagttgaaaaatacaaggcacatattgaaacagagtttgttttattagaaaaatttaatatttgggtagtaccggcaaagtgggtgttcaatgttgacggtaaaaattttaatgttgagtattttcaaaagcactatgtagatgattttcaattagaagatttggaaatatggtgtactgaatatttacaagataatgttgattctaacatttccggcatagagttatacagtgatatgatttttcacgataacacttatgatatgttttctaaacgctcaagatattatactgttcgctcatcaaaatcattatcatattcggataataaattgtggaagcaagaagatattagtgagtttttaaattatcaatttgataattataagcatttgggagttttttataaaaccgacaatatttctaaatatagtacaacagatattaacagcagttacgacaatttggtgcagacccttaatcataatgccacaatttcaaactgcactcttacgccaattttgtatggcggcactttagaacttgtacgcaataaagattgcttgtatcttttatataacaaaagcggaactgcaattacagttgatgataccgatttgaatgatgtagtatataattttgcaatatacaaaagaaactgttatgaaattaaacttgaaaaacattcctaacaaatattcatctatatgcgaaaacattgcgaatacaaaattaggggaagaggcaaagcgataaaatgaataaaagaaatcaatacaacattaaagactatattaactcgtttaatacaaaaaagaaaattgctatatatctctctgttgcacttttactttttcatttattatcaataattatatatttgatagaacgcacagatataactatattaaccgaaagtaatataatttcagttattacaagtatgttaacaatttcattttccatttcaaaaattcttgatgtatatttgtttttatttccaatattttttataatatttaattttgttatgttacataaaaacaaatacaacaaacttgttattattatagactatatttttcaaataattaaccctattaccataggttttttcgtgtctgcatttttattagtaataaacaaagaatatccaatataaaataaaggagataatagctatgattaaaaaaatccttacctttttagtttcaatatcgatgctactgtcatgtttaacaatataggacttaaagtaataaaactttaaaccctcactttaagtttgcccttttatattgtttatccatcaaaatgcaaaggtgtataaaattaaattatatcataattaaaacatttgataaacaagaagttatttatagtgcaatttattgtacttggttgaataatcttttaaaaagtatttacaagcagaattttatatgatatatttaagttgttcttataacataccaagaacaattaggttactacaaaaaggtagaaaaccgaaaagctctaacggctcctttttggagccgttatctttttacttgaaaaaggggaaaattatgaaatacggtattggattagactgcggaattgcctcagttggtttttgcattactgaacttgacttaaacgacgagccaaaaagaatcgttagacttggttcacgcattttcgacaaagctgaaaatcccaaaaacggcgattcgcttgcaaagccgagaagagaggcaagaggcacacgacgcagaatcagaagacataaacacagacttgagcgtataagatatatgcttgtaagaaacggcattgtaactcaagacgagcttgacgcaatgttttgcggtcaactgtctgatatatatgaaataagaacaaaagcacttgatgagccgattagtaacatcgagtttgcaagagtgcttatcaatcttgctcaacggcgaggattcaagtcaaacagaaaggttgatgaaaacactaaagataaagaaacaggcaagcttctcagtgctattgaaaataatagagaaaacatatataaaaataattatcgcacagtcggtgaaatgctgtttaaagatgaaagatatttaaaatataagcgcaacaagggtgaaaactatcttaacactgtatcccgtgatatgattgcagatgaaataaagaaaatttttgattcacagcgcaacttcgatgtttcatttgcaagtgaagaaatcgagaacgaatacacggacattgttatgtcacaaaggccgtttgatttaggtcctggtaacggtaatgaaaaatcaccaagtccatatgccggtaatcaaatagaaaaaatggtgggcaaatgcacattttttccaaatgaatttcgtgcggctaaagctacatattcatttcaacttttttcacttttacagggtattaacaatatcactttgattgataacggtggtaacacttttacattgtcgcaacaggaacgcagtatacttaaagaatattgcttcaataccgttaatgtcacatatgcttcaatcagaaaaaagcttggaatttctttggattataaatttaaaaatataacatatacgcaacaaggtattgaaaaatcagaaagcaaaaccaaattccagcatttaaacgcatttcataaaatgaaaaagattttgggagattctataaatactttttctcaagatgaacttgatgaaatcggaaaaattttcacattttataaaaatgactccaaaattattgagcaacttgaaaacacaagcatagataaatcaatgtatgatttgcttttacaacttccgtcattcagcaaaacaggccatatcagtacaaaagcatgcaaaatgattattccgtttttagaagaaggaaaaacatacaatgaagcttgcgaatgcgccggtatagattttaaagcgcacagtgaaacttccaaacaaatgtatctcccgcctaaatcatatgaacttgacgatattgtaaatcctgttgtaaggcgtgcagtatcgcaaacaattaaggtcgtaaatgcaataatcagagaaatgtgtaattcacctacatatcttaatattgaacttgccagagaactttcaaaatcgaaaaatgaacgcgatgagattgacaaaaaatatcaacttaacaaagcggcgaatgataagataaaggctgaaattgttgaacatttcaatattgaaccaaaaggtcaggacataataaaacttaagctttattatgaacaaaacggtagatgcccatattctcttgaccctattgaatatgaacgattgtttgagattggctatgttgatatagaccatattattccttacagcatttgctttgatgacagctataataataaagtgctgacattttcatcggaaaacaggcagaaaagtaatagaattccgcttgattatttacctgaaagcaaacattcagattatcgtgtttgggtaaacagtactattcgtaattataaaaagaaacaaaatctgttaaaagaaagcttcacggaaaaagacagaaaagagtttaaatcaagaaaccttaatgacacaaaatacttaagcaaagttctttataactacataaatgataatttgctgtttgatgattttttcgatggaagaaagcgtcatgtaatttcagtcaacggttctattacagcttatatgcgtaagcgttggggtattgataaaattcgtgaaaacggagatttgcatcatggaattgatgctgcggtaatttcctgcgtaactcaaggtatgataaatcaaatctcaaaatattcgttttacaaggaaacggaatttgatattgacaggcaaacaggagaagttatcgagcgtttccctcttccttattccgaattcagaaatgagctttatgcaagaagtcaaatcagcgatgaaaaatatcttaaaagtatactgctaaaattgcctaattacagttatgatgatgttgaaacggcaaaacctgcttttgtttcccgtatgcctcgccataaggttaccggcccggcacatgaggacactatccgttccggtaaggttgagggttatacaatatcgaaagttgctttaacttcacttaatttgaaagacattaaagaaaattattataaacctgaaagcgatactttgctttataacgcacttttacaaaggcttgtcgagtttgacggaaatgcccaaaaagcttttgccgaagaattccacaaacctaaagcagacggaacaccggggcctattgtcaaaaaagtgaaaattctcaaacgttcttcttcaaatgttccggcaagaaatgaaaacaaattaggtgttgctgacaacggctctatgatacgcattgatgtatttcatattgaaggtgatggctactattttgtgccaatttacgtttccgatacggtaaaatctactttgcctgatttagcttgttcccgatcaaaatcagggtggaagaaaatggatgacaaagattttgtattttcgctttatcaaaatgatttaatcaaaataacctcaaaaacagatatgaaattcacccttgttaataaagacagtactttgcctacaattaaatatggtaacaaattgctattgtattatgaaggagcagatatttcaaccgcaagtataaatggaattacccatgacaattcatataaatttaaaggttgtggtattaagactttggttaatattgaaaaattcactgttgacactctgggtaatataagcaaagtaaaaaaagaaaaacgaatgtattttaaataattatgtcttacaaaaacatatttattgccaaaacaatagttacttacgggttagaaattttcttattaaagacggatacttaatgatgcagtactccgtttattcaagagtgtgtaacgggtatgatgccgttaaaacacatgaaaaacggttaaagcagcatttacctccaaatggttctgtacgcctgcttacaattaccgaaaaacagtatgaatctatgcaaatcctactcggagaatatatgcaatcggatatacctgttgcatatgagcaattaactttgctttaaaaatgataaaaagcacagcagaatataatttctgttgtgcttttttatctcaaatttttcttgaaacgtcccaatttagcgtacttcttgttcccatattataacataccaagaaaaattagggaactacaatgtgaaattgaaaattgtaggaaaaatattaattataacataccaagaaaaattagggaactacaattgaattcccctatcgaagccaactcattgtattataacataccaagaaaaattagggaactacaattatattaggttatgtcaattactatttgccattataacataccaagagaaattagggaactacaatcaacataaaactcaatcatacagccatttgattataacataccaagaaaaattagggaactacaattaggctgttattgcggtttcaatttgctgattataacataccaagaaaaattagggaactacaattagtctgcataagctgttaccgatttagtgattataacataccaagaaaaattagggaactacaataaaacacggaggttaattatgagtacaaatattataacataccaagaaaaattagtaaatcatttttatcacttctatttaaaattacagatatctggctttttgcttaattttcttttcaattgatatttaacaaattcaagaaatgctaacagtcattcttttcacctaaataatatattacattttgacaagataattgtaaagcataattataaactgcaattaaactaatgagcattttttaatttagcttcgatttaccgttcagccttattattaaattatacagaaaaatatataacggcacaaaaaataaagaaacagtgaaacctgagttaattccacattattcactgtttcttttattttatattgcttttatgattatttccctgttataatctgcacccctttcgtgttcaattctctatatgtttttacgatgataattgccgagatgataaaggttaaaatatcggacacaggcattgaatacagcactccgtccaagccgaagaacacaggcaagagcaatgcaaaacccacaccgaacacaacctctctgaacattgacagcaaggttgattccaatgccttgccgactgcctgcaggaagatgaaacaagccttgttgacgcaagccaaaatcatcatacaaagataaattctgaatgccttgattgcgaattcggtataataaacgctctcattttttgcaccgaaaattgcaataagctgatgaggaaatccctctgccaacaaaaatgcgacagcgcccacaatcgcttcggcaacaagcaacttggtaaacagttcttttacacgcaactttttctctgcgcccatattatatccgatgatgggaatacagcctgccgccataccgactactattgaaatgacaatctggaagaatttcataacaattccaactaccgccatagggatttgcgcatactgctcctgcttgaaaacagcgtcctgcgcaccgtatttgcgaagcatattgttgattgcagccattgccgcaacaagactgatttgagacaaaaagcttgtaatgccgagcaacaacattcttccacaaatgttccattgcaaagcaaaatctttgcgtgacggctttatgattttcatatgcacaatataccaaacggcaagaattgcagtcactacctgaccgatgaccgtggcaacagccgcacccatcattccccatttgaagcagaaaataaaaatagggtcaagaatgatattgacaaccgcacctgcaagcgttgataccatagcaaatttcgggtttccgtctgcacgtattacgggattcattgcttgtccgaacatataaaacggaatacccaaagtgatgtagaagaaatactcctgcgagtgatggaaagtttcgttattgaccgtaccgccaaacatagcaatgatttgacttgcaaaaatcaaatacaatgccgtcaaaataacactgcctgcgacggtcagcaccacggcattgcctacgctgcgttttgctttgtctaattcttttctgccgagtgccatactcacaaaagcacaacaaccgtcacccaccattacggcgatagccagagccacaaccgtcaacggaaaaacgactgtattggcagcgtttccataagagccgaggtaacttgcatttgcaataaaaatttggtcaactatgttgtaaagcgcacccaccaataatgatatgatgcaagggattgcgtactgacgcataagcttgccgatacgctccgtccctaaaaattgatttcctgtttccatactaattcacctttccttcaaaaaaataaaaatacgcaagccctaaaatccggacttacgcatttttgctactcgattttttatataattgtgctttatttatcgtttatcacacgatttcataaaaaagcgtgtggcttctgcaactggatttacgcagaaatgccacacgttatgtgtttattatagcagtaaaaaatcgcaatttcaagtaattttatttcaatcttttaatccatatgctatctcgtgattaaaaacaacaatagacataataaccgtacgcaatagaacgaaaagacaaaacctataaggctttgtttttacaaaagccacattgccatacagaactcctgaaacatggaaattaaggtacaataagaaaacataaaggaatttttaacaaatattcgtctatatgcgaaaacattgcgaatataaaattaagagaaagaggcaaagcaataagatgaataaaagaattccatacaaggcgcgtttaagcgaactttaatagaaacagccacttaaaaaagtggctgtttcttctattttatattgcttttatgattattgccctgttataatctgcacccctaacataaataggaacacctacattcataagatacgccccgccttttacatattcgtcaccgcttaaggaaaaagaatatgttttattttcatcaaggcctgcaaagtgaagattaaatttctttttaaaaaaccttgttgcatttgcagcaataaaaagcacactttcgtttttatccgtgcttacatattcgttgcaaagcacttccccatcttcaatatcaagtattctgtacaaatcgccgaactgaacaatattgcgaacagatttataaaaatcaatattctttttacaaatttctaaatcttcggcggaatatttaataagattaccgcctattccgagtgaaccctgcattgcaatattaaacctgaaatcaagtgaacaaggcttatttataccgcaaatatcagtaacccacgcacgcattgttttaacaggatgaagcaaagaatatcccttttgaatagtcattctgtcaatagcgtcggtattatcactcgtccatacttggtcataatggctgattgcaccgaggtcacacctgccaccgcctgacgcacagctttcaaactgcacttggggatgacgctttttaagttcatcaacaatcttgtaaactgccattgtatgaagatatgaatacattttcgcattttcaagattttctgcaccaacctgcgaaaaaggacggttcatatcccatttaatatacttaatattatgatttttaagtaaattatcaaggcattcaaatatataattttgaacatcaccgcgagtcatattaagcacaagctggtggcgaagttcatctgcatttctgtgctcaaaatgatatgcccaatcgggatgagtgcgatacaaatcgctgtcgggatttaccatttcaggctcaacccaaataccgaaatccattccgagtttatttacattatcaatcagttcatcaatcccgtttggaaacttttctttattaacataccaatcgccaagccctgccctgtcattatttcttttgccgaaccatccgtcatccataacaaaaagttcaacaccgatatccgccgccaattcggcaagggctgtttgctgcgatacatctatattaaattcggttgcttcccaagaattataaagcacaggaagcggcttatcattaaaacttttaggaagaagaaaatcaattgaaaagcgattcatatttcttgacatttcgccaaaaccgtttgctctgccacagtaaactaacggtgaatcaaatgtttcacccggttttaaagtatgtgaaaaatcaaaatcattcattccgattgaaattctggtgattgaatacacatctcggcttgcgctgactttaaaattgccgctgtaagcaaggcttgcaaaatatacatcaccgctgttttcattggcattttgatgtgcaatgaaatatggtgagttattatgatttgacgcacccctgcgattttcataaatgatacttcctccgtcaagcacggtatttgtttgcaagaattcgctgccccaagcaccatttgtgttaataaaagtatatggctttacagacggaagtgaaaattcagcactgaatattctttcaaaaacgatattatcattgcccgtatttttaagtgtgacataccttttgattatatcatattcatcataaacttcataattaagaattatttgaagaggatagtaatcatccttaaaaataactttgagaatatttttttcaagaacaaatgagtcataatgcatactgatttcacggcagccatccgcaaattcagccttaatatcacattcgcgatacatagttgagccaaaaggtgtaatttcctgcctaatttcatcctgtacggtattatttgaattttcaccgtttacatggacaaactcataatcgtcgtaattacatttattgccccaatgaatatggcggttatatccctcttcatcaactccgaaaacataatgtgtgtttttggtttcaagaataaatatattgtttttttcgttatgttttatcatttcgtattcctcacttgatttatataaatcttcaatttacaatatatcatactatatgataaaataaaacagtaaagtttctaaatacaaaatcttaagtagggatgataaatatgcaaaacttaaatttttatcttgtaacggatacacatttttttgacccatcatttaagcgtagcggtgcggcatatgaaaaaagaagtataagcgaccaaaaatgtgttgccgaaacaccggcaattattgacgccgggtttaagcaaatagccgatgataaagaaacaaatataattctaattcccggtgatttggtttacaggggtgaataccaaagccatatcggactgagaaacaggctttacaaattaaaagagcaaggcaaaaaaatatatctcatcaccgccaggcacgattatgatgataatgactcctttgaatttgacggggataaaatgctgcccgttaaagcaatgccgagagatgaactgcgtgatttttataaagatttcggctttgacggtgcaataagcgaacataaagaaagtatgtcatatgtggcacagcttgccgacggaataagactgcttgcactaaactgtgatggcgactgcaaagatttcaaaggattatgggataatcaaatgaagtgggcgcttgagcagattgaagatgcccaccgtacaggcaattacatatttgcaatgacacactatcccctactgcctttttcgccgataatgaatttaatcagcgattcacatttaaccgattgggaaaagcgtgcaaatcaatttgcagacgcagggcttgacttaatatttacaggtcatatgcatgcacaggcggttacagaatatgttacagaaaacggcaataaaataacggatgttcaaaccggctgttttgtaggctgtccgtgtgcatacagaaaagtaactattaaagacagcactgccgacataaaatcttacacaataaatgattttgattatgacaagcagggaaaaagtgcaagtgagtattttcagtggcggtttgacagaatgattgactataaaatgaaagaaattttgccaaagcccgcaatgaaaattttaaacaaactgactgttaaaaaaatatgtaattttttatggtttaatcctgataaaagcatacaaaacattcttgcaaaagatttaggtatagagcttgtaagaaatattttcataggaaatgagccttatgtaaaaggcacagcggtttatgaggcatttgaaaaacttattaacagactgtctttgataattcacattgcagaaaagaaagcaggcaagaaaaacaaagtattaagtgatataaaatcatttttactttgcacaataggtgatgaaaagcaaagggattgggatttaacacttgatataaacagaaaaagcttttgaaattcagttgaaaaggtcttggtctaaagttatgttcaggtgttataattgccatataattcaagttaaaaagtgattagtatgaaataacaacacaaacgacaggaaacgggtatcgacttggagctgcaaaagacagccgtcctgcaattgaagtatcggaatgataaatctaacgaatgattggcaccggtaagtaacgaaggatataacaaatcagcttaaaaccttatactgacacaaatttgcctaataatttagggtgttttatttgatatttatactatttgtgatataatgttatatatattttatttaaaataatgagtaaacaatatgaaaaataaaaaattgcctgtacttatattttttcttattatgtacagttttataaatatatttttgccaaagtgtgaaaatgaaataataaaaacagtaattttaattttattttggggtactgttttgaccgtgttaaagttaacacaccaatttaaagaatacggactgaaaatcggcaatttgaaagattggcgaatattgattttaaatcttttagttatcttcgtgatattttttaatatacttatttcatcaaaaagcagatatacccccacgccatttgaaattttacagctgatttcctgtgtttttggtgaggaattatttttcagaggaattattttatcatattttaaaaaaacatttaataaacctgctctaaatatttttatcgtatccgcgcttttttcgttttcgcatataatcaatttattttcacaaaaaagcacaatatttatagcggtgcaattgctgtttgcattttcgttagggctttgcctaactgcaatttcttattattcaggcagtattttattaactgtaccgttacattttttaatcaatttcacagctgtaaacactgttgaaatttatatttttatatcgctgtttattttaataccaagtttaattatcataaagttacgggagcaaaaataatgtcatttggttcaattttatatgctttactttttcagcctttgcaaatattgtttgaggcaatatataaattcgcatattctgtaattcaaaataaaggagtagcaataatcattttaagccttgcaatgaactttttggttttgccgctatacaggcgtgccgacgctattcaggaacaggaaagaaacatagaagcaaagcttgaaaaaggcgtttcgcatataaaaaagacatttaaaggcgacgagcgaatgatgatgctccaaacctattatcgccaaaacaattacaaacctacatatgttttaagaggtgttacctctttgtttttgcaaattccttttttcattgcggcatacagatttttatcaacttattccggtataaaagatgtaagctttggacttataaatgatttaagcacacctgataagctgttaacattattcggcatatcaataaatattttgccgattattatgactgtaataaacttaatatcttctgcgctttattcaaaagattatcctgtaaaaactaaaatacagctatatataactgcactgttctttcttgtatttttgtataattcaccatccggattagtattttattggactttaaacaatgcattttcacttataaaaaccttaactttaaaaagtaaaaatcctgcaaaagtcggaaaagaatttcttgcaatcggcggtatagcattatcaatatacagcttttttattgatgatacatacactgaaaaatcacttgtatttacactgttgggaattgtctgcgtatttcctattctttttgctttggtaagagaaaaaaatcctgtaaaaagaaaacctgaaaaaatcaaaaaatataagtacaatacaaaattatttgtagcaggctgtgtgtttatggcagttttgacaggactcgttataccatctgccgtaatcagctcttcaccgcaggaatttgtatttacaagctactatcaaagcccattgtggtacttggtatcttccacttgcattgcggtaggtacttttgtaatttggtttggagtattctattggcttgcaaacagcaaagtcagagccgcttacaccaaagctatatgtataatctgctgcttggcaataacaaattatatgtttttcggcaaaaattcgggaatattaaattcatctttgcagtacacagcagaaacaaataccataagcatatcagctaatgaaatgatagttaacttaattgttgttgctgtaattatagttgtgatgttaataatatacaaaaagcttgcaaagcaaataacatcactgcttcttgtttgcacaattgcactttgcggtatgggtacagtcaacattgtaaaaatcaattcatcagttgcgaatatatacacaaactcggaaaaagacaatacctttaacattaagcttagtaaaaccggaaaaaatgttgtggttataatgcttgacagagggtttggcccgtatattccgtatttctttaatgaaaagccggaacttattaagcaatacgacggatttacttattactcaaacacaatttctttcggcgggcatacaaattttgcttcatctgcatttttcggcggatatgaatacacaccggcagaaataaattcacgcaaaaacgaaaagcttgttaccaaacataatgaagcacttaaagttatgcctgctatattcagcagcaagggctataatgttacactttgcaacagcaactatgccaactaccagtggattcccgatttaagcgtttttgatgatatgaagggtgtaaaagcgtacaacacaggtgatgattatgttgacaacaaaaccaaaaaggaaactataaaaaacaatcgcaggaacttttttgtttattcacttatgaagtcatcaccgattgttttgcagtctgacatatataataacggcaactatttaggttcgagcgtttcacagcaccgcactaatgattatatcgcaacaggtaattacagtgaattcataaaggcttacagtgtacttacaagcctttcagacatcacttcaacaacttcaaataaagtaggagaagtgttgcttatgactaacaatacgacacacgagccgcaactgcttcaagaacctcaatacgaacctgcaaatcaaattgataatactaaatattataaagacgcagatagatttaatttaaacgggaaaaaacttgctatgaataactttacacaaattgcaagttacgaaacaaatatggcttctatcatccaattgggaaattggtttgattatt

SEQ ID NO: 2969 - DNA, 14785 bp, synthetic construct
  misc_feature 1..14785: note = Synthetic
  source 1..14785: mol_type = other DNA
tgccgcagccctatggcggaatttgtgatgaagtcgctcgtcgcctcggcggggctggagcgggaattcgacattgcctcggccgcgaccagcagcgaagaactgggcaaccccgtgtacccgcaggcgcggcgcaagctcgccgagcacggcatcggctgcgagggcaagaccgcgcgtcgcataagatcggatgattacgataattacgatctcctcatcggcatggacgatgcgaacatgcgcaacatggcgcgcgccttcggcggcgaccctgaccgtaagctgcacctgctgctcgagtacgccggccgtcccggagacgccgtcgccgacccgtggtacacgcgcgattttgacaaatgctacagcgatatttacaaaaactgccaagccttgctcgaatcgctgatgtaaaatttactccaaataaaaatacacaacaaatcattacataaaaagcaaagactcaaggtatatccttgagtctttgtgttatattaatccaaaagatttgaaaaaatgccgttattgctgtcattcagcggttgcagcttaccgtttttgtcccattttgcaaatgcggcatatgtgtagtattcacctgtttgagaatcgtagcttgaatacacgctgttatccgagtcatcaagctctttttcgataaacacaagataaccgttgctgtcaacataagaattaccgaaatcatattcatccttacaatcggcattcggcgattttttcttgcatataaattgctgcttgtcctcgtcgggcgtgtaaagactgccgtcgcttgtgtaatataccacttcagacaagtttttgtaagaattaccaagcctgtcataatatgtatgattaaaaatcggatatgcggtcaatccgaccgacgcgataaacgatacgatgcatacggcaagcaccgctttgttgagcgcttttttcttgctttttataatgataagagcaacaattccgataaatgttaacaatctaaacaaccatttcaatatttccatatacactctcctcacagcgccgttacttgaagcgccttaacatcattggggttgtttttgagttctgttttggcgattgaaacctcgacggtgttgccgacttgtgattcttccaaattgtcaaccggtgcgttttgaatcattttatattgaacggagattctgtctccggcgttgaaaatgttgttcgattctgttatgtgcccttttagtaggtatctcaggttgtgtgccggcagagttgaaagccgacacacgggagatacatgagagcggctcggagcttgattttttacttgggatagatttttgtcctcgcctctccgtcaagcaaacggcattccgttttgtataaaacgcctcttgctttcaaaacataaataacattttgtaatcgctttgtcaataggttttacaaaagtgcattacttttcctaccaaactgcacactttttgattttacgacattacaagttatacttatagtataaaatcagacgaggttttgatgcgatttataactgattaaataactaaaaatgagtgagctgttgcccactcattttttatatatcactatatcataatcctttgcaatcatatcgtaatatgcttgctcaatgtcatcccacgcttttgcgcctttttttgacttctctttttgaaacttattataagcacttttcaattcgggatacagcgttggacatttactggatgatacttgttcaataaccatactcgaaaacgccgaatgcatgcctaattgatagactcttttttgggcatatttaattacttcggattttggaatcccgtatgtattcaggcaatattcctcggtcagctccgagtcattttgcatatcggtgtaagcatcatcgtatagattttgaaaccaattgtctaatttgagcgagttcttcttgccgtaatcggcgactacataatactcgattatatcgtcgaccgtgtgttcgctcccaccgatagaaaacaaatccatatcaacctgtgttattttaacgccgtttacggttgccaatacctttggatttgatatgtgtcggaacgcagtgtccatttgctttttatatgatgagttggtctgcgcagtcgttgtttttgaggttgtgctcgccgccgtgtcggtgttttggtttgcgcaggaacaaaataacaattgcaaaatcaagcaaacagcggtaattaatattattttggatgatttcataaaagatacctcattcaatttttgataaatgttcttcaaaatatgctttattcagtttgattcaatttagctgtgataattaaaacttggtgatttcaagacgggcaattcgataatcaatataatcttggacgattttttctctttgattgtaagcccttttatataatgccgaattgttttttcctccgtctgtccaatctttataaacagctttgtatttttcatagcttttatttatttcttcgtcatcacaataaaatttttgattcaaaatttgttctttaatatgggattgatatttgattgagagtgccatttcaaggtgatttttttctaaatcatttttaaatgcggtgttttcttcgctttcgggaatattcaatttttcataagccttgccaatataatcggtttctttttttaaatcggattcgcttaaagaaaaaccgtccgcctttgccaatctgacaattgctgtttgtttaatcgccgtgtcaagaggcttgcttgttttataagaatattgaattaatttgagttgtttgtttgtaatttctgtattgtcaactattgctactgttgcattgtcggacttaagatatgtgttgtatgtgttttcaagtgtgtatttatcggtttgattattatgtgatgcgataattgcagtgaatattattccgcacaagcagaacaaagaaaacaatgtgattataacggttttgcgttttttatttttcataaatatacctctttctgtatttttttggtatattaatcccttattatactccgataatagcataaacggagtgcggcggtcaataaaattttgaattatattgatttgtattatttgtttatttattgcacatcaatgagttttcggttgacggcaataatgcagcattcgttcaaaaattgcgcgacggctatttgttttgcagtaaggacggcgcattcagctttgcaaacgaggtgccgggcgtgtttgaaaatgcaaaaaatgtatcgggatttgttaaaataaccgaagtgaagccgagccgccgaacaagtatcgccgcatcaatatgcgaggattgcaaaatggttttgtttaagtattagcgtcatctgattccatttttcgactaatcaaaatttaattatatcatatgtttaattggttatatccatggattttttgaaagagtaatataggggacactgcaagcgcatccatataaaaaactttacaaaatcgaaaaagtatgatatactcaaattgttcttataacataccaagaacaaattgggttgctacaaaaaggtagaaaaccgaaaagctctgacggctcctttttggagccgttatctttttaatgtcaaggagaataattatgaagtatggagttgggttggattgcggtatcgcatctgttgggtattgcgtaacggagcttgattttaacgacgaaccgagaagaatagttcgtttgggctcgcgtatttttgacaaagccgaaaatccgaaagacggaagttcacttgcgcaaccgaggagagagaaaaggggacttcgtcgccgaatcaggcggcatcagcacaggcttgaacgcataagatatatgcttgttcaagaaaacatagtttctcaagcagagcttgacactatgttcaaaggtaaactttccaatatatacgaaatacgcacaagagcacttgacgaacctgtttctaatattgagtttgcaagagttcttattaaccttgctcaaagacgaggctttaaatcaaacagaaaagttgatgaggaaacctcggataaagaaaccggtaagttattgggagcaattgaaaacaataaagaaaatattattcaaaacggctatcgtacagtcggtgaaatgctgtttaaagatgagcggtattcaaaatataagcgtaacaagggcgaggattaccttaacactgtgtcccgtgatatgattgccgatgaaataaaggcgatttttgcttcacaacgcagttttggtatgccgtttgcaaatgaaaatacagaacacgaatatacggatattgttatgtcgcaaagaccgtttgatttgggacccggtgagggcaacgaaaaatcgccgagtccgtatgccggtaatcaaattgaaaaaatggtaggtcgctgtactttctttcctaaagaaaaaagagcggcaaaggcaacatattcatttcaattgttttcacttttgcaagggataaataatattactttagttgacggaaattcaaataaatatccgttgtcggagcaggagcgcagaatacttaaggaatattgtttcaatacggcaaatgtgacatatgcttcaatcagaaagaaattggggatttcaaccgattacagatttaacaacatatcatatggcgaaaacggaatagaggagtccgaaaaaaagacaaaatttcagcatcttaaaaattatcaccaaatgaaaaagattttgggtgattcgataaatgcattttcacatgatgagcttgatgaaataggcagaatctttacgtattacaaaaatgattcaaaaattattgaaaacttgaaggaagcagggatagatgaatcaatgtacccttcattgttaaagctcccttcattcagtaaaatgggtcatataagtgttaaagcgtgtaaaatgcttattccgtttttggatgaaggcaaaacatataatgaggcttgcgagtctgcaggtatagattttaaagcgcacagcatggcaacaaagcaaatgtatttaccgcctaagtccgatgaacttgaagatattgtcaatcctgttgtaaagcgtgccgtgtcacaaacaattaaggttataaattcaataataagggagatgggaaattctcctacatatatcaatatcgagcttgctcgtgacctttccaaatctaaaaaggaaagagatttgattgataaaaaatatcaaacaaacagggcggcaaacgagcaaatcaaaaaagaaattgccgataatttcggttttgaggcaaaaggtcaggatattattaagctcaaactttggcatgagcaggatggtatttgcccatatacacttaaacctattgaatacggcaagctgttcaatgataaaggatatgtcgatatagaccatattgttccgtacagtgcatgttttgatgacagctataacaataagatattgacattttcgcgtgaaaacaggcaaaaaagcaaccgccttccacttgaatatttggatgaaagtcaaaaatcaaaatatcgcgtttgggttaacaataatattaagaattatcgaaaaaaacaaaatttgttaaaagaatgcttgactgaaaatgataaaaaagagtttaaatcaagaaatttgaatgatacaagatatttgagcaaggttctttataactatattaacgataatttgttgtttgatgaattttatgatgacagaaagcgtcatgtcgtttcggtaaacggtgccgttactgcctatatgcgtaaacgctggggtattgataaagtacgcgaaaacggcgatttgcatcacgctgtagacgccgcagtaatttcttgtgtaacacagggaatgattaatcaaatttcaaagtattcttttgacaaagaaactgaatttgatgttgacactcgcacgggagaagttcttgagcaattcccttttccgtatagggaatttagaaaagaacttgaggcaagaagtgaaatcgaagacgaaaaaaggcttaaaaatgtgctgttgtcattgcctaattacagctatgatgatgttgaggttgcaaaaccggcgtttgtttcccgtatgcctcgccataaggtaaccggtgcggctcataaagatactatccgctcgggcaagattgagggatatacaatatcaaaaattccgttaacagacctcaaactgaaaaacgggggaattgataaatattataaacccgagagcgacacattgctttataatgcattattgcaaagacttgaggagtttaacggaaatgctgaaaaggcttttgccgaggagttccataagcccaaggcagacggcactccgggaccggttgtaaaaaaggttaaaataattgaaaaatcgtcatcgaatgttaaagcaagaaatgagaataaattgggcgttgcggataacgcctcaatggcccgtattgatgtgttttatgttgacggtgaaggatattatttcgtgccgatttatgtttccgatacggtaaaaccgaccttgcctaatcgggcttgtgttcccagaaataaggatggtaaggaaatggatgacaaggattttgtattttcgctttattccaacgatttaatcaggataaccgctaaaaaagatatgaaattcagccttgttaataaagacagtaccttgccgtcaaataaattttcaaatggggaattggtatattatattaatgcaggtatatctaccgcgagtattaccatagaaactcatgacggagcatatgcaattcaaaactgcggtataaaaacattgacaaatattgagaaatatatagttgacccgctcggcaatgtcaacaaggtgaaaaaagaaaaacgaatttattttaaataatatggcttacagaaatatatttattgctaatgaagcacggctgaaactaaaaaatgatcagctggttgtttttaacggtgaggaattatcgtttcctattgaagatattcgctcgattatagtcgacaatccgtacacctcgctgaccggcaagctgataacaaaacttgccggtgaaggcgtgtgcgtgataatttgcgatgataggcatattccgtcatgcgagtttttaccgattggctcttattgcagaatgaataaaagaattaatgttcagttttcccaatcaaagcctaaactcaaaaaaatatggcaaaaagttgtttgtgccaaaataaataatcaagcaaaatgccttgaaattaacggaattgaagatgcaaaaacactttatacaatatccaagaatgtaatgtccggagattctacaaacagagagggatatgccgcaaggctgtattttaaactccttttcagcaatgaatttacacgggaggatgaaacttcaattaatgccgcactcaattacggttatgctgttttgcgttcgtttattgcaaaaacaattgtagcttatgggcttgagccgtcactcggtattcatcacaaaagtcagcttaaccaatttaatttggcagatgatattatcgagccgtacagaccgattattgataattatgtttataaaaattatactgaatggggagaaaaatttttcactcctcaaaaagcagaacttcagcttttgcttaacagtgcaatattaattgatgacagcaggcacagtgtagccaacgcaatagaattaacagttcaaagtataattttatcatttgaaaacgatgagattaagctgaaactgcccactctgattgatacatcatattttaattatgactaaatttatgagaatgattgtgttctttgaccttccggttacagaaaaagccgctcaaagggcggcaacaaaatttaggaattttctaattaaagacgggtatttaatgattcaatactctgtttattcaagagtgtgcaatggttatgatgccgttaaaactcatgaaaaaaggcttaaacaacatttgcctccaaacggttctgttcgtttgctgacaattaccgaaaaacagtatgaatctatgcagattttactcggtgagtatattcaatcggacgctccggttgcatatgaacagctgacattattgtaaaaatagtaaaaagcacagcagaaatatgttttctgctgtgcttttttatttcaaattttccttgaaatgccctgttttattgcgttttgggttcccatattataacataccaagaaaaattagggaactacaatcaaaaatttttaagataggacgaaaactcgattataacataccaagaaaaattagggaactacaatccacaggtgtctacccgacagccgcaagcattataacataccaagaaaaattagggaactacaatgcttttgacagaccaacagaaaacgaaacgattataacataccaagaaaaattagggaactacaattgttttattcacatatatcaatttcatttattataacataccaagaaaaattagggaactacaatgctcgccatatggagtacccatgccggctcattataacataccaagaaaaattagggaactacaatcacttgggacatatacctttatatttataattataacataccaagaaaaattagggaactacaataatccgttggtgaagtctcgataaagcactattataacataccaagaaaaattagggaactacaatttaattgcaatataaagtcaaatatcgtagattataacataccaagaaaaattagggaactacaattgtgttgttgttatatgagtagtgccaaaattataacataccaagaaaaattagggaactacaattgtgtcatctaacattacattgaagtcctcattataacataccaagaaaaattagggaactacaattgataattacgctaggagcaaaaataaactattataacataccaagaaaaattagggaactacaatggtcagctctgctgttcttcttcttcaccactattataacataccaagaaaaattataagtgtatttaataacagaagcatatctgcaattaatattatagcatactttgttttgatgccgcaagtgttatgagaaacattattaaatccgcataaaatcagcccggttgcaagatggggatatttatgataatataatgttgatttaaacaggtataagcattttacttacaaattaatgcgaggtgcggtatgacactgcaacaattgaaatatttggtgacggttgccgagtgcaggaatattacagaggcggccgaaaagctttttatatcacaaccgagcctgagcgcggcgatacataatcttgaaagtgagatgggcgttaccgcgtttgtgcgctcaaacaagggtgtcagcatcacccgtgagggtgaggagctgctttcgtttgcgcgcaatttgctcgagcaggcggagattatgaaggaccatttttgtgccgacgaaaaacgcaacccgaaattttgcgtttcgtgccaacattattcttttgcggtcaacgcatttgtcgatgttgtcggcaaatatgacgctgacgaatacaattttattctgcgcgaaactcaaacgggcgaaattatcgacgatgttgcaaacggcaacagcgaaatcggcgttctttatatctcaaatcacaacgaagatgttttgacaaaactttttaagaaaaacgatttgctctttgaggaaatgttcaccgcatcgccgcatatttttatcagcaaaaatcatccgcttgcacataagaacaaaatcacgcttgacgagttgaagccttatccgtatcttgtgtatgagcagggcgagcgaaattcgttttatttcagcgaggagtttttgagcgtgcttgatatgccgaaaagtattcaggtgagggaccgtgcaacgcttttcaaccttgcaatcggacttaacggttttacggtcagctccggcataatcgacaaggagcttaacggggaggatattatcgcaaaaccgcttgaaatggattgcgatatgcatatcgggttgattaaaaagaaaaacattatgctttcgcgttatgcgcagtcatatataagtgcgctgaaaaagtattctgccatagtttaaaactatgagcgactgcgaattttaagtatttttcaaaagaatatttttgtgataaactgtccttagcaaaaaacgaaaggacagttttatttatgagcacattaaaaacaccgtttaaatatgattttgtaggaagctttttaagaccgcaggcgcttaaagacgcaaaggaaaattacaaaagcggaaaaattcagaaggacgggtacgacaaaatcgtaaatgacgaaatcacaaaacttgtagcaaagcaaaaggagcttggctaccacgcaatcaccgacggcgaattcagaagaacattctggcatctcgattttatgtggggatttgacggagtggagcacaaggcaacaggcggcggagttccgtttaacaacgagcttgccgttcttgacgacacgtatcttgtgggaaaattcaaggcaaaggctcatccgtttgtagagtatttcaagttcttaaagcagtttgaggacgaaaacaccgttgcaaaatacacaattccggctccggcgcaaacatatttgcagtttaccgttcccggaaatattgaacttacaagaaaattttatgcaacaaatgacgaacttatcgaggatattgccgccgcttatcgcgatgtaatcacacaattttatgcagcaggttgtcgcaatcttcagcttgacgactgctcatggggctctgcacttaccgacgacggcaccgaagtattcggtattaccgccaaggaatttaagaatcagcttctcaaggtcaacaatcttgctcttgagggcaagccggaggatatggtaatcacctcgcacatttgccgcggcaactatcactcaacattcttctcaagcggtgcttatgacccggttgccgattgggtttttgaaaacgaaaatgttgacgcccttttccttgaatatgatgacgagcgttcgggcggatttgagccgcttgcaaaggtttcatccgacaaaattgttgttttgggcttaatcacaacaaaatcacctaagctcgagaacaaggacgaggttatcaagagaattaacgaggcggcaaaatatgttccgcttgacagactttgcctcagcccgcagtgcggttttgcatcgtgcgaaatcggcaacaaactcaccgaagatgagcagtgggcaaagcttaaactcgttaaggaaattgccgacgaggtttggggttgattgaatgtttgattaaaatcggtatggttatcgcaaccataccgattttgctttaattattgagcattattctttatgcagtgtgcccccttgtgaagcagttttaatttatctgttgaaattgtcagattttattatataatatattttggcgacacaaataaacggagaagagcataaaattacaactaaacttttgattaaaatctatcaaaaattcgttcaccggcatactgtaaaactgttgagtgttgtttaaattaaggagaaaatatggattatccgattaatgacgattttaaaaaactaaaaatgatgacatttccgattgttgaaggctttgcccctgcggcagaaaaggttttgggtgtttttgtgaatgtcaatcattccgacaaaaatgtttcggttgaaaaattcagcattaattcagacggaacatcattgccgtgtcttttgtattctccgcgcggcaaaaacggaaagcttccgcttgttgtctattatcacggcggcggatttatttacaaggcggcgccgtatcattaccgtttgctcaaggagtattgccacggcgcaaattgcagggtgctttgtgttgattacagaaacacaccaaaatataattttaatcaaatttttcccgattgctattctacgcttgagtgggcggttaaaaatgcagacagaataggtgctgatttgaataaatttgccgtagcgggcgacagcgcaggcggatgccttgccgcctcaactgttcttaaggcacgcgatgagggattggtcaatctctgcggaatgctccttgtttacccggtgcttgacagcagcgtttcaaccgagtcgatgaaaaagtttgttgatacccctgtttggaacagtattctcaatcgcaaaatgtggcaactttatttaccggaaaaggccgacggtcaaaatgcgcaatatgtttcgcctgcatccgcaagcgacctgtcgaatatgccgccgacatacatacaaacagcggagttcgattgcctccgcgatgagggcgttgcctttgccgatgcgttgaaatctgccggaaacagcgttgctttggacgaaacaaagggcactgtccacggtttcgatatggcatctcacagccccataaccgtctgcgccgtaaacaacagaatttcatttttaaatcaaatatttgaataaataagataaccccaagcgtgtcaaattacagctcggggttatcttattattttgcaaataaagtgttaaatatgcttaccaagcatatttttcccaaatcgggcatttgcggtattcctcgccgctctcgcaaacatgttcaacatgtgcatcaccccaatcccattttttgccgcataaatcacagcgatagcagttgtattcaccgccgtcatactgaatatgcatacatgccattgtcaattactcctttcatatgtatattgtatgatttacttatatcattttttgcgatatataaattttcggattaatagcgatcattgcattaatcaaatcctgattgttagctaatgattccggaataacgatatgctcattattttgcattactatatcaagtgaagacgatccttttggagtgttttgacgcgttatcatcgtcagcgatttaactgaattcggaacaatcggtaatttgcttaatgttatcaatatgtgcgaattgccgtttattatactgttcggtgcaataggtttaagttcctcgtttgattcgtataacacttttaaatccgtaattgagcattttttgaatactccttttatcttatttagcttctttctttgtactgtgcagacgattgataatattattgtaataatcgccggtaatgcggcataatagctcaagtataaaaaagtaaataatgtaacggcaataaatatgagcattaaaaccatggaattaatttttgccatgcgaaccaatgaggcatattttttaatcaatactttttctgcttgcttgttgtatgagaacatcgaattgttgtttgcaccagatatgtttgaatttgctgtttgtgatgtgcttgatacgaatgccgcatttgagccgtctttgttaacaatatgtgataccgtggcgctgtttgctctcttttttgctctttctctgtccgcaagttcaatctcatcaagtccgtcaacataccacatattatgtactaaaaagtttttatccattttgctctccttaatagtagtctatttcatatgtgccgggataattgtcattccactcggttgcatatttgtccgccgttgaatcttcatagcaatgaatagtgattgtttttgagtctgaatatccaagtgttccgattatagagtcgtctgaaatataatcaatttgacaatctgcgttatcaatgcttatttcttctaatgagtcgttaccgaatgctccttctcctatgtgcttaacagcggaattaatctgaactctttttaccgccgaaaacggagagccgctgaattgatatgcctgaataaccgttacctcatcatagattataatttcatctattaaattatcctcgatttgccagtcaacattgtcatcatcccacaattcaccggagccgctgatattaagggtccacatatcgtcagagcctttgctgattgtatatgttgcgttatctccgcatttgccgttgtattgcgtaggcgcggctgttgtggattgcgttgtcgattgagtcgttgtttcgctcggtagttctgtgtagccgatgtcttcgtagtcattgtaattatcgtttgagttattagaaataactgtttttgcaaacaaagcggaaacaactattgcggctgttatgattatacaaatcaatactcgagctataatttttttgctttttttattcttttcgatttgtgtggacggacctattacaatctttgtatcaatgtctgttttgtcattgttaactttcgtttgtatatcagaatcttgctgtgcaaaacctgtttttgttgtaattattttcggttttgactttttttcaaacgattcaagtccgtcaacataccatttggtataatcagtttcgattttcattttatgcccttaattataaatgcttatttttatcaaaaattttagtatcaagtgattttttaatcaccttaaaaaacaaaataccgcatacagcatcaattattaaagaaaatatttttttcattattgagccttagcctcccattcggcagcttttttcgaatctgctctgccggttaccataccggttgcgtacaactcgctgatttcgtgagctgcctctttgcaaccgttgttatatgccttcatcagcatatttacagaccttgtatataaattccaaacagcatataattttccgagtataagcatcgcatcaacatatcctgcatcggcggctcttttaagatattcctctgcgtctgcag

SEQ ID NO: 2970 - DNA, 13852 bp, synthetic construct
  source 1..13852: mol_type = other DNA
  misc_feature 1..13852: note = Synthetic
aagtttggatgcttgaaaacggtaaagaggacaatgaatttttaaaaacagattactttgtcgaaaagttgcttgaaaaggcacttaaagaagatgttgacggtgttattgtggaagataacgatttgtttttaatcggcaaatattatcacacaataagattaaacaaggagctttccaaaacaggggagtccgaatttataaaattcattgtttacggttttggctataaagaacagggcaccggcattaatgacggtgatttgtatgattatacagaatttgattttctcgtaatttaatcaatttaaataattttatgcgttatatgttcactaaatgtgaaatgtgaaaaaatattttaacacattttgcggtgcttttaaagaaaaatgttttttaagggaagatttagggactgtaccggtgcttttaagaaaatactttacaaatgtgaaaacatatgttacacttatgttgttcttataacataccaagaacaattaggttactacaaaaaggtagaaaaccgaaaagctctgacggctcctttttggagccgttatctttttatcattttaaggagaatgtgttatgaaatacggtgtcggattagattgtggaatatcttctgttggttattgtgttatggctcttgattcaaatgacgaacctaaaagaattgtcaggttaggatctcgaatatttgacagagctgaaaattcaaaggacggtagttcacttgcaaaaccaagaagagaagcaagaggtttgcgacgcagaataagaaggcataaacacagacttgaaagaattaggtacatgcttgttaatgatggaattgtaactgaatctgaacttgataatatgttttcgggtcaattgacggatatatatgaaataagaacaaaagcacttgatatgcctattaccaatattgaatttgcacgtgttcttattaatttggcacaaaggcgtggctttaagtcaaatagaaaaattgatgaaaaaagtgctgataaagaaacgggaaaacttcttggtgctattgagaaaaataaggaaaatattattgcaaacggttaccgtactgttggcgaaatgttgtttaaagacgaaagatattctaaatataagcgtaataagggcgaaaattatcttaatacagtgtcaagagatatgattgcagatgaaattaaaaaaatttttgctgcacaacgaagttttggcgtgccatttgcaaatgataatattgaaaaagaatatacaaatatagttatgtctcaaagaccgtttgatttgggcccgggtgaaggaaacaataattctccaagtctttatgcaggtaatcaaattgaaaaaatgattggtaaatgtgtgtttttccctgaagaatctcgtgctgtaaaggcatcatattctttccaacttttttcacttttgcaaggaattaataatataactttagttgatgataaaggttataaatacactctttcggcacaagaacgtgaaattcttaaagattattgttttaatacagctaatgtaacgtatgcgtctataagaaaaaagttaggaatttcatccgattataagtttaaaaatattacatatagtgaaaagggcattgaagaatctgagaaaaaggcaaagtttcaacatttgaaaagttaccatcaaatgaaaaaagtgttgggtagcgttataaactcattttcaaaagatgaacttgataaaataggcgaaatttttacattttacagaaatgattctaaaattaatgccgaacttgaaaattttattacagataagtctttaattaatttgttattaaatcttcctacatttagcggaacaggacatataagtattaaggcttgcaaaatgattattccttatttggaggaaggaaaaacatatagtgaagcttgcgagtgtgcgggtattgattttaaggcacatgcaggttgtgaaaagcaaatgtatttgtcatcaaaatccgcagaacttgatgatatatcaaatcctgttgtaagacgtgctgtttctcaaacaattaaggttgttaattcaatcatcagagaaatgggtaattcaccaacttatatgaatatagagcttgcccgtgaactttcaaaatcgaaaaaagaacgtgatgagattgataaaaagtataatttaaataggcaagtaaatgagaatttaaaaaaagaaattttagaaaatttcttttttgagccaaaaggacaagatataatcaagcttaaactttggcatgaacaggatggggtttgcccatattctttaaagaaaatagagtacgcaaaattatttagtaatgggcatacgggtaatgacggatatacggaaatagaccatattattccttacagcctttgttttgacgacagttataataataaagtattaaccttttctgctgaaaacaggcaaaagaaaaatcgtattccattggaatatttacctgaaagtaaaaaatcagactatcgtgtttgggttaacaataacatacgtaattataagaaaaggcaaaacttgcttaaagaaaaatttaatgaaaacgataaaaaagagtttaaagcaagaaatcttaatgatacaaagtatttaagcaaggtgctttataattatataaatgacaatcttatatttgatgattttaacagcgataagaaaaatcatgttgtgtctgttaacggtgcggtaacatcatacattcgtaagcgttggggtattgataaaataagagaaaacggcgatttgcaccatgctgttgatgcagctgtaatcgcttgtgttacacggggtatgattaacaaaattacttcgtattcaaattatatagaaacagggtattgcgttaatatcgactccggtgaagtaaaagaagtttttcctatgccgtattcaaattttagaaatgaaattgaaacaagaagtgatgttgaagatgaaaagcgacttaaggaattgctcgtttcgtttccaaattattcatatgatgatgttgaagcggcaaaacctgcatttgtatcacgtatgccacgtcataaagtaaccggtgaggcacatgaagcaactatacgttcaggtaaagttgatggatatacaatatcaaaaacggatttaacttcattaaaactcaaaaacggtgaaattgaaaattattataatcctgaggatgacaaattgctttataatgctcttttacaaaggcttattgaatttaacggtgatgctaaagcggcatttgcagatgaatttcataagccaaaggcagacggaactccgggtcctgttgttaaaaaagtaaaaataaaagaacgttcttctttaaatgttaaagcaagaaatgataataaattgggtgttgccaaaaacggaacaatgattcgcatagatgttttttatgttgaaaatgacggttattattttgttccgatttatgttgcggacacaataaaatcaactttgcctaatatggcgtgtgttcagggtggtaagccttggaagcaaatggatgataatgattttgtgttttcgctttattcaaatgatttaataagaattacttcaaaaaaagatatgaaatttgaagtgtcaaataaaaacagcacattgccatctaaaaagtatgataatgaaattttagtatactatagaggcgcagatatttccacagcaagtataagcggaataactcatgatgatgcttataaatttaaaggttgcggtgttaaaacattaataaagttggaaaaatatactgttgatgttcttggcaatgttcataaggtaaaaaaagaaaaacgaatgtattttaaataattatggcttatagaaatatatttattgcaaatgaggcaaaattgaaattaaaaaataatcagcttgttgtttataacggtgatgaattattttttcctattgaagatatacgctcaatagttattgataatccatatacttctttaaccggtaaattagttgcaaagcttgcaaatgatggagtatgtcttattatttgtgatgaaaagcacactccgtcatgtgagcttatatctgttggttcttattgcagaatgaacaaaagaattaatttgcagttttctcagtcaaaaccaaagttgaagaaaatttggcagcaaattgttcagaaaaaaattaataatcaggcaaaatgtcttgaaattaataaaattgatggtgcaaaaaatttattttcaatttcaaaaagtgttgtttccggcgactctacaaatagagaaggctatgcggcaagactatattttaaattgctttttggtaaagattttacaagagactatgagagtaatgttaatgccgctcttaattacggttacgcaattttgcgttcttatatttcaaaaacaatagttgcctacggacttgaaccatcacttggtattcatcacaaaagtcaattaaatcaatttaatttggcagatgatataattgaaccgtatcgtccgattatagataattatgtttatcaaaattatgttgagtggggaaaggaattttttactccacaaaaagcagaattacagcttttattaaacagcgctgttgaaattgaaaaaaataggcacagtgttgcaaatgcaatagagctgactgttcaaagtataattaattcctttgaaaatgaagatgttaaattaaaattacctgatttgattaatatatctttttttgattatgactaaatttatgagaatgattgtgttttttgacttgccggttaaagaaaaagccgctcaaaaagcggctacaaaatttagaaactttcttgttaaagatggatatttaatggttcagtattctgtttattcacgtgtttgcaatggttatgatgccgttaaaactcatgaaaaaagattaaaacagcatttaccgccaaatggttcagtacgcctgcttactattacggaaaagcagtatgaatctatgcaaattttgcttggtgaatatattcaatcagatattccggtggcatatgaacagttaacattgctataaaaatgaaaaaacacagcagaaaaacagatttctgttgtgtttttttatctcaaatttttcttgaaatgccctattgttctgcgtttttggttcccatattataacataccaagaaaaattagggaactacaatttgatttgttcgggctttatgtggattacattataacataccaagaaaaattagggaactacaatagctcttctatgtcaaaaaattttcctccattataacataccaagaaaaattagggaactacaataaaatgttacattaaagtcctaacatatcattataacataccaagaaaaattagggaactacaatagatgtaactaatgccgaggacgcatttaaattataacataccaagaaaaattagggaactacaatcagaaaacttgtttatgcagaggtactgacattataacataccaagaaaaattagggaactacaatgaatttcttatcaagcgtgtgattgtttttattataacataccaagaaaaattagggaactacaataagatgggcgaaacaatcggaaccaccaacattataacataccaagaaaaattagggaactacaattctttttatttctttttttgtttcttttttattataacataccaagaaaaattaaaaaatgctacacgcttgaagaagttataaaaatctttgaacgtatagccaatcaaacaaagcaataatctaattgcaggtggcaaagctcacacctttgccgtctttaattattgcaaaattattatatcaaaagccatttaaaatatcaagcgtttttaatattatagtaatcattaagtgattttttgtactacacaacagaattgcaattaaggtatttgtttttgaatagggaggggagggtatagtttttcttgcaaaaacgtcatatttttctgcgtttttgcaaaatctattgactttatgtttgctttttgtagaatgaggttagattttgtcgctgattttatattttttgcagtgattattttgttggaaaagcggtgcggttaactcccttctatattccctttaaattttactgtgccgctttttcttatatatttattataatgttttggcttttgcctttttagttttaattacaacttattacggattgtgttgctatggtagtaaaattaaattttgttgaatattattcaatggtacatgtgccaaaagaaagtattgaaaaaataaaaaatataaccattattcagtttaagaaatggttggaaagcggatgctgtacatttgttattagtgacggtatttatctttgctataacgaacttgatgtaattcgttggttgcgccaaataacttgttcatccggagatgtttattttttagaaagatataaggatgcaagaaaaaaatccgtttataatcctgatataactttagaatttgaaaatgctgaaatggaatacgttttgcgtcatttataacaattagaaaatgtaaaaaataaaagacagttcagtgtgcggtgtgcctcaagaactgtctttttattgttattataattggcttattctgaaaactttgcaagcgtgttttgaaagcgttgccgaaattgttttggcagtaaatctttcgtcgttccaaagctcatgaaccgcatatgatgaacctgttgcttcaaaatttaaatattcatctgtaacaagctcattaatgtcatacgaaaagccttttacacggctgcctttgttgtaaaaacagattgccacatcaccgtttgcaagcggtcttgcaataatatcaattccatgtgatgccttaatcttctttgcaggtttgccaagagggtcttggtctattaaaataaggcttttatttgtaactgttttaagcgtttcgttatttgttgcaggatttccgtttgcgtcaacaaattttcttatatcatttcccaaaataaggggagctgctaacatacaccacaaactgaagtgggttttattttcatcatctgtaaaattaccgttgccaacttcaagcatatcggggtcgttccagttgcctacaccggcgtttttataaagttttaacgtgtgtttgtaaataccgtgcacgctaaaccattttgctgtaatatccggcgttgtgcgccacatattacctgtttttgcaccccaattccacggaaatgcattgccccattcacaaattgaataaacaataggcttttctgcaattccgtattccgatgcagtatcctgcacggctttttttagtgcgttgcccattcgtttgtattgaatgtacgaactgtcggcaaaagttttaattgggttttgaataataatttcgttagaaccgcctttaagtttaacagaaagctgtgttcttccggttgggctggacgctcttgtttttgggaaaaatacttcgtgaagttcgccgttaacaataacttgcacatactgctggtggcgtgtgcatgttttatatgttaaaagcgttataacatagttgccttcaaaattaacaacagggttaaatgtgatttttcctgctccgtggtttattaaacctatgccttttccgcttggtaatgcttttatgttaagaattcttgctcttccgtcaagctttgcatcttcaggttttaatataagttctgccgtgtttcccggtctgcttatttctactgcttcaataacaggtgcgtcgccgcttataacttggtggtggcaaaaatcatatttaaaaaattcgcatccccagccggcaattgttttagcgtcaatttcttcttttcctaaacttgcaggcaaatcctcgcaggttaaagtgccgtttgatgagtaaagaccaacctttatacccatagtgttaatttttgtaataaggtttgaaattccgcttgggaatttttccaaatcaccttgaagcctgccgcttttatctcgcattgagctttgccagcagtcatccaaattaatatattggtagcctgcttcaagcaaacctgattttttcattgcgtctgcagtgtttaaaatcaattcttcgcttatattttggcgaaaggtgttccagctgctccatcccattggaggtgttaacgctgcaccgttattataattttcttcgttttcaatattaattgtaacctttgtgggcattttaattttttccattgcacaaagagggcacttgccgctttttctgtaagttacaaaccaaataataaagcaaagcgctaatataattaaaacggtaattaaaaatttcataaaagtcctatctccttaaaaaaatcaaattcttgttttgcctgttcaatagtctttttatcattaagaccggttgcggtgtttagtgctgattttttgcggtgccttaaattgtaaaaaattctgtaaatccaggcaataggcgttaaatacggtttgccgtaaataaatttaatgtatggcatggtctttaatttgctgtacggcggaaatataacccttaattttattgccagcggatttgtatgtttgtttgtttcaaaatcttttcttgcaacaacagaagaattgtttctgtgtgattttccgaatgcaccgaatgaaactataaaatcctctgttttttgggtgtttttgttaaagcacacgcctgttccgtaccatttaaaacaaactgaaagtatttcttttgaaaatttgccgagtcctgcaatttctaagtctgaaacggcttttttaaggtctacgtttgcgtatttaagcattacagctaaatcaagtattaacttaatgcctgcaccataatcacgaaaatggtgggctatgtgagctattaagtattcaaattgaaatgtattgttaaattcaccttcacagccgcaaaatgttgcattattttttgcatttgaaaagtggtttataacttcttgcttgtccacgctgtcattcagcaggttagagtgcatttcaattttaacattgtattgttcataatcccaaacaggtccgctttcatttttaacggtgaatcctgcttttgtcatagcgtttttagcggcaagaacatcatcttcgtcaattaaaatatcaatgtcgcccattattctgctttccggaatgggaaaatattttttaatatcaattcctttaaaaggaataaatttaatatttgctttgcttaaagcatttttagctgtgtttgcaatttcgttttgtaaattagatacataaataacgtcaaaaaacttttctttaacctgattaaaaacagcgggcggtacaacatttttatttactgcgttattaacagcacaataaacaacacctaaaagattgtgagctgcggcgtaattaaacagggcagtgtagttaatatcttctttaagtgttgttttttcgttgtataaatatgcttttgtaagttcaattaaaaatttatattctttattcatttacccaaacactgcgtttcctacaataagggaaagcatggttataataagacctgcaatgaaaacgccaagtgaaataactaaaaatgattttttcttatctaaatgtaaaagggaagctaaaagggcaccggtccatccgcctgttcccggtaaaggtattgcaacaaataaaagtaatccccaaatgccgtatttatcaattttgtctctctttttaagtgttttatcttcaagccaaaacacaagtttttttattcccggcactttttttaataattcaaaaatccagttaataagcagtaatattaacggaataggaattatgttgccgataaagcttataataaaacctttaaatgtgttcatttgcagtaacactattgctgtaaacatacctaatctgcattcaagcacaggcattaatgaaataaggaatacaacaagttcatccggtattccgtgggatgataaaaattcctgaattgtttggcaaagttgttgcatataatttctcctaaatataattgtttttatttaaaaattcatgtgctgctttgattatgcttttgtcattctcaaattttaaaaggcttaaagcacggtcataagtaagccaaatataatcttcaatttcttctgcctgaatgtttgtagaggtgtcgcttgttgtgcctacaaaaatagaaacggatttttcaattttattttgaattttatattttgatatgcattcaaacccgttaatgattttaacgtgaattcctgtttcttcaagcacctcacggcgtgcagtgtcttcctttgtttcgccttgttctatatgaccttttggaaagccccagtgtgcagagcgtttgtttttaataagaagataccttatttcacctttaatgtctctgtaaacaacagcgccgcaactgctttcataaagacattcgattttgtaatccgaaaaatcacggtctaaattaatatattctttaatatcattaattataaaccttgtgcttttgggtgccacaacccaaatgtattttccgctttgtttgttacaaagcacagctataactcgcccgtcaaaattacgcacgggatggtgaattcccattatgaatgcttcttgattttttatatcgtaaacagttccgtaattcagcggataagtatagcccgtgctgtcatctactgagccgataggtttaacgaccttgactctgacatatttgccgagcattttttcaccaccgattaatagtaatatatgaatttattatactaaaaaaatatataatatacaagtattaattacattatatatataataagtgaaatgcaaaactgcgttttttgcaattattcggcttatataataatattctgcaaaaaggcatcaaaaaaggcatccctttcgggatgcccgttttgtttatcaaacttttaattaagcaagagtttgaagaagttcacacagtgaagaaataacttcgtctgtatcgccggaaagcatgccgagtacctgagatactacatcagagatagaatcgcttgctccgccaaggagaccgcctacaaggttgttaatagtgttgaagttatctttgtagttaactgtgttaataaggtaacgaagaacagaaataagaacttcgcttgaatctgccttaacataaattcttgaaccgaacgttgcagcttgtgaaggttcatcggtaactactgtgccgtgtgaagcaagctggaaccaatcaatcggcataagttcaaggccaagaggctgaccgccgattttgattaatttaagaactgagttaagaagagttacgatgttatctttaccgataagcggtttaagagaacctgaaaggtcataaatgtcaaggtggaatttaacgccaagaccaagaccgttaaccataccgtcaatatcaacgccaagagccttaattacatcgtttacatctactaccggctgaagtgaatcaagaagcgcagtaatcggaagaaggagattgtcgattaactgaagcaagccgtcgtttgcgaagaacaatgaaaggtttggaagaatgctgcaaagcatttggataggagcgttaagaatatcttcaaccttatcaagaagaggattgaggatgtcaagaagaatagcgtcgtattctttgctcatatcctgtctgtactgatactgagttttaatgttgtaaagaccaaatgcttccataagaggaacgattgctgaagtgtaaccgtctgaacccggaaggtaaataaggtcgaacaagccaagcataccgtcgttaagaagaacatcaagtacaccgtaaagaggacgaagtgctgcgcaaagtgcgtgaacaaagctgtctctgtctgttacgccccaagttaagctgtccttattaaccttgctccaagaacctgcctttgcaatagcgtttgctgcgcttgaatatgactgaccgtagtctttgtctgtaagaagcttagcaacgttttcagttgtaaagtcaatgtttgtttgagcaagaagttgagtaaggttcaaattcttattgatttcaaccttttcgattgcaccgtaaagtccacatacaagtgagctgataatgtcatctttgtagataagaccgcctattaattggttaagaccgccgtcaacaagaccgccaacaagaccgtcaagcattggtccgataattgtaaggaagtcaacatctacagttgaaggataactgaagtcatagttcttataagtgaagtttctgtaatcgaagaatgcgttttcagggctctgcataaggagatagaatactgctttaacaatttcatctttatgagcgccgctgatttggttaaatactgttgtaacaatatttacgattgtcttattcttagcaacagcgtcaatagaacaaataatcttcttaaggctgtttgcatttgtaataagaaggtcgcttacatagcgaagaactgcaacaagtgtttcaccttggtttgcactgatgcggattcctttgccgcctgcaacactgctgaatgatgtttgtgtgccgtggcttgcaagtgtagaccacttaaattcaggaagtttaattcccaagtctttaagtaatgagtttacaataggaataatagcatcttgaatgttgcttgagttaaggtcgctgagtttaagactgatgttaacctttgttttaaggttgctgttgattacatttgaaagaatgccgcctaaatctgtgcctgcaatatcttcaataattgcatcaacatttacaccgtttttgtttaactgacctacgatatcctgtgtaacaggagcaagaaggttgttaaggaattgagtaattccgccgttgtcgataaagtatgcaacgtttggaagaactgctgtaattgtgtcaaacggatttgcaagaactttatctacaaaaccgaagagtgggttaagaatgttaataataaggttatcttttgccttattgtaatcgttgatgtactgagaatttgttttaattccgtcgcacataaatgcctcaagaagaggaatgattgcactttcgtaaccgtttgaaccgccaatcttcatatctttgattaaagcaagaatgtcggttaaatcaagttcgattctgttgtaaagagtgtttccgtctgctgtgtttttaatgtaaacatttaacttggaatcttttaatacaacgctgtattcaatgtcgccgcttgtgccgttaattccaaacttaagtgtaggaacaatgcttgcaacggcttcgccaaggttaatgtcttttgaagcaaggaatgctgcaagtacatcgtttacaggacggcaaagagcagcaagtgcattaatgaagccctgttctgcttttgccgaaccgtctgtgaagccccagttaatgtttttaacctgtttccagcttgagcatttcttaagctgtgctgctgctgaagagtaggtgttgccgaagctcttatctgtaaggtaagaagcaaggtcggcaggtgagaagtgaagagttgattcaagagctccgtaaacagcggttgcaatttttgtaaccatttcattcttaaagagaaggctgtttacaagttcaggaagtccttcataatcaagaacaccaagactctgaagaagtgggaacacatttgcaacaagtgaatcaagtgaatctactgcgtcatctgcatcgcttgctgtaattcctgaaggataagtaaatgtgtttgtttcttttgcaaggtattcctcaaatgtccagtaagcttctgttgggttagaaacagaattaagaacacctgaaataatgttaagcactttg

SEQ ID NO: 2971 - DNA, 4244 bp, synthetic construct
  source 1..4244: mol_type = other DNA
  misc_feature 1..4244: note = Synthetic
tcatcccacaagtagccgtaaatcaccgtgccggtcaggtgcttgccactcatgccttttgacttaaacacagagcggattttccggctggtgtcgcgggcgtaaaactcattcatgatattgcggaagggcgtaaaatcatcgtcgcctttcagactgtccacaccgtcattgatggcaattaaccggacgccgcgctgccgcaaaatctccatgacctggccgactttcagatagtcacgccctaaccggctcatgtccttgatgacgattgcctctacacgccctgcctccacttcctccatcatcgccaaaaatccggggcggtcaaaacgggtgcctgagataccatcatcggtaaagtgcgtagggttgggcagcccattccggcgggcaaaatcctctaacatctgtttttggttggatatggaattgctctcgccctgtaactcgtcgtcccggctcaggcgctcgtacagtggggtaattttttcatttctcatggctgtacctcctgaaacaaaaatgctctaagtgattgcttcactaaccatgacaaaatcatgattaagaagtcacttagagcatatatcacctaaaaccatatcatgaaatgaaaaaggttttgggcagcgcaatacagactcttacgcccgaagaactcgatgaaataggtgaaatcttcacattttataaagacgaaacgataatcataaagcaacttgaagaaaccgaaattgacaaatcattatatgatttgttattgcagcttcccacatttgaaaaggcagggcacataagcacaaaagcatgcaaaatgattattccgtttttggaagaaggaaaaacatatgacaaggcatgcgagtgcgcgggattgaacttcaaagcccacaccaatatgcaaaagcaaatgctgctgccggcaaaatccgatgagcttaacgatgttgtgaatcccgttgttcggcgcgcaatttcacaaacgattaaggttgtcaacgccataatcagggaaatgggcacatcgcccacatatataaacatagagcttgcacgcgaactttcaaaatcaaagaaagagcgggatgaaataaataaaaaacacaaaataaatcaagcggaaaatgagaagctaaaagatgaaattagcgaaaacggtaaagagccaaatggtcaaaatattattaaacttaaactttggcgcgagcaagacggaatttgcccgtacacaagaacacccataaaatatgaaaatcttttcgatgatggttatgccgaaatcgaccatattatcccttacagcctttcgtttgacaacagctttaataataaaattttaacaacggcaacgcaaaacaggcaaaaaggcaaccgcattccgcttgagtatttgccggaaagtgaaaaagacggctttcgcgtttgggttaattcaaatatccgaaattacagaaaaaggcaaaatctgcttaaagagcactttaccgaagctgataagaaagaatttaaatcaagaaatcttaacgacaccagatatttaaacaaattacttctcaattacataaatgataatttgttgtttacggatttttataacggcaaaaagaagcatgttacctccgtaaacggagctgttacggcctacatacgcaagcgctggagtatcaataaaaacagagaggacggcgatttgcaccacgcagttgacgcggctgtaatcgcctgcgttacgcaggggattattaaccgaatcacagcttattcggcacgaaatgaggcgccgtatgatttaaacaccgaaacgggcgaaataaaagagcgttttcccctgccctatccgaatttcaaaaaagagcttgatgcgcgaaccacaatcgaagatgaaaagcggcttaaaagcgtgcttatgtctttttcaaattattcatatgacgatgttgaaaaggccaagccctgctttgtttcgcgcacgccgcaccgcaaggttacgggtgccgcgcatgaagaaacaattcgttccggcaaagttgaaggttttaccgtttcaaaaaccgaactaaccaagcttaaattaacaaacggtgaaatagaaggatattacaaaaccgcgcacgaaagcgacactttgctttacaatgcgcttttgcagcgtctcaatgaattcggcggtgatgccaaggcggcatttgcagatgaatttcataaaccgaaggcagacggaaccccgggtcccgttgtaaaaaaggtaaaaacaataaagcgttcttcctcaaatgttaaagcgaggaacaaaaacggattgggcgttgcggacaacggttcaatgattcgcattgatgtgttttatgttgaaaacgaaggctattattttgtgccgatttatgtggcggacacggttaaagaaatgcccaatgaagcttgcccgtttggaaaagataaaaagaaaataatgacagatgatgatttcctgttttcactttatccaaacgatttgattaaaataacggcaaaaaaagatatgaaattcagccttgcgaacaaggaatcaggcttgccaaaaaacaaatatgctaatgaggcgttggtatatttcatcaaagcaggcataaccacagcaagtataacaatcgaaacgcatgacggcgcatacagcattcccagttgcggcattaaatcattggttaaattggaaaaatacaccgttgacccgctcggcaatctgagcaaagtcaacagggaaaaacgaatgtattttaaataattatggcttacagaaatatttttatcaccaacgaggcaaggctgaaatttaaaaacaatcagcttattgttttcaacggcgaagaactgtcatttccgattgaagatatacgctcaatcgtgattgataatccatacacctcgctcaccggcaaactgataacgcaacttgcaaatgacggagtttgccttataatttgtgatgaaaagcacactccgtcatgcgagttgttgccaatcggcgcatattgcagaatgaacaaaagaataaatcttcagttttcgcaatcaaagccgaagctgaaaaagatttggcaaaaaacagttcaggtaaaaatttgcaatcaggcgaggtgccttgaaattaacgaaatcgacgaagcaaaaacgctgtttgcaatagcaaaaaatgttgcttcgggcgattcaacaaacagagagggatacgccgcaaggctttatttcaagctgctgttcggcaccgatttcacaagagatgatgaaagcaatatcaatgccgcactcaattacggatatgctatattgcgttcttacattgcaaaaacaattgttgcctacgggcttgaaccctcactcggaatacatcacaaaagccagctcaatcaatttaatttggcagatgatattatagaaccttacagacccatcgttgataatttcgtttatcaaaattatcaggaatggggcgcggattttttcaccgctcaaaaagcggagttgctgcttttgcttaacagcgccacggtaattgacggaaagcgccacagcgttgcaaacgcaacagagcttaccgttcaaagcattatttcttcatttgaaaatgaagaaatcgagcttaaattgcccgatttaatcaacatttcatattttgactatgactaaatttatgagaatgatagtgttttttgacctgccagttacggaaaaaagcgcccaaaaagcggcagcaaaatttaggaactttcttgttaaagacggatatttgatgattcaatattcggtttattcaagagtttgcaacggatatgacgctgttaaaacgcacgaaaagcgcctaaagcagcatttgccaccaaacggctccgttcgtttgctcacaattacggaaaagcaatatgaatccatgcaaattttgctcggagaatatgttcaatcggacattccggttgcctacgagcaattaactttgttataaaaaagtaaaaaacacagcggaaaatgaatttctgctgtgtttttttatctcaaatttttcttgaaatgcccttccctgctcggcttttcgttcccatattataacataccaagaaaaatcagggaactacaaccggaagcgtagaggtggtaaaaagtggcaattataacataccaagaaaaatcagggaactacaaccttaattcttcacacattaagggatataacattataacataccaagaaaaatccgttttctccgata

SEQ ID NO: 2972 - DNA, 23303 bp, synthetic construct
  misc_feature 1..23303: note = Synthetic
  source 1..23303: mol_type = other DNA
ttcctgttttaaaatatttgcctctccagtaaccttcgttcaatgaactcaaaattactccagtgttagggccgtcggaagcagcatttaaaaattgattgttaccgatgtaaatgccaacgtggcttggctcggcggattcggttgtcttaaaaaataccaagtcgccaatttcccgctggctgtcgtcgattattttgcaatatctgtagatgttggttacggttcttggaagttgccagccaatagattcgcgtgcaacagcgtaaacatagccagaacagtcaaaagaagcaggccctgtcgctccacttacataagggcttccaacatattttttgccatattcggcaaaggtctgtctcgtttttagcgcttcggcagatttttccaaagcattttgagcgcacagacgcggcgtaaacaaaattaaaaacacaaagcagagccatacaaaaaggtgatttcgttcaattctagtcatataaagattatcggaaaattttaaatccaatacaagaaaaaaatacgggcgccacctttcgctttgctcaaggtcgggtgttacgcaattcgctaacgctcatcctcctcgtcagcactcacgcgtgctgcctgcggtggacgcgtaaacgcgttgctccataccctggcgcaaaataaatcgtatttaaatcatcaaaaaaatctgttaaagtgtttttcaataaaaaggcaatttgtctttgttaagaggtattttatgaatcacaatatgcagattttgcaggagatggcagcaaaaaatggtccgctttgcgtaggtttggacacagatccttcatatcttccagaaccgcttttaaaagtttttccttcgtcagcagaagcaattcttgcatataacaaagagattataaaacgcgttgcttctgaaaaatctgcatgttgttttaaaatccaaattgcgtattacgaagcgatgggcttggaaggtttaaaagcctatatacagacaattaaagccgttcacgaagcaggctttttagcgattagcgacataaaaaggggcgatattgcagatacggcaaaggcttatgcaagggctcatttttctggcgagttcgaaagcgacattatcacgataaatccgtacatgggttttgacacgctcaaaccttttacagaatattgcaaacctgttgaatcgagaggcacatcgcaaattgctccgcaaaaggttggaggtaaaggaatttttgttttattgaggacttcaaatcctggtatggtggacatagaacagcaggaattaaaatctggcggacgggttttagattgcacaggtaaagaattgcaaaggattgccagagagtttgaccttttgtaccaaaaccaaacttgctctccagtgggggcggtggtcggttgtacacaagaaagcgatgcaaggcttttacgagacgcgtatccaaacatcttctttttaattccaggttatggtgcgcaaggtggagaagcaaaaattgcggcaactctcttagacaaagctggcggaactgtaaactcaagccgaggaatcctttgtgcatggaaaaaagcaccagaacttgcaaataaagttgaaactggaaacctttgtttaaaagagattgcagatgcagcgggagctgcctgtgtaaatgcaaaaaaagatttgctcgctgcaaaaaaatctcttggtctttaatttaaagatttttatagaggaagtcagatgaaaaatgtaaaagattgttctggtaacgatttgccgttttttgcacttgcaagcgttttagacagttacgccgttcaaactgcttttcccaaaggaagcatttggtgtttaaaacttgtagtaaaaaatgaagaaaaacaaaattttggctgtcgtcccggtcaattttacatgcttcgctgtcgtaattcggccttattgcttgcacgtcctattagcgtttacgactgtaagaaaatttcagacagcgaaatcgctttagattttttgattttgttaaaagggcagggcacaaaggaactcgtatctgttagaaaagacgacaaaatagaagttttaggaccacttggaaactactggcaatctccagacgaaaatcaaaaagtagcattgataggtggcggggttggggttgctccagttgcggcttttgcttctactttaaaagaaaaatcctacgatttttatgcggcatttaaaagcggagcttatggtcttgaaaatataaaaccaaacaaacttaccgttacaaccgacgacggttctgttggaataaaaggaatgattaccgcagcgctcgatgttcaaactataaaaaattatgatgttgtttatgcatgtggaccaacaccaatgcttgatgcgattcaaaagttgtgtaaagaagcagatataaaattgtgggtcagcatggaaaaccgtatggcttgcggagtgggagcttgccttgggtgtaccatatttacaaaagaaggaaacaagcggtgttgcaaggacggtcctatttttgacggtcagataatagatttttcaaagattgattctcctattacatctccaaaaatcgaaaaaagacttccattaaaagatgaaagcccggatttgacagtaaacatctgtggagtggagttttcaaatcctgtaatcgctgctagtggaacttttggttatggcagtgaatattcgagcgtaatcgatgtcgacggtttgggcggaatctgctctaaaggacttacttctgaaggacagccgggaaataaaggaatccgtctgatagaaactccgatggggcttataaactcgattggtcttgaaaatccgggaataaaacattttatcgaaaatgaacttcctataatgaaaaaattcaaggcaaaagcggtagtcaatttgagcggaaaatcgcttgaaacttatgtggaaggtgcaaaacttcttgagcagacagacattccaatgattgaacttaacataagttgcccaaatgtaaaggctggtggcatggcgtttggaatggactgccaggcggcaagcactgttgtaaaggcggttcgtagcgcaacacaaaaacctttgatggtaaaactcagtccaaatgctcccgatttgataggcgttgcaatggctgtaaaagaagctggagcggatgcgataagtttgataaatacgattcaagcaactgctatcgatatagaaactggcagaccctattttgaaaatatccgtgcgggttttagcggacctgcggttaagccaatcgctttacgcatggtgtatgatttgtgccttgcgatgaacaagctgaatgcaaacgagcgaattcctgttgttgggttgggcggaataacaacctggcaggatgctgttgagtttataatggcaggagcggctgctgtggaagtgggaacggcaactttttctaatccaaaagcgatgatagagatagtcgaaggtataaaaaaatttatggagagaaaaggctataaaactttggatgattttcgaggttgtgccttataaaaaatatttatggaaaacacagaattttacacaaagattgcaattttttttgacgcagaaaatttttcttcaaagtttgtgccaaaaacgctggcagaaataaacagacgtggaaacgtcgtaattcagcgtacctatgcggactggtcgagcgttaatgtaaaaagctggaaagactgcgtaaacaaatatccgctaacagcgattcaggtttttagggaaagcataaacgataaaaacgaccaaaaagaagccgtagacaagcagattataatggatgcaattcagacggcagttcaaaatccagatatttctataatttgcattggagcgtcggacaagggctatattccgcttgcgctaaaattgcgggaacttggaaaaaaagtaattggcgtgggcgaacgcggtaaggctagagaaggctcaaaacttgtaaatgcgtgcaacgagtttttgtatgtggaagatttgcaggacatagacgaaaatattttaatcgacgtttcaacagatgaagcaaagaatgcaggatcagaggcggaagcggacgaaaattctgcacttgcaaactattcgcttttaagatttttgaaccagtgttatgagcttactccaaaggtaaacagttacagcactggcgacggcaacggcgttgttttgcacagtcagcttatggaaactatcttgagacagcaaccggactttaacgtaaaaacttacggttttaaatcttttaagaatttgcttgcttcttttagcgatgaatacgaagtttttgacgatggaaaaaggcctccaacttattatgcttaccgcaaagaaaatactgttaagcaggaaattagggaagggcacataaaacgaaagagcaatttttacggttttatagattcagaaggaaaggattattatttttactttggcgatgtaataaatttgccagaagataaaaaaattcagggaaagccaaaagttcgttttgaagtcttaaaagaaccagatccaacggcagcgcttacaaaagaccgaaacggaatcgccgataaaatagaacttttaccttaaaacgattgtaccccagatgcgaaaggcgaagttgccaaaggcaatgagcgttagcgaacctgtagcagctggtagagaaaataaattgcggttctcctatttataaaattttgctcgtgtgctgttctaaaatgacattttacgataaagtgtcaaaataggaattttaaatgaacacacttgttgcactttgcgctgttggcgctgaaaaaatacttggaaatgagataaaacttctcggttataaacttttgtcaaacgcacctggtcgagttttatttgagggcgatgatgactcactttttagggcaaacctttgcttgcgcactgcggacagggtttatcttttgcttgagcgttatcgtgcagaggattttgaccaactttttgatggcgtatattcgattgcatggcaggatttttttaagaaagattccaaagttacggtggataaagttagaacttataaatccaaattgaattcggaacattcgattcaagggatggttcaaaaagcgatttacaaaaaactgtgcgaccgctggaatatgtcttctatgccagaaactgggaacgaaagcgatgtgcgtgtttatctcgacaacgacgaagctttaattttattggacttgagcggaaatccactgcataaaagaggctacagaactgatggtggcgttgcccctttaagagaaacaactgctgcaataatgctacagatgatgatgtggaaaagaaagattcctttgcacgatccattttgcggttcgggcacgattccgattgaagcggctttgtacgcgtttaacattgcgccaggttttggaagaagatttgcgttggaaaatcttggaatttttaatcagcagcgtgcgatagaaataaaaaaattggaagcacagaaaatccgcacggatgtggaagttcgcataacaggcacggacattgatcggggggctgttgaaagggctcggttgaatgcagaacatgcctgtgttactgctggcagggcgttaaagtcgattggaattgatgcgcatgtttggcggccggattttcaggttagcgattttaaagaccttgccgccccttacgaaaacgggatgttaatctgcaacccgccttatggcgagcgtcttggagatgaagaagaagcgagcgcactttacgcaggaatgaaaagcctgtttgacgattttaaaggctggcagcttggaattataaccgcacataaggaatttcaagaaagcataaatcgatacgcaacaactctaaagagtttgaagtctggaaatttagatacaactttttacatatatgacggctcggaaaaagagaaaaaacacaattctccaaaacgaaaaggaaacgatttttttaacgagagagagaatcatagaaaaatcgattcaaaaaaacaaaacgagtttggaaaagcgagggagagcgttcgtaaagatttttacaaaaggcgagagaaaaatgatgaaagggagtttttttgatggctattgttgttgagcacgaaaaacgcaagagagaaattttggaaaaagcgatggaacttttttgtcgcgacggctacgaagatgtaacttttcaaaaaattgcggatgcttgcggaattacgcgtacgaccttatacatatattttaaaaacaaacacgagattttcaatttcagcataaagcaactttcttcaaatttggaagtaaagtttttgtcgcttgtaaaagaccattctataacggcggaagactgtttgcgcaaaatcgttacgagtgctgtgggtttgtgctatgaaaatcgttcgctttttgaggttttaatcccttaccttacggggctttacaaaactggcgttgatgtttacgagcgtgttaggcgaagaacaataaagataaatcaccttttgagcatggttttaattcgaggtcaaaaaaatggtgagtttaaaggatttagcgtaaaagcggcaaacgatttgttgtttggacttatagtagaatcggtttttaaaatggcagttctgcacaacaacgaagttgacaacataaaagcgagtttaaatcttgcgattgacggttttgtaaataagtgatttttaatcaatcctgcaaaatcgataattttgctaaaaatttaaactcctagaactaaagtcaaactcgttttctggatgcgatgaggaaggaattataacggcagaatttggatcaactgcctgcacatcgccatttttgtctgtgtaatttattgtagttgtgaccgttgctttgttcgtccaatagtaatatttgtaaggatgacttcctgttgaaacaactctaggtgaaatagcacaaactcctgtaaatttgattttgcaatctaaaaattcttgagaaagctctttttgtaagtctatagctgctgcggtatttgttgccgcttgtgctgctgttgcaagattaaaaggtctttcgttagttccgttggaaactaagacagaaagaagtgaaaaatttgcaggcagagttactgccgacgaaagttttatagtataagtgcctgttgcttcgtttattgtgcagtctgctgtaattgaggaaggaagatttgcttctgaagtagaaagtccctctaaaactttgttgtttggtaaagtgtatttgtatacagagccgttgtaatagcggattaaatatttataaaaaactcctgttgctgtgtgggaatctacaaactggtaggtggatgctaaattttctaaatcgttggggataacttgccctatatttgtttttgttgggttttcaaaatttgcagtggaagaagaaagtcggattatgtttgcatatttcatttttgcgattgaaggaaaagaaattgtaaaatcagaagtgctttctgcaaccgtaggttctggcaaatcttcgccttgagattcgcttattacgcatgaagaaataagtattgcactcaacgcaaaaatgcaaaaaaaagaaattgaaatccaagattttttcataaaaatttacctccgcatttttaaatacagcaaagcaaaatattatcggcataaatggtaataaactttattgaaatatgatgagcgatttttctttctgaaagttattttttttgcaaaactgtagaagtatgtttgtaaccgcgcgtccgtgtgcggcaagggtctacttgtagccccgctacccgcttgcgagcttacagcggcaagggatagtaggggcggcgaagccgttggcggaacgccaatggagcgaatagcggaaccccgaatagcccgttttttgcgaaagcaaaaagccgcccgaaaaaaaatctgtaaaaatataaaaatttttataaacacatggaagtaaaaaaaaacaaattgtataatgctttcatatttttttatggagcgtttgacgtttgctttgcgcgttgaacctttgcatttggagtacaaaatgattggaactttttggtcgttggtgcctgcgattgttgcgattgctttggcgttgatttcaaaagaggtttattcttcgctttttgttggaattttgattggcggagttttttattctgggctttcgtttacaggattttttagccatgttgtaaacgacggttttattgctcaactttctaacagctggaatgtcggaattttagttttccttgttttgttgggagcgatggtttctttgatgaataaagctggcggttctgctgcttttggaaattgggcgcaaaaacacattaagacaaaggttggcgctcaacttgcaacaatctgtcttggaattttaatttttatcgatgactattttaactgtcttactgttggctctgttatgaaacctgttacagacaaatacggtgtttccaaagaaaaactttcgtatttgatagattcgactgcggcaccaatttgtataattgcacctatttcttcttgggcggccgcggttgctggctttgttagcgaaggcgaaaacggaattgcccttttttgtaaagcgattccattcaatttttatgcgctctttacaatcgtaatgatgtttaccctcgttcttatgagatttgaatatgggcctatgacaaaatttgaaaatccttttggagaaagccgaagttcagatgaaaaaacaacagccgaaaaagaagcagttggtaacggtggagttatagatttgattcttcctgttgccgtgctaatcgtaatgtgtgtattgggaatgatttattccggcggtttttttgctgcaactgttcccggtaaagttgaaggcgagatggttgcaaatcctgcttatttaaattttatagaagcatttgcttcttctgatgcatctgtaggtttggttttgggtgcgcttgccgctttgattataacttttgttgtttatatgtcgcgcggagttttaaaatttaaggaatttatgtcttgcattccagacggttttaaatcgatggttcctgcaatattgattttgactttggcttggactttaaaaggtatgacagacagccttggcgctgcaagttatgtagcagggcttgtttctaggagcgcaggagcgtttaagatgttcttgccagctatagtctttatagttgctattttcttggcgttttctacaggaacttcttggggaacttttggaattttgattcctatttgtattgcagccttccccgatacttcagaccctataagagtaatttctatttctgcatgtatggcaggtgcggtttgtggagatcacacttctccaataagcgacactactataatggcgagtgcaggcgcaggatgtaatcacgtaaatcacgtaaatacacagatttattacgcaatgacggttgccacaatttcgtttgtttcttacatagttgcaggctgtacacattctttgggacttttggtaagcggaatcatatctttttctgttggaattgtttcgctctttgcaactttgattgtcttaaaaaaattgttaaaaaagagggcaaacttggaaagaaatttgtagttaaaatataaaagcaatttgccgaaagaggctcctttggagttgaacgatttgagttcaattttaaaggggcttttttttattgtgcgaaaggggagagggagcggaatatgggcaaatgcttttttatgaaaaataaaagttttaaaagcaaaaaggaagccgtagcttcctcttttcattttggtctatttacatttaataaaaatgtaaaagcattttgcgaggtcataagacctcttgttagcaggttgatcagaaaaattaatcagtaacataaatatagtctagttttttttaattgtcaaattgagcttccgtgttatatttaaataacgtaatttaataattttggagtttttttatgaattggcgtcttgggcttgatttaggtacaaattcaattggctggagtgttatctctcttgatagcgaaaaaaatgtaaacagtcttatagatttgggagttcgcattttttctgatggtagaaatcaaaaaacaaaagaacctttagcggtagcaaggcgtattgctcgcggagcaaggaaaagcattcataggcgaaaaattaggcggcgtaaaacttttaaattattgcaaaaagagggattatttcctttatcgaaagaagaggcacaggctttaaaattaaaaaatccatatgaacttcgaattgatgctttagagcgaaaattagaaccttttgaattaggtcgagttctttttaacctttctgttcgccgcggatttaaaagcaatcgaaaagataataatcaagaagagacaaaagatactgtatctgcaaataaaactaaatattcacagacagaaatgtgttcaaatcttgaaaacgctgtaaaaaattcaggatatagaactttgggcgagtttttgtggaaaatgcaagaagaaaaccacggaattagattcgctccaaatagaaatgtattttatcccacaagaaaactctatgagcaagaatttagtttgataaaggaaaaacagtccgaattttatccgaatgtcgattgggatgcgatttatcaggaaattttttatcaaagacctttaaaagcacaaccgcgtggaaaatgtcagtttatgcgagataaagatagaacttataaagcacttccttgttcgcaaaagattaggattttgcaagaggttcgaaatcttaaatatatcgatgaatcaaaaaaaacttgtccaatttctgaagaaggagaagcgataataatcggtctcctaaatacaaaaaaagatgtaacttttgatgccatgcgtaaagcgctaaaactttctagcgaatgtacttttaatttagaagaaaatcgcgaaagccttaaaggaaattccactgcggttataatgcgaagcaaaaatcggtttggtgagatgtgggataaattaacccttgaagaacaagatcaaatagttgaaacgatgattacagccgatgaagattttcaagtatttgaagttctaaaaaaatatgaattgagcgatgaacaaaaatcccttatcgtaaaaacggttttaccgtcgggaactacaatgctttgtaaagaagttacacaagcgttagtaaaaaagatggaaagcattggcagtggctgcgatttggtaactgcggaaaaaatgttgggctttaaacatgcagaccagagcgtaacaaaaacagatttacttgaatactatggtaaaatccttgtgggctctactgttggaggtgacctttctgcgccagaagataagcccgaaaataaatatggaaaaatcagcaaccctacagtgcatgttgcgttaaaccaaactagaactgttgtaaatgctttgataaaacagtatggaaaacctgaacagatttctgtagaactttcgagagatttaaaagcgagccgagaagcaaaaagaaaaacagagcaaaaacagaatcaacgacgaaaagaaaatgttttactcaatgatgatttaataaaaaaatggaaaatcagctatccaaatagaaacgaccgcttaaagtatagactttggaaagaactggataatactgggcacaaatgcatttattgtggaaaagaatttgatgaaaatgaacttttcacaaacaacatccagatagaacatattcttccttatagtagaactttgttggatgcagaatcaaatcttacacttgctcatgctagttgtaataaagacaaaggcgagcgctcgccgtttgaagccttcggtgcaaatccaaaaggatataattgggcagaaataaaatatcgctcggagatgttaaaagaggcttcaaaaagaaacaaatttgctgtagatgcgatggaagcttttgaaaaggatagcggattcatcgctcgacaacttaccgataatgcttatctttcaaaaattgcatacaagtatttgcatagcatctgcgacaatgtgtggactgtaaacggtggaatgacaaagttgttgcgcgataagtgggatatcgattccgtgcttgcgcgaaaattcgatgaggatactgttgtaaaacttggacttaccagcgaacagattggcgaatataagaaaaatcgtagggatcatcgtcatcatgcaatggatgcggttttgattgcgttgacagatcgttcacttgtaaaagagatttctactatgaatgctcgttcaatgaagaataggattgaagttccgccgttcccaatatacaggcaggattttattgataaagtaaaaaatatagttataagttttaaacctgatcatggcttccaaggtaaactttcaaaagaaactctactgggaaaaattaaacgcgaagaaaagattgatattaaaaatcttaacgaaaatgatattcaattcataaaaacagagcgagtaaaaactgaaatatccaaatgttatgaagaaacaaaagatattaaagaggtgcgaaaacagttcaaagatatatatccacagattattgtctttaaagaattttttgtttcaaggaaaaaccttgcaaattttaattctgacaaggatttagaaaatattgttgatgctaaaataaaagaaaggataagagcctttgttgaaaatcatagcgaaatgaaatttgaacaagcgattttggagtattctaaacaaacaggaactaaaaaagttcgatgcattaaccacggtcaaacaccgatagaaatcaataattcagccgttcctcgttatcttgatccagaagatttctttgccgcagttgtttggaaaattcctcctaaaaaagaaggtggaaaagaaacttttaaagctaaatatattcgtcgagatcaagttggaaaagacaacaaaataaaggaagacgtattaaaatctcctgagcctgctgcaaaaaatattgctatcgtctacaaagatgactatttggaatttttatttgaaggaaagtggtataaatgccgaattgctggttattccacaacggataataaatttgacataaggccaatctatacagctacggattgttacgactggctctattcgacaaatgaagcgatgatagaaaattgctggaatcctaaaaaaggccagaatcatgtatctgttaatgttttatttggtgagagacaggcacattctattacagtaaatcctataggacgagtttttagaaagtgatggcaaaattcagcatatctgccgataaaaaggtatgctgaatagagttttagagataaatgatgaaaaccgttatctttctctaaaccgtggctttatcgttgtaaaagagaaggataaagaattaggttctgttccactagacgatatcgccgtgatgattatttctgcgcagagtgctatttttacaaaaaatgtgataaatgccttggctgagcatggcggaatcacgatactctgtgggaaaaattacattcctgaaagttatattcttccgtttgctgaccattatctttttacaaaaaatcttaaaaatcaaatagctgcttccgttccttttaaaaagagaatttggcaacaggtgataataaaaaaaattcaaaatcaagcacaagcacttattttttgtgggaaaattgaagaagcacaaaaaataaagaaaatatcatttcttgtaaaatctggcgattgtgataatcgcgaagctcatgctgcaaaaaactattggaagtacctttttggtaaaaattttacaagggatagatttcagtctggtataaatgcctttttgaattacggatatgcagttatgcgagcggcaatgtgcagagcgatttgtagtaatggattgttaccttcattaggtatttatcatgaaaataatcttaatcagttctgccttgctgatgatttattcgaaatatacagacctattatagattgccttgtttataaattgaatgaaaaaggcgaaaaagaacttaccccagaaattaaaaacctttttgccaatacacttaaagtaaaagttcatacatctgaaggagattcgcaagcatgccagagtatgcaatatctagtggcttcttatgttcatgcattagaagaagggaaacctgttattgaactgccagagtgggagaacaatttaaatggaattaccattattgagtaggtatgagcttatgtggattttagtttttttttgatttacctgttgttgaaaaatctgatcaaaaggcagcgactgcttttaggaattttttattagataacggattttccatggttcaatattcaatttatacaaaactattttctgggaaggatgcctgtgaaaaatactataaaatgatacaaaaaaacttgcctgcgcagggaaaagtggatattctaacgataacggatcatcaatatggaaatattatcagttatcattcaagagaaaaacaacaaaaaaagcagaacgaacaactccttttattctgataatcgcacaaaaaaaatccgcctgatgagttgtatttccatacaaaaaaagaaaatacatcagacggattttaactgattaatttttctggtcaacctgcaacgaaagtacgagccgtctggctgtctgaaacattttaactgattaatttttctggtcaacctgcaacagcaattagaccatactactatatgagaagattttaactgattaatttttctggtcaacctgcaactaaaagtaaaagaacattgtacagccttgaattttaactgattaatttttctggtcaacctgcaacgacctattacagagaaagagaaagcaacttattttaactgattaattttcctggtcaacctgcaacaaggtagtttgcgataacgcttatttatttattttaactgattaatttttctggtcaacctgcaacggcgttgacactatgggcgtcgttttggctattttaactgattaatttttctggtcaacctgcaacccgttcattgtttacgcaaattgcgtctaaattttaactgattaatttttctggtcaacctgcaaccctacggttgaagaatcatcaaatgctatgattttaactgattaatttttctggtcaatctgcaactggttcataaacacggcaatgttatgtctgattttaagtgattaatttttctggtcaacctgcaactccaactgcccacctttgcccttgctgttgattttaactgattaatttttctggtcaacttaaaatattttattctcacatcgataaaccaaactgcagcgaaccagatattgaacaatgcggacgaattgggagttgaaaagtttgaagtttccgctcatatcggctcaagaccagaacacgaagaatggcaaaggaagattttcacaaagaaaggattatacagcatttgcggactggggagtacaacaggattgtgcggaataaactgccgacattcattttatccctactttgagggaacaaaagagcattacacgcaggacgacctagacgagatagcaagcgagaaaatggagtttaacggcgaggaactatcatactatgacggtgagcaaaaacttagaggcatagaacgaaacataaggcgatacaaacggcaagcattaacgcaggaagcggtaggggtagacaacacaagagcaaggcagaaaataggtgaatggcaggtcgccgcgcgagattttacaaagcagacaggaataacacgagatagcgcaagggaatatgtaggaacaagcggaaaccagcctagaggaattataccaaaaccagtggcacaaccgaaaccgacggcaacagttacgccagcaacaacagattcggcaacaactaaagcaatgtcggcattgatggacaacccgaagagtgcgacgcgagcaacgctggaaagattaggcgtagaagcaagggagataaaagcatttgaaacaccgctaacacaagaaaccattataaaacgcatcgcgggtggagacaaaacaaaaggtagttgctcttcgttgggcttttcatacgcgacaaataaggcgggctttgatgttttagattttagagggggcaacagttgcaaaatattctcacaaaaaagcaccattgaagaaatctcaaaactaaacggcgtaaaaagcaaagttttaaacgagtttaacgacttcaccgcctcccataaactttatatggaaatagaagcaggaaaagagtattattttgtagtgggcagacacgccacaataattcaaagaaaatacggcgacttgtactggctcgaaatgcaatcagcaaacgccgattataatacatggcatattttggatgatgatgttttgaagcatcgctttaaatgtcaaaaaagccatacagtatataaaaaaggtatcaagtatcatctttcttgattgatattgaatcattaggcaaaaataaagagtttatcaaattgatgaagtacataaacacaagcgacagtacacaacaaaaaggaaacggagattatgcaaaatgacagataacgaagatgagggaatctacgaatatgaaaacggctttgatttttacaaagataatgtatatgaaaaaatatggagcgtagaaacgccagaaacaagagatagtataggcgaatttcttttctcgtttgacaaaaagaacatatttaatttttggacggactatcccgaaaagctgaccgtcgagcaaataagtattttcaaaaatgaatatcccgaattagcacgattaaaaacaacacgcaacaactaaaaacaccctgcgacgcccctaaaaatatcccttcctaaaaaacaagagaaattccccctattttcccctaacttccctaatcttttcttttcctcaaatgactatataggtagaggaaaaaagcaatgtcaattacagcaataataacggtgggaatatctatatcaacattcctgctgggcataatctacaaattgggagatttgtctatgaaattcgggcgaataacaaagaccattgaatcaaacgatgagagagatgcagaagagcgacgtaaaaacgctgcgaagttttcagaactttttaatgacaggaacaggcacgaatcagccataactcgccttgataccactatgaacaatatcgatgcaaaacttgaaaaaatggatgcaaaactcgacaggctaattgacgggggtaagtaatgaaaatcacgcaaaggcttttaacaccaaacgaatacagccgaccgcaaaaaccaataaaagaacttttagggattgtaattcactggacagcaaacccttacgcaaatgcagagcaaactaggtttttctttgaagcaaagaaaacaggaatgggcggatatggttctgctcactacataatcgggcattaaagctaatctgaaaatccctcgtcagatgggttctctttacaccatttataagccttgtaagtaagaaaaaaggtaatcagcaaagataaaaatgtaatcatcttttgtctcctgcaattccaatcttaacgcatattcaaaaaaggacaactttaaaatggctgcgatatggcagatggtacgactgaagtagcaagaaaattggtggcatttttttgtgcgttggatgaagcaatgttgttcgtgtttggtaaaagtgaaaaattgatttctgtgcctaaaatgaccgatataaaatcgagctgtgtcggtttttgttatttatgctaatatcttggttatgtcagaaccgttttataaagatggactaaattttggatgcaagcgctgttctttttgctgcgggcattcgccaggatttgtttatctttcaaaaagagatttaaccgtgctttgcgatttttctaagatgaaagtcgaagcatttgtggctgtttattgccgatgggcaacttactattctggaaagcaggttttggctttaaaagaacaaaaaaattacgactgcataatgtggaaaaatggctgttcttgttatgaagcgcgccctgtgcaatgttcaacttggccgttctggtcgtggattgttgaatcaaaatacagttgggaagactgtgcaaaagattgtcctggaatgaataacggaaggctttggtcatttgaagaaatcgaaaaaaacagaaaagcctatgaacagaatactccaattacaaaagaagaagttttaatccttatcgaaaatgaaaaatcggtgaagaacaattaacgctaaatcaaacagacagtcaaattattgaagaatttaagcggtcaaaaatgtgcttaacaggtttaacaatgctaaatccttcgagattcgaccttgtgctgtgttttataaagcggtaattgctgctatcaagccgaaaataatgcctggaacatttgctgccgcaagtggataatcttttttgtcttttagaagcgcatataaaacccatatcgtgcagtttattgccgctgctaaaggctgaagaaaaatagttttatttccattcaaattattcataatctgcggaatataagatatgtacatggtaaccgatagcgcagttcctatccagccgagaatttttaatttattttcgctcattataaccccttgaaaatctacgatttttaatcaaaatttacaaatttatcccaactataatatatttaataagtattgttcaacactagttgttaaattcagtcgtaagatacatgcggaaagagcaacactgtgtgcctaaaacattcttttcaaaaggcaaaatctaagtgtaattttttattatttcttctgctatttgaagtcgtttttggcttttgtccatcgcttgtttttctatatagcgatgtgcttgctgttctgtaaatccgtctttttgcattaaaagcatttttgctctgtttacaagccttatctcttccattttttcttttaattttaccgtctggctcgaaagcaacttaactttgtattgaactgcaactgcgatttttatcatgttgtaaaaataaaagctgtcgaatgggctttttatcgtcaagatgccgtaaggttcgacagaataacttatttggtcaaaaatttgaactggagcgattaaaagaattgagcttgtgtgcgaagaaatgtcgattgcaaactctgttccgcttccatctaaaaattctacaattacgatgttaaaaactttttcggaacaaagtcgtcgtgcttcgttaaaatccgttgtttgaataacctcaaaagttggctgtacaaggattgaatgcataagagttgaattttttatgtctttagcaacaacaagaacgctgtatgtttcccaagtcattaaaattccttataaattaaaacctttaaaattttatatatctgcggataaattcacttttttctgcaatatcttttgcctggtcaagcgattgtggaatcgttttaaattttgcagtcctttttataaaagcttcatcgctttcgtttttgctttgaaaaagattttcttttacaggttctggtaatggatagttgttttctattccatctagagcggcatatattaaaagcgtaaatgccagatatatattgcaggtgctgtctggagaacgcagttgaattctctcgttttgattttttgacggtactcttataacgcaagaccgattttgaacgccccatgaaataatttttggcactgttggactttttatcctcgcatacgaattgtcggaactatttaaaaaatatgtcaattcgcttaaatgctctaaaattcctgcaagaatttgaggcattttttcggctctgttgacactgatgtttatgtgtaagccgttgcctggcttttttggtagcggttttggtgaaaaatctgcataaagcccatttgattctgcttttgtgcgcacaacccatttaaaagttgaagcgttatctgctgcggtttgtgcattcgatgagcgaaaatcaatttcgttttgaccaggccctgcttcgtgatgactcaattctggagtgattcccatctgttcgagcgtaaaatttatctcgcgccttatgttttcgcccttgtcatctggtgaaatatccatataacccgcatcatcaaaaggaactgatggatagctagcttcgttaaatctaaatagataaaattcaaattctgttccaaatttaaattcgagagaatattcttcttttgctttttttacggcttgttttaaaagatagcggcaatctttttcgtaaggctttccgtctggatattttatgtcgcaaaacattcgcacaactttgccagaagtcggtctccacggaattaaagaaagcgttgaagggtcaggatgcaaaaaaagatcagaagttgcagaatcctgaaaaccttcgattgcggaagcgtcaaaagaaattccttcgctaaacgctctctctaattctcctgccaaaatcgaaacatttttttgtttgccagaaaaatcgatatatgcaaggcgaataaattttacatcttcttcgtttatataatcgattacttcggattttgaatacatataaaacctctgcctttgaatcaagattcttctatattatataattatatataagttttataaaatgatgtacgtgttgtaaaattgcgatttagaattaagattttaaaattataaagaaatagattttaattttcaattttttatttttgtactttgtataaaaacttttataaaaatgtaatttgctgacaaaggttcaaaaaaacggttataatttgcgattatgagtgaacaaaaacaagaatttgataaaaatcaaaatgaagaaatctctttgatagatttgctttctgttcttttaaaacgcaaagttatgataataatcgttacgctttgctttattgctcttgctgttttaatctctataatttcgttaaaacttccaccagaaaaatcttttcttccaaatatgtatacttcatctgcatatatgcttataaatgatagcaattcttcttcgggaactctttcttccatgctaaattcttctgggcttggttcgcttgcaggacttgccggaataaataccggatcaagttcgtcttacagttctcttgcaggctatcttgtaaaatctaattcatttttggattctgtagttaaagattttgacatcctttctgataaaagatttaaaaaatcaaaatttccaaaatctgacagtcgagaatttgtaaagaagatgctttctgcggatatggataaagatacttctgtttttaaaatttcttgcaaaaatatagatcctgcttttgcaatgaaaattgtgaattatacagtcgattggctcagcaataaatttgatgagttaggtgttgataaaaataagattcaaaaagaaaatcttgaaaaaaacttggattcaagttatcaagaaattataaaattggaagacgaagttaaaaagcttgcaaattctacttcttacggcggatatggagttccatctgttgctttggcaagttcgaaaattcagcttgaactttctgctcaaagagaagtttacagacaattaaaaactcaatacgagcttttaaaagttcagatgcaaagcgaaacgccagtttttcaaattcttgaacgtccggaagtttcagacaaaaaatctgcaccttcgagaggaaaactctgcataataatgacttttgccggattctttatttccatttttatggcatttttattgaatgcgatagattctgtaaaaaacgataaagaagcaatgaaaaaacttagaggataaaatgaaaatcgaaaaatcaagaattatcgctagcttgttggcttatgtttttattttccagacgattgcttttcctgcgaatcgcattttgacttcacaggagaattctgaattcaatttaaggggcgataaaatcagcgataatgcaaagaattctaattcggataaaattaaatcttcaacttcgaatgaacgtgccactgctgtattaacgaaagattcagcttatatgaattctgcacttgcgatgtctgcaaaagattatcctgtaaccgcaggcgatttttataggcttgcctttgctgctggcacaacgccaatcgactatacgatttcggtggattcaacttatcaaataaaaattgcaaatcttgcaacgataaatgctgctggaaaaacttttgtggaattaaagcgccaagtggaatcgattgtaaaccgcaactatcctttaagcggagttcagtttgttcttataacgcctgccacttttaaggtaagcataaaaggagaagttatagaatcgacagaaaaacaagcatgggcactgtcgagactttcttcaataatagaagatgaacttaccgattattcttcaattcgtaacataaaaataatcgctagcgatggaaaggaaaaatcttgcgacctttttaaagcaaaacgagaaggcgatttttcgcaagatccatatttaagaccagacgacacaatcgtcataaatagaatttcaaaaaaagttcaaattacgggttctgtagagcgacctggaatatacgaattaaacgatgatgaaaattttcttgcattgataaaaacttatgcaaacggctttaaaattggagcgaataaaaattcaatcgagattacaagaaagaccgcagattcggtaattccagaagaaagaatttatttgagtaaagattatgagcaaaacgattttgctttgcagaactttgacaagatttatgttccagatagagatgagcgcagagcaatagtttatttagaaggcgctctatcgcaaaaaaaagatgaaaaagaaacaaacagcgtaattcccgacgaaacaggaattgtaaccttaacttttgacgaaggcgaaacttattcatcgttttttaggaaaaatagagaaattttttctaaatctgcagattttaaaaattgttacataattcgtggggacgaaaaaatagcaatcgacgcagaagattatatctataaggacaaagataaggacaacatcaaaatagtttcttacgataaagtaattgtcccatttagacagtattttgtaagcgtttctggagcagtgcattctccaggtcgttatccttatattccagatagaaatgtcagttattatattgggcttgcaggtggttttgacacttataaaaattcttgggattccgtagtttt

SEQ ID NO: 2973 - DNA, 22295 bp, synthetic construct
  source 1..22295: mol_type = other DNA
  misc_feature 1..22295: note = Synthetic
gaaagcgacattatcacgataaatccttacatgggttttgacacgctcaaaccttttacagaatattgcaaacctgttgaatcgagaggcacatcgcaaattgctccgcaaaaggttggaggtaaaggaatttttgtcttattgaggacttcaaatcctggtatggtggacatagaacagcaggaattaaaatctggcggacgggttttagattgtacaggtaaagaattgcaaaggattgccagagagtttgaccttttgtaccaaaaccaaacttgctctccagtgggggcggtggtcggttgtacacaagaaagcgatgcaaggcttttgcgagatgcgtatccaaacatcttctttttaattccaggttatggtgctcaaggtggagacgcaaaaattgctgcaacgctattagacaaagcaggcggtactgtaaactcaagtcgaggaatactttgtgcatggaaaaaaactccagaacttgcaaataaagttgaaagtggaaacctttgtttaaaagagattgcagatgcagcgggagctgcctgtgtaaatgcaaaaaaagatttgcttggtgcaaaaaaatctcttggtctttaatttaaagatttttatagaggaagtcagatgaaaaatgtaaaagattgttctggtaacgatttgccgttttttgcacttgcaagcgttttagacagttacgcacttcaaactgcctttcctaaaggaagcatttggtgtttaaaacttgcagtaaaaaatgaagaaaaacaaaattttggctgtcgtcccggtcaattttacatgcttcgctgtcataattcagccttattgcttgctcgtcctattagtgtttacgactgtaagaaaatttcagacaatgaaatcgctttagaatttttaatcttgttaaaagggcagggcacaaaggaactcgtatctgttaaaaaagacgataaaatagaaattttgggtccactcggaaactactggcaatctccagacgaaaatcaaaaagtagcattgataggtggcggggttggggttgctccagttgcagcttttgcttctaccttaaaagaaaaatcctacgatttttatgcggcatttaaaagcggagcttatggtcttgaaaacttaaaaccaaacaaactcaccgttacaaccgacgatggctctgttggaataaaaggaatgattaccgcagcgctcgatgtccaaactataaaaaattatgatgttgtttatgcatgtggaccaacaccaatgcttggtgcgattcaaaagttgtgtaaagaagcagatgtaaaattgtgggtcagcatggaaaaccgtatggcttgcggagtgggagcttgccttgggtgtaccatatttacaaaagaaggaaacaagcggtgttgcaaggacggtcctatttttgacggtcagataatagatttttcaaagattgattctcctattacatctcaaaaaatcgaaaaaagacttccattaaaagatgaaaccccggatttgacagtaaacatctgtggagtggaattttcaaatcctgtaattgcagccagtgggacttttggttatggcagtgaatattctagtgtaatcgatgtcgacggtttgggcggaatctgctctaaaggtcttacttttgaaggacagccgggaaataaaggaatccgtctgatagaaactgcgatggggcttataaactcgattggtcttgaaaacccgggaataaaacattttatcgaaaatgaacttcctataatgaaaaaattcaaggcaaaaacgatagtcaatttgagcggaaaatcgcttgaaacttatgtggaaggtgcaaaacttcttgagcagacagacattccaatgattgaacttaacataagttgcccaaatgtaaaggctggtggcatggcgtttggaatggactgccaggcggcaagcactgttgtaaaggcggttcgtagcgcaacaaaaaaacctttgatggtaaaactcagtccaaatgcaccagatttaatcggagttgcaatggctgtaaaagaagccggagcggatgcgatcagtttgataaatacgattcaagcaactgctatcgatatagaaactggcagaccctattttgaaaatatccgtgcgggttttagcggacctgcggttaagccaatcgctttacgcatggtgtacgatttgtgtcttgcaatgaacaaattggatgcgagtgagcgaattcctgttgttgggttgggcggaataacaacctggcaggatgcagttgagtttataatggcaggagcggctgctgtggaagtgggaacggcaactttttctaatccaaaagcgatgatagagatagtcgaaggtataaaaaaatttatggagagaaaaggctataaaactttggatgattttcgaggttgtgccttataaaaaacaattatggaaaacacagaattttacacaaagattgcaattttttttgacgcggaaaatttttcttcaaagtttgtgccaaaaacgctggcagaaataaacagacgcggaaatgtcgtaattcagcgcacctatgcggactggtcgagcgttaatgtaaaaagctggaaagactgcgtaaacaaatatccgctaacagcgattcaggtttttagggaaagcataaacgataaaaacgaccaaaaagaagctgtcgacaaacagattataatggatgcaattcagacggcagttcaaaatccagatatttctataatttgcattggagcgtcggacaagggctatattccgcttgcactaaaattgcgggaacttggaaaaaaagtaattggcgtgggcgaacgcggtaaggctcgagaaggctcaaaacttgtaaatgcgtgcaacgagtttttgtatgtggaagatttgcaggacatagacgaaaatattttaatcgatgtttctacagacgaagcaaagaatgcaggttcagaagcggaagcggacgaaaattctgcacttgcaaactattcgcttttaagatttttgaaccagtgttatgagcttactccaaaggtaaacagttacagcactggcgacggcaacggcgttgttttgcacagtcagtttatggaaactattttgaggcagcagccggactttaacgtaaaaacttacggttttaaatcttttaagaatttgctcgcttcttttagcgatgaatacgaagtttttgacgatggaaaaaggcctccaacttattatgcttaccgcaaagaaaatactgttaagcaggaaattagggaagggcacataaaacgaaagagcaatttttacggttttatagattccgaaggaaaggattattatttttactttggcgatgtaataaatttgccagaagataaaaaaattcaaggaaagccaaaagttcgttttgaagtcttaaaagaaccagatccaacggcagcgcttacaaaagaccgaaacggaatcgccgataaaatagaacttttaccttaaaacgattgtaccccagatgcgaaaggcgaagttgccaaaggcaatgagcgttagcgaacctgtagcagctggtagagaaaataaattgtggttctcctatttataaaattttgctcgtgtgctgttctaaaatgacattttacgataaagtgtcaaaataggagtttttaatgaacacacttgttgcactttgcgctgttggcgctgaaaaaatacttggaaatgagataaaacttctcggttataaacttttgtcaaacgcacctggaagagttttatttgagggcgatgatgactcactttttaggtcaaacctttgcttgcgcactgcggacagagtttatcttttgcttaagcgttatcgtgcagaggattttgaccaactttttgacggcgtatattcgatttcatggcaggatttttttaagaaagattccaaagttacggtggataaagttagaacttataaatccaaattgaattctgagcattcgattcaagggatggttcaaaaagcgatttacaaaaaactgtgcgaccgctggaatatgtcttctatgccagaaactgggaacgagagcgatgtgcgtgtttacctcgacaacgacgaagctttaattttattggacttgagcggaaatccactgcataaaagaggctacagaactgatggtggtgttgcacctttaagagaaacaactgctgcaataatgctacagatgatgatgtggaaaagaaagatccctttgcacgatccattttgcggttcgggcacgattccgattgaagcggctttgtacgcgtttaacattgcaccaggttttggaagaagatttgcgttggaaaatcttggaatttttaatcagcagcgtgcgatagaaataaaaaaattggaagcacagaaaatccgcacggatgtggaagttcgcataacaggcacggacattgaccggggggctgttgaaagagctcggttgaatgcagaacatgcctgtgttactgctggcagggcgttaaagtcgattggaattgatgcgcatgtttggcggccggattttcaggttagcgattttaaagaccttgccgccccttacgaaaacgggatgttaatctgcaatccgccttatggcgagcgtcttggagatgaagaagaagcgagcgcactttacgcaggaatgaaaagcctgtttgacgattttaaaggctggcagattggaattataaccgcacataaggaatttcaagaaagcataaatcgatacgctacaactttaaaaagtttaaagtctggaaatttagatacaactttttacatatatgacggctcggaaaaagagaaaaaacacaattctccaaaacgaaaaggaaacgatttttttaacgagagagagagtcatagaaaaagcgcttcaaaaacaccaaacgactttggcaaagcgagggagagcgttcgtaaagattcttacaaaaatcgagagaagaatgatgaaagggagtttttttgatggctattgttgttgagcacgaaaaacgcaagagagaaattttggaaaaagcgatggaacttttttgtcgcgacggctacgaagatgtaacttttcaaaaaattgcggatgcttgcggaattactcgtacgaccttatacatatattttaaaaacaaacacgagattttcaatttcagcataaagcaactttcttcaaatttggaagtaaagtttttgtcgcttgtaaaagatcattctataaaggcggaagactgtttgcgcaaaatcgttacgagtgctgtggatttgtgctatgaaaatcgttcgctttttgaggttttaattccttaccttacggggctttacaaaactggcgttgatgtttacgagcgtgttaggcgaagaacaataaagataaatcaccttttgagcatggttttaattagagggcaaaagaatggtgagtttaaaggatttagcgtaaaagcggcaaacgatttgttgtttggacttatcgttgaatcggtttttaaaatggcagttctgcacaataacgaagttgacaacgtaaaagcgagtttaaatcttgcaattgacggttttgtaaataagtgatttttaatcaatcctgcaaaatcgataattttgctaaaaatttaaactcctagaactaaagtcaaactcgttttcgggatgcgatgacgaaggaattataacggcagaatttggatcaactgcttgtacatcgccatttttgtctgtgtagtttattgtagttgtgaccgttgctttgtttgtccaatagtaatatttgtaaggatgacttcctgttgaaacaactctaggtgaaatagcacaaactcctgtaaatttgattttgcaatctaaaaattcttgagaaagctctttttgtaaatctataactgctgcggtatttgttgcagcttgtgctgctgttgcaagattaaaaggtctttcgttagttccgttggaaactaagacagaaagaagtgaaaaatttgcaggcagagttactgccgacgaaagttttatagtataagtgcctgttgcttcgtttattgtgcagtctgctgtaattgaggaaggaagatttgcttctgaagtagaaagtccctctaaaactttgttgtttggtaaagtgtacttgtatacagagccgttgtaatagcggattaaatatttataaaaaactcctgttgctgtgtgggaatctacaaactggtaggtggatgctaaattttctaaatcgttggggataacttgccctatatttgtttttgttgggttttcaaaatttgcagtggaagaagaaaggcggattatgtttgcatacttcatttttgcgattgaaggaaaagaaattgtaaaatcagaaaccgtaggttctggcaaatcttcgccttgagattcgcttattacgcatgaagaaataagtattgcactcaacgcaaaaatgcaaaaaaaagaaattgaaatccaagattttttcataaaaatttacctccgcatttttaaatacagcaaagcagaatattatcggcataaatgataataaactttattgaaatatgatgagcgatttttctttctgaaagttattttttttttgcaaaactgtagaagaatgtttgtaaccgcacgttcttgtgcgacaaatgcggcaagggtctacttgtagccccgctacccgcctgcgagcttacagcggcaagggataggtttcaagaaaaacgtccgtgtttttcttgaactgacagttttttgcaaaactgtaaaagaatgtttgtaaccgcacatcctgtgcggcaagggatagtaggggcggcgaagccgttggcggaacgccaatggagcgaatagcggaaccccgaatagcccgttttttgcgaaagcaaaaagccgcccgaaaaaaatctgtaaaaatataaaaatttttataaacacgtggaagtaaaaaaaaacaaattgtataatgctttcatatttttttatggagcgtttgacgtttgctttgcgcgttgaacctttgcatttggagtacaaaatgattggaactttttggtcgttggtgcctgcgattgttgcgattgctttggcgttgatttcaaaagaggtttattcttcgctttttgttggaattttgattggcggagttttttattctgggctttcgtttacaggattttttagccatgttgtaaacgacggttttattgctcaactttctaacagctggaatgtcgggattttagttttccttgttttgttgggagcgatggtttctttgatgaataaagctggcggttctgctgcttttggaaattgggcgcaaaaacacattaagacaaaggttggcgctcaacttgcaacaatctgtcttggaattttaatttttatcgatgactattttaactgtcttaccgttggctctgttatgaagcctgttacagacaaatacggtgtttccaaagaaaagctttcgtatttgatagattctactgcggcaccaatctgtataattgctccaatttcttcttgggcggctgctgttgccggctttgttagcgaaggcgaaaacggaattgcccttttttgtaaagcgattccattcaatttttatgcgctctttacaatcataatgatgtttaccctcgttcttatgagatttgaatatgggcctatgacaaaatttgaaaatccttttggagaaagccgaagttcagatgaaaaaacaacagccgaaaaagaagcagttggtaacggtggagttatagatttgattcttcctgttgccgtgctaatcgtaatgtgtgtattgggaatgatttattccggcggtttttttgctgcaactattcctggtaaagttgaaggagagatggttgcaaatcctgcctatttaaattttatagaagcatttgcttcttctgatgcatctgtaggtttggttttgggtgcgcttgccgctttgattataacttttgttgtttatatgtcgcgcggagttttaaaatttaaggaatttatgtcttgcattccagacggttttaaatctatggttcccgcaatattgattttgactttggcttggactttaaaaggtatgacagacagtcttggcgctgcaagttatgtagcagggcttgtttctaggagcgcaggagcgtttaagatgttcttgccagctatagtctttatagttgctattttcttggcgttttctacaggaacttcttggggaacttttggaattttgattcctatttgtattgcagccttccccgatccttcagaccctataagagtaatttctatttctgcatgtatggcaggtgcagtttgtggagatcacacttctccaataagcgacactactataatggcgagtgcaggcgcaggatgtaatcacgtaaatcacgtaaatacacagatttattacgcaatgacggttgccacaatttcgtttgtttcttacatagttgcaggctgtacacattctttgggacttttggtaagcggaatcatatctttttctgttggaattgtttcgctctttacaactttgattgtcttaaaaaaattgttaaaaaagaggacaaacttggaaagaaatttgtagttaaaatataaaagcaatttgccgaaagaggctcctttggagttgaacgatttgagtgcaattttgaaggggctttttttttattgtgcgaaatgggagaggtagcggaatataggcaagtgcttttttatgaaaaataaaaggtttaaaagcaaaaaggaagccgtagcttcctcttttcattttggtctatttacatttaataaaaatgtaaaagcattttgcgaggtcataagacctcttgttagcaggttgatcagaaaaattaatcagtaagataaatatagtctagttttttttaattgtcaaattgagctcctgtgttatatttaaataacgtaatttaataattttggagtttttttatgaattggcgtcttgggcttgatttaggtacaaattcaattggatggagtgttatctctcttgatagcgaaaaaaatgtaaacagtcttatagatttgggagttcgcattttttctgatggtagaaatcaaaaaacaaaagaacctttagcggtagcaaggcgtattgctcgcggagcaaggaaaagcattcataggcgaaaaattaggcgacgtaaaacttttaaattattgcaaaaagagggattatttcctttaacgaaagaagaggcacaggctttaaaattaaaaaatccatatgaacttcgaattgatgctttagagcgaaaattagaaccttttgaattaggtcgagttctttttaacctttctgttcgccgcggatttaaaagcaatcgaaaggataataatcaagaagagacaaaagatactgtatctgcaaataaaactaaatattcacagacagaaatgtgttcaaatcttgaaaacgccgtaaaaaattcaggatatagaactttgggcgagtttttgtggaaaatgcaaaaagaaaatcacggaattagattcgctccaaatagaaatgtattttatcccacaagaaaactctatgagcaagaatttagtttgataagggaaaaacagtccgaattttatccgaatgtcgattgggatgcgatttatcaggaaattttttatcaaagacctttaaaagcacaaccgcgtggaaaatgtcagtttatgcgagataaagatagaacttataaagcacttccttgttcgcaaaaaattaggattttgcaagaagttcgaaatcttaaatatatcgatgaatcaaaaaaaacttgtccaatttctgaagaaggagaagcgataataatcggtcttctaaatacaaaaaaagatgtaacttttgatgccatgcaaaaagcgcaaaaactttcaaacgaatgtatttttaattaagaaaaaaaacgcaaaagtcttaaagaaaattctaccgccgttattatgcgaaacaaaaatcgttttggtgaactttgggataaactaacccttgaagaccaagacgaaatagttgaaacgatgattactgccgatgaagattctcaagtttttgaaatattaaaaaaatatgaattgagcgatgaacaaaaggactctattgtaaaaactgttttaccatcaggaactacaatgctatgtaaagaagttactcaagcgttagtaaaaaagatggaaaacattggcagtggttgcgatttggtaacggcagaaaaaatgttgggatttaaacatgcagatcagagcgtaccaaaaaccgatttgcttgaatattatggtaagattcttgtggggtcgacagttggaggcgacttaaccgagccagagtccaacccggaaaaaagatatggaaaaattagcaatcctacagtgcacatcgcattgaaccaaactagaacggttgttaatgctcttataaaacgatatggaaaacctgaacagattgccgtagaactttctagggatttaaaagccagtcgtgaagcaaaaaggaaaacactgcaaaaacaggagaaacaacgaaaggctaatattcaacttaatgccgacttaacaaatatttggaaaatcaattatcctaatagaaccgaccgattaaagtataggctttggaaagaacttgaccatcttgggcacaaatgtatttattgcggtaaagagctctatacaaatgaactttttacaaacaatattcagattgagcatatcttgccttatagcagaactttgttagataaagaatcaaaccttactcttgctcacgctagttgtaataaagacaaaggcgagcgctcgccgtttgaagccttcggtgcaaatccaaaaggatataattgggcagaaataaaatatcgctcggagatgttaaatgaggcttcaaaaagaaacaaatttgctgtagatgcgatggaagcttttgaaaaggatagcggattcatcgctcgacaacttaccgataatgcttatctttcaaaaattgcatacaagtatttgcatagcatctgcgacaatgtgtggactgtaaacggtggaatgacaaagttgttgcgcgataagtgggatatcgattccgtgcttgcgcgaaaattcgatgaggatactgttgtaaaacttggacttaccagcgaacagattggcgaatataagaaaaatcgtagggatcatcgtcatcatgcaatggatgcggttttgattgcgttgacagatcgttcacttgtaaaagagatttctactatgaatgctcgttcaatgaagaatagaattgaagttccgccgtttccaatatatagacaggaatttgttgataaggtaaaaaatatagttataagttttaaacctgaacacggcgccgagggcaaactttcagaagaaactccgcttggaaaaattaaacgcgaagaaagaatcgatataaaaaatcttacatgcgatgatattcaatttattaaaacagaacgcgtaaaaactgaaatatcaaaatgctttgaagaaacaaaagatataaaagcggtgcaaaagcagtttaaagatatatatccacaaatcattgtttttaaagaaatctttgttgttagaaagaatcttgcaagtttagaatctgacaaaaatctaaaatccattgttgatcgtaaaataagagaaaaaataagtgcctttgttgaaaatcacaaagatatgaaatttaacgaggcgattttagaatattctaagcaaactggaatcaaaaaagtcagatgtgtgaatcacgatcaaattgcgatagaaatcaataattctgaagttccacgttatctagctccaaatgattactttgcggcagtagtttggaaaattcctcctaaaaaggatggtggaaaagaaaaatttgaagctcaatttataagacgccatcagattgacaaaggcaataaactcaaggatggtgtcttaagacctcctcatcctgctgcccaaaatattggcacgatttttaaagatgattatttggaatttttatttgaaggaaaatggtacaaatgtcgtgtcgctggatattctgcaacggcgaactgttttgacataagaccaatttatgcggttactgattgcaaagactggctttattcaacgaatgaaacgatgatagaaaattgctggaaacctcaatccggacataacttcatctccgtcaatgttctatttggggagaggcaggcacattctattacagtaaatcctataggacgagtttttagaaaatgatggcaaaattcagcatatctgccgataaaaaggtatgctgaatagagttttagagataaatgatgaaaaccgttatctttctctaaaccgtggctttatcgttgtaaaagagaaggataaagaattaggttctgttcccctagacgatatagccgtgatgattatttctgcgcagagtgctatttttacaaaaaatgtgataaatgccttggctgagcatggcggaatcacgatactctgtgggaaaaattacattccagaaagttatattcttccgtttgctgaccattatctttttacaaaaaatcttaaaaatcaaatagctgcttccgttccttttaaaaagagaatttggcaacaggtgataataaaaaaaattcaaaatcaagcacaagcacttattttttgtgggaaaattgaagaagcacaaaaaataaagaaaatatcatttcttgtaaaatctggagactgcgataatcgcgaagctcatgctgcaaaaaactattggaagtatctttttggtaaaaattttacaagggatagatttcagtctggtataaatgcctttttgaattacggatatgcagttatgcgagcggcaatgtgcagagcgatttgtagtaatggattgttaccttcattaggtatttatcatgaaaataatcttaatcagttctgccttgctgatgatttattcgaaatatacagacctattatagattgccttgtttataaattgaatgaaaaaggcgaaaaagaacttacaccagaaattaaaaaactttttgccaatacacttaaaataaaagttcatacatctgaaggggattcgcaagcttgccagagtatgcaatatctagtggcttcttatgttcatgcattagaagaagggaaacctgttattgaactgccagaatgggagaacaatttaaatggaattaccattattgagtaggtatgagcttatgtggattttagttttttttgatttacctgttgttgaaaaatctgatcaaaaggcagcgactgcttttagaaattttttattagataacggattttccatggttcaatattcaatttatacaaaactattttctggaaaggatgcctgtgaaaaatactataaaatgatacaaaaaaacttgcctgcgcagggaaaagtggatattctaacgataacggatcatcaatatggaaatattatcagttatcattcaagagaaaaacaacaaaaaaagcagaacgaacaactccttttattctgataagcacacaaaaaaaatccgcctgatgcactgtatttctatgcaaaaaaagaaaatacatcagacggattttaactgattaatttttctggtcaacctgcaacttttcgattttagataccttttttgatactattttaactgattaatttttctggtcaacctgcaacggaaatggaaaagactatccaaaaatttgtattttaactgattaatttttctggtcaacctgcaacttttctattttatataccttttttgatacattttaactgattaatttttctggtcaacctgcaacaaaaaaatggataccttttttatgaaaaaaattttaactgattaatttttctggtcaacctgcaaccgtggcgatttgcagttgcgtatagaattcattttaactgattaatttttctggtcaacctgcaacccttaaattattttaatgtcttatatatatattttaactgattaatttttctggtcaacctgcaacggtcttgataaagaagcgatcgaagatgttattttaactgattaatttttctggtcaacctgcaacaagcaaagagtagtaaacctgctcccatcaattttaactgattaatttttctggtcaacctgcaactaaaaacatcgcttcaaaagatactttaaaattttaactgattaatttttctggtcaacctgcaacaaagtaaaaagattaaccaacccagcagcaattttaactgattaatttttctggtcaacctgcaacagactttaattttccagcctaagccttacattttaactgattaatttttctggtcaacctgcaacttgaagaaggcatttatccagtaggaacgcattttaactgattaatttttctggtcaacctgcaacacggcgatagaacggtagttgtacaaaatattttaactgattaatttttctggtcaacctgcaacaaaaagttgacatttttatttataatctgtattttaactgattaatttttctggtcaacctgcaacagttatgcaacacgagtttgagccgggtaaattttaactgattaatttttctggtcaacctgcaacagaatggttcaagatgacaatgcaacttatattttaactgattaatttttctggtcaacttaaaatattttatcctcacatcgataaaccaaacggcagcaaaccagacattgaacaatgcagacgaattaggagttgaaaagtttgaagtttctgttcatatcggctcaagaccagaacacgaagaatggcaagggaagattttcacaaagaaaggattgtacagcatttgcggactcggaagtgctacaggaatatgtggaataaactgccgccattcattttatccctactttgagggaacaaaagagcattacagccaagacgatttagacagtttagcaaacgaaaaagtagagtttaacggcgagagcctgacgcgttacgagggagaacaacacctaagaggcatagaacgaaacataaggcgatataaacggcaagcattaacacaggaagcggcaggagtagacaacacaagagcaaggcagaaaataggcgaatggcaggcagccgcacgagattttacaaagcagacaggaataacacgagacagtgcaagggaatatgtaggaacaagcggaaaacagcttagaggaatatctgtatcagttgcagggttctcagataacctaaaaaaagcacaggatataaagcgtcttgataatgcgagaaataaagttattgcagacacacaacagggaaagcctatgaactttcggcagacggacggtggttctcctaatccgaactacaaaaaaggtggtggatatgctaagaattgtcagacttgtgttgtcgcctatgaactgcggcgcaggggctacgatgtagaagcattaccaaattacaaaggttctatgcttgacgtattgtcgtatagaactaatatcgcatgggtaaacagataaactggtaaaaatcccgattatattaaaccagagggaaacaccttaaataaggtttttgaatggttgagaaacaatttaaaacctaataatcgatatacaatagagtggcaatggactgcaaaatcatcaggtcatataatccattgttttaaaaataaaaataataaggtttctttttatgatccacaaaaaggcattaacaatcgttttgaagacgatataaataagtattttgaaaatgctattataaagtcttttaaactgctagatgtccaaaattgtgatataaatatgaatgtagtaaacaaaattttaaagaaaaaggaacattaaatgacagcggtagaatttttaaaatccgaattctccccttttgacgatgtgaaattagtttgcattgattggttaggttataaagtttatgaaccgataatgaaagacggctcttgtccttgcgtagggttaccatattttatacttgaaaaggaagataaactacgctggacagatgataaagaatgttttgaagtccttaattttgtctatcctaaaacaaatgaagattaaacatattaaaaaataacttctttttcccttcctaaaaaacaagagaaaattccccccccctatttttcccctaacttccctaatcttttcttttcctcaaatgactatataggtagaggaaaaagcaatgtcaattacagcaataataacggtaggaatatccatatcaacattcctgctgggcataatctacaaattgggagatttgtctatgaaattcgggcgaataacaaagactattgaatcgaacgatgagagagacgcagaagagcgacgtaaaaacgctgcgaagttttcagaactttttaatgacagaaacaggcacgaatcagccataactcgccttgataccacgatgaacaatatcgatgcaaaacttgaaaaaatggatgcgaaactcgacaggctaattgacgggggtaagtaatgaaaatcacgcaaaggcttttaacaccaaacgaatacagccgaccgcaaaaaccaataaaagaacttttagggattgtaattcactggacggcaaacccttacgcaaatgcagagcaaactaggtttttctttgaagcaaagaaaacaggaatgggcggatatggttctgctcactacataatcgggcaaaacggtgaaattattcaatgcatacccacaaatgaaatcgcctaccactgcggaacaaaccaaaaagaccctaaaagcaatcagtttaaaaaaatgtataggattgtttagccgttcgctttaatctgaaaatcctttgtccgatggatgttttttacaccatttataagccttgtaagtaagaaaaaaggtaatcatcaaagataaaaatgtaatcatcttttgtctcctgcaaatccactcttaatgcatattcaaaaaaggacaactttaaaatggctgcgatatggcagatggtacgactgaagtagcaagaaaattggtggcatttttttgtgcgttgggtgaagcaatgttgttcgtgtttggaaaaagtgaaaaattgatttctgtacctaaaatgaccgatataaaatcgagctgtgtcggtttttgttatttatgctaatatcttggttatgtcagaaccgttttataaagatggactaaattttggatgcaagcgctgttctttttgctgtgggcattcgccaggatttgtttatctttcaaaaagagatttaaccgtgctttgcgatttttctaagatgaaagtcgaagcatttgtggctgtttattgccgatgggcaacttactattctggaaagcaggttttggctttaaaagaacaaaaaaattacgactgcataatgtggaaaaatggctgttcttgttatgaagcgcgccctgtgcagtgttcaacttggccgttctggtcgtggattgttgaatcaaaatacagttgggaagactgtgcaaaagattgtcctggaatgaataacggaaggctttggtcatttgaagaaatcgaaaaaaacagaaaagcctatgaacagaacactccaattacaaaagaagaagttttaatccttatcgaaaatgaaaaatcggtgaagaacaattaacgctaaatcaaacagatagtcaaattattgaagaatttaagcggtcaaaaatgtgcttaacaggtttaacaatgctaaatccttcgagattcgaccttgtgctgtgttttataaagcggtaattgctgctatcaagccgaaaataacgcctggagcatttgctgccgcaagtggataatcctttttgtcttttagaagcgcatataaaacccatatcgtgcagtttattgccgctgctaaaggctgaagaaaaatagttttatttccattcaaattattcataatctgcggaatataagatatgtacatggtaaccgatagcgcagttcctatccagccgagaatttttaatttattttcgctcattataaccccttaaaaatctacgatttttaatcaaaatttacaaatttatcccaactataatatatttaataagtatagttcaacactagttgttaaattcagtcgtaagatatatgcggaaagagcaacactgtgtgcctaaaacattcttttcaaaaggcaaaatctaagtgtaattttttattattgcttctgctatttgaagtcgtttttggcttttgtccatcgcttgtttttctatatagcgatgtgcttgctgttctgtaaatccgtctttttgcattaaaagcatttttgctctgtttacaagccttatctcttccattttctcttttaattttatcgtctggctcgaaagcaacttaactttgtattgaactgcaactgcgatttttatcatgttgtaaaaataaaagctgtcgaatgggctttttatcgtcaagatgccgtaaggttcgacagaataacttatttggtcaaaaatttggactggagcgattaaaagaattgagcttgtgtgcgaagaaatgtcgattgcaaactctgttccgcttccatctaaaaattctacaattacgatgttaaaaactctttcggaacaaagtcgtcgtgcttcgttaaaatccgttgtttgaataacctcaaaagttggctgtacaaggattgaatgcataagagttgaattttttatgtctttagcaacaacaagaacgctgtatgtttcccaagtcattaaaattccttataaattaaaacctttaaaattttatatatctgcggataaattcacttttttttgcaatatcttttgcctggtcaagcgattgtggaatcgttttaaattttgcagtcctttttataaaagcttcatagctttcgtttttgctttggaaaagattttcttttacaggttctggtaacggatagtcgttttctattccatctagagcggcatatattaaaagcgtgaatgccagatatatattgcaggtgctatctggagaacgcagttgaattctctcgttttgattttttgacggtactcttataacgcaagaacgattttgaacgccccatgaaataatttttggcacttttggactttttatcctcgcatacgaattgtcggaactatttaaaaaatatgtcaattcgcttaaatgctctaaaattcctgcaagaatttgaggcattttttcggctctgttgacactgatgtttatgtgtaagccgttgcctggcttttttggtagcggttttggcgaaaaatctgcataaagcccatttgattctgcttttgtgcgcacaacccatttaaaagttgaagcgttatctgctgcggtttgagcatccgatgagcgaaaatcaatttcattttggccaggccctgcttcgtgatggctcaattctggagtgattcccatctgttcgagcgtaaaatttatctcgcgccttatgttttcgcccttgtcatctggtgaaatatccatataacccgcatcatcaaaaggaactgatggatagctagcttcgttaaatctaaatagataaaattcaaattctgttccaaatttaaattcgagagaatattcttcttttgctttttttacggcttgttttaaaagataacggcaatctttttcgtaaggctttccgtttggatattttatatcgcaaaacattcgcacaactttgccagaagtcggtctccacggaattaaagaaagcgttgaagggtcaggatgcaaaaaaagatcagaagttgcagaatcctgaaaaccttcgattgcggaagcatcaaaagaaattccttcgttaaatgctctctctaattctcctgctaaaattgaaacatttttttgtttgccagaaaaatcgatatatgcaaggcgaataaattttacatcttcttcgtttatataatcgattacttcggattttgaatacatataaaacctctgcctttgaatcaagattcttctatattatataattatatataagttttataaaatgatgtacgtgttgtaaaattgcgatttagaattaagattttaaaattataaagaaatagattttaattttcaattttttgtactttgtataaaaacttttataaaaatgtaatttgctgacaaaggttcaaaaaaacggttataatttgcgattatgagtgaacaaaaacaagaatttgataaaaatcaaaatgaagaaatctctttgatagatttgctttctgttcttttaaaacgcaaagttatgataataatcgttacgctttgctttattgctcttgctgttttaatctctataatttcgttaaaacttccaccagaaaaatcttttcttccaaatatgtatacttcatctgcatatatgcttataaatgatagcaattcttcttcgggaactctttcttccatgctaaattcttctgggcttggttcgcttgcaggacttgccggaataaatacaggatcaagttcgtcttacagttcgcttgcaggctatcttgtaaaatctaattcatttttggattctgtggttaaagattttgacatcctttctgataaaagatttacaaaatcaaaatttccaaaatctgacagtcgagaatttgtaaagaagatgctttctgcggatatggataaagatacttctgtttttaaaatttcttgcaaaaatatcgaccctgcttttgcaatgaaaattgttaattatacagttgattggctcagcaataaatttgatgagttgggagttgataaaaataaaattcaaaaagaaaatcttgaaaaaaacttggattcaagttatcaagaaattataaaattggaagacgaagttaaaaagcttgcaaattctacttcttacggcggatatggagttccatctgtcgctttggcaagttcaaaaattcagcttgaactttctgctcaaagagaagtttacagacaattaaaaacgcaatatgaacttttaaaagtccagatgcaaagcgaaactccagtctttcaaattcttgaacgtccggaagttccagacaaaaaatctgcaccttcgagaggaaaactctgcataataatgacttttgccggattctttatttccatttttatggcatttttattgaatgcgatagagtctgtaaaaaacgataaagaagcaatgaaaaaacttagaggataaaatgaaaatcgaaaaatcaagaattatcgctagcttgttggcttatgtttttattttccagacgattgcttttcctgcgaatcgcattttgacttcacaggagaattctgaattcaatttaaggggcgataaaatcagcgataatgcaaagaattctaattcggataaaattaaatcttcaacttcgaatgaacgtgccactgctgtattgacaaaagattcagcttatatgaattctgcacttgcgatgtctgcaaaagattatcctgtaaccgcaggcgatttttataggcttgcctttgctgctggcacaacgccaatcgactatacgatttcggtggattcaacttatcaaataaaaattgcaaatcttgcaacgataaatgctgctggaaaaacttttgtggaattaaagcgccaagtagaatcgattgtaaaccgcaactatcctttaagcggagttcagtttgttcttataacgcctgccacttttaaggtaagcataaaaggagaagttatagaatcgacagaaaaacaagcatgggcactgtcgagactttcttcaataatagaagatgaacttaccgattattcttcaattcgtaacataaaaataatcgctagcgatggaaaggaaaaaatttgcgacctttttaaagcaaaacgggaaggcgattttttgcaagatccatatttaagaccagacgacacaatcgtcataaatagaatttcaaaaaaagttcaaattacgggttctgtagagcgacctggaatatacgaattaaacgatgatgaaaattttcttgcattgataaaaacttatgcaaacggctttaaaattggagcgaataaaaattcaatcgagattacaagaaagaccgcagattcggtaattccagaagaaagaatttatttgagtaaagattatgagcaaaacgattttgctttgcagaactttgacaagatttatgttccagatagagatgagcgtagagcaatagtttatttagaaggcgctatatcgcaaaaaaaagatgaaaaagaaa

SEQ ID NO: 2974 - DNA, 9061 bp, synthetic construct; identical to SEQ ID NO: 832
  variation 4746: note = note, n is a, c, g, or t
  variation 4421: note = note, n is a, c, g, or t
  variation 5349: note = note, n is a, c, g, or t
  variation 4620: note = note, n is a, c, g, or t
  variation 4480..4481: note = note, n is a, c, g, or t
  variation 1..9061: note = note, n is a, c, g, or t
  variation 4509: note = note, n is a, c, g, or t
  variation 4440: note = note, n is a, c, g, or t
  variation 4073: note = note, n is a, c, g, or t
  variation 4113: note = note, n is a, c, g, or t
  variation 4804: note = note, n is a, c, g, or t
  variation 5670: note = note, n is a, c, g, or t
  variation 4389: note = note, n is a, c, g, or t
  variation 3992: note = note, n is a, c, g, or t
  variation 5707: note = note, n is a, c, g, or t
  variation 4020: note = note, n is a, c, g, or t
  variation 4457: note = note, n is a, c, g, or t
  variation 4434: note = note, n is a, c, g, or t
  variation 4043..4044: note = note, n is a, c, g, or t
  variation 4460: note = note, n is a, c, g, or t
  variation 4527: note = note, n is a, c, g, or t
  variation 4494: note = note, n is a, c, g, or t
  variation 4424: note = note, n is a, c, g, or t
  variation 4407: note = note, n is a, c, g, or t
  variation 4521: note = note, n is a, c, g, or t
  variation 4656: note = note, n is a, c, g, or t
  variation 4652: note = note, n is a, c, g, or t
  variation 5922: note = note, n is a, c, g, or t
  variation 4385: note = note, n is a, c, g, or t
  variation 4488: note = note, n is a, c, g, or t
  source 1..9061: mol_type = other DNA
  variation 5693: note = note, n is a, c, g, or t
  variation 5844: note = note, n is a, c, g, or t
  variation 4016: note = note, n is a, c, g, or t
  variation 5703: note = note, n is a, c, g, or t
  variation 4034: note = note, n is a, c, g, or t
  variation 4071: note = note, n is a, c, g, or t
  variation 4648: note = note, n is a, c, g, or t
  variation 4475: note = note, n is a, c, g, or t
  variation 4011: note = note, n is a, c, g, or t
  variation 4041: note = note, n is a, c, g, or t
  variation 4052..4054: note = note, n is a, c, g, or t
  variation 4118: note = note, n is a, c, g, or t
  variation 5979: note = note, n is a, c, g, or t
  variation 4503: note = note, n is a, c, g, or t
  variation 4686: note = note, n is a, c, g, or t
  variation 4642: note = note, n is a, c, g, or t
  variation 4740: note = note, n is a, c, g, or t
  variation 4391: note = note, n is a, c, g, or t
  variation 4024..4025: note = note, n is a, c, g, or t
  variation 4454: note = note, n is a, c, g, or t
  variation 4013: note = note, n is a, c, g, or t
  variation 5973: note = note, n is a, c, g, or t
  variation 4427: note = note, n is a, c, g, or t
  variation 4400: note = note, n is a, c, g, or t
  variation 4662: note = note, n is a, c, g, or t
  variation 5955: note = note, n is a, c, g, or t
  variation 4722: note = note, n is a, c, g, or t
  variation 5448: note = note, n is a, c, g, or t
  variation 5766: note = note, n is a, c, g, or t
  variation 5453: note = note, n is a, c, g, or t
  variation 4144: note = note, n is a, c, g, or t
  variation 4001: note = note, n is a, c, g, or t
  variation 5838: note = note, n is a, c, g, or t
  variation 4530: note = note, n is a, c, g, or t
  variation 4448: note = note, n is a, c, g, or t
  variation 4031: note = note, n is a, c, g, or t
  variation 5756: note = note, n is a, c, g, or t
  variation 4485..4486: note = note, n is a, c, g, or t
  variation 5806: note = note, n is a, c, g, or t
  variation 3997..3998: note = note, n is a, c, g, or t

SEQ ID NO: 2975 - DNA, 3868 bp, synthetic construct
  misc_feature 1..3868: note = Synthetic
  source 1..3868: mol_type = other DNA
gtctggtcaaagttcatggatgtttgggacatacttcctccaacaaatcaacaggacaatggttgacattttatataactgttatactataaagccatgcggtacgaatacgaccccaacaaaagccatgccaacaagatcaagcacggcattgactttgaagaggcacaagccctgtggctggataaaaaagaaagattgaattacgcaaaattgccgccagaattgcaaatgcacaacaataaaaaatttgtcaattttgataagtcatgatacaatttctttgaaactaaaaatcgagaggaataaaatgaattggcgactgggactcgaccttggaacaaattcaattggatgggctgtcataaaacttgataaagacgaaccaactgatattcatgatttaggcgtgcgccttttttccgatggacgggaaccggcaggagaaggacgcatcggagaatctttggctgttgcacgaagaacagcgcgaggaatcaggaaaaacttacgcaggagaaaattgcggaagcgggaactgttgaaacagcttattgccgacaatcttttcccaacagatagagagaaacgggaaatacttaaatcccttaacccttatgagttaagaacaaaagctctggataagaaactaaagtccgaagaattaggacgggcattgttccatcttggtgtgagacgaggctttaaaagcaacagaaaagatgttaccgcagatatagacaccaacacaaaaaaagaacaggaaggaaatgccgctaaaactaataatctttccacaaagatgaaggaaacaggcgcaagaacattgggagaatttttgtataacttgtacatcaaagaaaaagctaataatgataaaaagaatcttttcggttctgccgctcattcaaaacagcttatcagatttactcccggcaacgcggattattatcctatacggaaaatgtacgaagatgaatttgacgctatccgaaaaaagcaagaatcattttatccgaatattcattgggataaaataagagaaatcatcataagtcaacggcctttgaagaaacaggaacgagggagatgtcaattcataccggataaagaaagagcttttaaagcgctgccttctcttcatcattttagaatgctgcaagaaataaacaacctcgttatgtatgatgaaaaaaataatccggttcagctcacaacagaagaaaaggaaatactctttgagcttttggattcaaaaaaagaagtgaagtttgataagatgcgaaaaaagttaaaaaacaattatcgtttcaatcttgaatcggaattacgcaaagatttaaaaggcaatgaaacagcccgtgccatgcgtcaggaaaaatgttttggaattctctgggataaaattaatataacggaacaagacaacatcatcgaacttcttattgatgctgagtccgatgaagaaattctgcctgcattggaaagatatcatcttagtgaagaacagaaaaagaatattttgaaatgtcaattttccggcggaaccgcttctgtgtgtaaggaatttgctcagaaaattaatcctgaaatgcatacatggattttgtatcacgaagctgtaaaaaaattagggttcgatcattcagaagaaaccgtcgaaaagtcggacctgcttccatactacggaaaagtgttgataggttcgaccattggcggcggaaaaagtgatgatgaaaaagaaccggagaaaaaattcggcagaatcggaaatccaactgttcatgttgctttgaatcaagttaagacagtcgtaaattgtttgataaaacaatacggcaaaccaacgcaaattgttgttgaagtctccagagatttaaaagcaagccgtgaagataaaaatgcaatgtataaaaagcaaactgaaaacgcaaaaatcaatgaacgtatcaataaaaatataaaagaccataatcctcatattccttatcccaatagagccgaccgtttaaaatatcggctttggatagaattgggcgcagagcagttaagcagacgatgcatctactgcggaaatgtaattggggcgagtgaagttttttcatctcatattgaaattgaacacattttaccctacagccgaacgcttatgaacggcgaaggaaatttaacgcttgcccataaaaactgtaatgccgcaaaaggagaacgttccccttgggaagcctttggttccaatccgaaaggttttaattggagcgatatttgctcgcgcatagaagttcttccaaaatcaaaacagcggaaatttgctgtagatgctatgcaaaatattgaagaaggttttattgaccggcagcttacggacaatgcgtatctgtcaaaaataagccggaaatatttgaaagctgtttgtgataatgtatgggttgtaacaggacaagcaacaaaaattctccgtgaccgttggtgcattgatgaaatacttaaaagaaaaatcacggacaaagagattgctcatttcggacttgatgcaaagatgattggacagtataaaaaaaatcgttttgatcatcggcatcatgctcttgatgcggtagtgatcggctttaccgaccgaagtatgattcaagaaatatccagaaaaaatgctatgagaaagaaatcccagattgaagttcctgaccggccctttacacacattgaattgattgaaaaagtaaaaaagattgttccttcttttaaacctgatcatgggccggaaggaaaactttccaaagaaaccgctctgggaaaaatcaaacaggaaagagaaattcctatcaaagaacttaaagaaggaatgattcgcttgataaaatcggataaagtccgttcggattttgaaactgaatgtgctaacagcaattttaaagacgcagtcaaaaaactgaaagatatttatcctagcatcaaaatctatgatgagatttttgtcagcagaacggcacttgtatcattaaagaaacgggaaaatgtaaaagatattgttgatgaaaaaattcaaaagatgatttatgcatatttggataaaaatccagatggcgattttgaaaagctattggaatcgttttctcaagaaacaggaattaaaagagtacgatgtaaaaccaaagatcaatctccaatagtaattgaaaaaaatactgacaacaatcctcgcactcgctctgtccataggactttgggcgcagacccgcgacaccatgtttatccataccggcgaaagccagtcggaatttctaatcaaagatgtcgatagcatcattttctatcgtgctccacaaagcacactcccaacagccgttggaagtgttgaattagaccatgttaacgtggttatggcagttggacaaacttttcaactgcaacaaaccgttttgccacctcatgccgttaacaaaaatgtggcttggttcagcagcagtccaaacgtggcaacaatcagctctatgggcttgattaccgctgtggcagagggcgatgcagtgattacggtagttacgcacgatggcgaccacaccgctacaagtgcagtgaaagtaatgatttccatcgttcctgcaacaggtatccacctcgacaaagaaacggatgaaacctgggtgagaggaaccgtgcaactctctgtcgtttttgaaccggaagaagcttccaacaagaacgtaatgtggagctccaataacgaaaatgtagcaaaagtagatgtaagcggcttggttacaggcgtttccgttggaacagcaacaatcaccgcagttgcacaaagcagtagcgatctaaccgcttcgtgtgtggtaaatgtagtgaatatccccgcaacagacgt

SEQ ID NO: 2976 - DNA, 24314 bp, synthetic construct
  misc_feature 1..24314: note = Synthetic
  source 1..24314: mol_type = other DNA
agtttgaagctcaggaaaaagtgattcgtgacgctgctgccgagttgtttgaaagagaaggaatggaaattccgttcaaggtaggtaccatgattgagattcctcgtgccgcgctgacagccaaccgcattgccagccgtgcagaatacttctcatttggtacaaatgaccttacccaaatgactttcggttactctcgtgatgacatcgcttcattcttaccggtatatcttgaaaagaagattctgagtgtggatcctttccaggttcttgaccaaaacggcgtgggacaacttattgaaatagcaataaaacgtggtcgcgcagtacgtcccgaacttaaatgtggtatttgtggtgagcacggtggagaaccttcatcggttaaattctgccacaaggctggtttgaactatgtttcctgttctccgttccgcgtgcccatagcgcgtcttgctgctgcgcaggctgctgtagaggaataaagtaaatattccatataacaacttaggctgtagttctctgaataatcagggacttcagcctaagttgtttttatatgtctattcttttgattgtactttacgcgtctttaattagtttactcaagtgatgttcgtatattaatcacaaagttttgcgtaaagtttatttctgtctcaaaggaaaacaaacaaaactgtttgaaagtagttgtcgcaaaaaagtttaatcaaataattgcgaaacacgcagatatgaaatgaataaggctatttagtcaccaaaagtggttatcagtaactttttgctgggtgagaactatgtagtttcgcgggttatttgcgtgatttggattttcggttttgggaaatggtttggaagttttcaagagcccagcgtatgaggcttccgagatggggcatgagacttgtgccgaagtctgtaagtgagtattccactctcggtgggacttctgcataaacttttctttttaccaatccgtctgtttccaggtttttcaatgtttctgtcaacattttcggcgatatgtcgggaattgctttgcctatggtgttgaagcggatggcttggttctctgcaagaatgcaaagaataagcattgaccattttccagagaatcgcgacacgatgtttcgtatcggacaggcttcaatgtctgaaaaatttttcagattttcttgtgctattatggtgctcattttcaattttactaacttgatagtaagtatatgacttttttgtaacctcttgtaaattatgatgcaatgttttatttttgcgctatcaaattaatagttacttacggatgcaaagttaatacaatgtttcgtcaatgacaaattgtaatgatagtttgtttattgatgacggatgtggaggcttgtatctcataaaatttaagcattatgaacgaagtaaagattcttaattcgagcgacaagttcgctcatgcctcggttggcagtttgcatgactttgaaggtaagctttttatgaaagaagctttgtgctcttcctcttgtgaaatttctttcggtacattgccaaaaggagtgtcggttccttttttccatagtcacagggagaatgaggagcattacataattctttccggcagcggtaggtttcaggtaaacgatgatgtgtttgatattgcagaaggttccgtggttcgcgtgtcaacaaactgcgaccgcaatcttaaatgcacttcggacgtgcccatgacgtatatctgtgttcaggcaagggaaggcagtttgggtaactacaccacaacggacgcgggaataaacgaacgcgagagtttgctgtaattgttttgaaatttatgcagtttcggtaaataaatattcggttattcacaaagcagaaagagatttgcataaagtaaaaaagcgtggaaaagccgaaaaacaggtatctgaaaattagggatttagaaacgcaaaaaatacaagccacatattttaaaatatatggcttgtattttgaaatatatgccttatgttttgaaacatatggcttgtgttttttttgatttcccatattacattaaaataatgggcaaatggtactttttcggtctgtcatggtgaatgaatattcgcttgtgtttattcatttgtgtataacaaaaatccccgatacaaatatgtaacggggattttctttatgtgcagtgaatgatttatttactttttcaaattaggttcttcaagcttgtaaccatactttttgtcggctgctttcaaacagaaagctatgacaagcgaaaggactgctatgcttgtgaatacgcacatgggcagggtgtaattgtacaagtttgttgttacgccgttttcggttgttgtgccaacgatgcagtattcttcaagaatatatcctatgagtgccggaacgccccacaagcctatgttctgaatgaagaatatgagagcatacgcagttccgagttgttttaccgggaaaatttttgcaacactgggccacatggctgagggaacgagcgaaaatgctatgccgaggattatcatgagcgcgatagccacccatgccgcatgaatgaagggcatggcatagatgaagtggacgcagataagcatgagagagccgaacatcattatgcttgctgctttgcctttgcgatcaatcattccgccaaacacaggagttaatatgagtgcgccgagcgcgggcagtccggcaaatgttcctgctatttcttcgtttactccgtatttggttatcatgagttcggtggcaaacttctggaatgggaacacgcatgagtagaagagcacgcagagtagggcaatgagccagaatcccggatttttaacaactgccacaacgtctttgaaagagaacttttcgtctgcgctgctttctacggaaatcttaacctgtcggtcaagttttctgtccatgaaactgaaagctatgaacgaaatcatacctccaagaagaagtacggctcctattaaaaggggagtgtcgaggttatagcttcgtgccacgggaatggcaattgcgtaagctacctgcgaacctattcttgccaatgccacttgcacgcccattgccaatgcaagttctttgtccttgaaccatttcgctatgattttgcttacggtgattcctgctacttctgcaccgacaccaaaaacggaatatccggcagaagccatgaaaacatcgagtttgtaacccaggaacatggcacttgttccgccgtatgtggttatggcaagatattctactgccgtgccgccaaccattagaaccgtggcaagggttcctgtgaagcgtatgccgaatttgtcaagtataagtccgccccatatgagcataagcaagaacacgttcaggaagctataagctcctgtgaacattccgaattctccgctcgtccaatgaagttgaccttcgagcattccttttagcggtgccattacatcatttacgtaataagcagccatcatggtgaaagcaacgatgaacagtgcagaccatctggctgcagccgagtcgtttagctttttagctattgctgtcatatcttttgttttttcttttatttctttagccatttgtcaagccaacggaaaaatgtgcgctgccacattatgccgttttgcggtttaagaacccaatggttttcgtcggggaacaaaagcaattgtgcggggatgccgcgcaaacgtgctgcattgaaagccgattcggcctgggtgtattctatacggaaatcgcgctgaccgtgtatgcaaagtatcggagtgtcccatttgtcaactgaaagatgaggagagtcggagaatactttttgaagtttaccgtccggttttacccatggcgcagagcccatgtcccagttggcaaaccacatttcttctgtttcaacatattgctgttgggtattgaaaatgccgtcgtgtgcaatgaaacatttgaaacgtttgtcgtgatgtcctgcaagccaatatacactgtatccgccgaaacttgccccgacgcagccgagacggttcttgtcaacataattttcttttgcaatatcgtcaatggctgaaagataatcctgcatgcacagtcctgtgtagtcaccggagatttcttcgagccattctgtgccgaagccgggaagcccacggcggttaggagctatgatgatatagtcgttggcagccattatttggaaattccacctgtaactccagaattgactcacgggagactgcggaccgccttcgcagaaaagcaataccggatattttttgttggcatcgaaatgaggaggatagacaacccagcacaattcttttttgtcgtcaacggtgttaacccaacgttcttcaacctttccgaatgttgtcttttcgtaagtgtctttgtttacattagtaacgcgctctgtcttgccgctctttgtgtttacgaagtatatgtcgtcggcttcgctaaggctgtggcgttttacaagaagattgccgtttgacgcaatgtatccggcaagactgtagtcgcacacatcgtctgttagttggcgaactttgcctttcaagtttgttgcgtagatatttgtgcgcccgtgccatactcctgcaaacaacaattctttggagttttctttccagaagaagttgtcaacgccgctatcgaagctttctgtaacgtatgttttgttgcgtgtggaaaattcgtacacgcacaaacgggtgcggtcgctttcgtatccgtcatgcttcatgcttgtccacgcaatatacttaccgtcgggcgaaaatttggggttgtcgtcatatcccaagttgcaatcttctccttcgtatatgcgctggtcttttaatgagcgggtatagtcaatctttacgggttgtttaatgtctctcgtgataggtttgcacaaattaagagaagagccatcgtttatgtcataaaggaatatgtcgctatcggtgcttacagcgtaatctctgccttttttctgtcggagaacgtatgcaagtttcttggaatcgggactccatgcaaattcttccatacctccgaaaggcatcatgggacattcaaatggttgtccttccaaaatgtctttggcatttgcgactttgccattgctatattccgcaaggaatggatgaggaatggaacgcacgtagctatcccaatgtttatacatcaaatcgttgataagcattcccgaagctttgggtaaatcttcatcatttttggcaatggaagtttcggtaggcacttggtgtataataatcacatgtttgcaatcgggagaaaagagaaaaccttcaatatcttccttctcattggaaatacattgtttgtcactcccgtcaagattcatggtccacagctggtttacaccatttgaagcagcaagataggctatttttttgccactttcgataaaagccggttcgctttcgctatcttttctcgtggtaaggttcttttcgttgccggtctttgtgtcctttatataaatagaggtatgtcccttgttttctttgatgtcgtattttgtaagtgtataaaccacactttttccatcgggagaagaaacgacgcttccgattcttcccatagaccaaagtctttccggcgtaagacgatcatcatttcctgccgcttttgtattgtttgacattatccacatcgcacacataattaatacggataggattctaaagtgtttcatgttactttctgtgtttttgacgttcctgctgaagtttcatcatttcttcctgttgcttttgcaaagcctcaagacgtgcggcaagtccgctcatctttttaggtttgtctttgtttgcctggtaattcttctcaaggcgttcaagaagtttcttctcgtcaattgtacgacgcagataccacattgtaagtgcgctgaaaagcaaagatatgaagtaatagtagttaagacctgccgagtaatcgttgaaaacaaagaagaagaataccggcattaagtacatcatccatctcataatcttcatttgactttcctgctgtccgctcatcatgtctttttgcattctcatgctcattacgctgtacacaacatttgttatacagaacaagatgcagaacgcactaatatggtcgcctataagccaaataggatgtgagaattgtattatcgggtcgtaggtagaaaggtcatcaacccaaaggaaactttgttgccttagttctattgcattcgggataaagttaaacattgcaatccagataggcatttgaataagcattggcagacaaccgcccataggacttgcgccatattgactatatgtctgcattatttcctgttgcttcttcatattgtcggcagggtcgggatatttagcatttatctcgtctattttgggtttaagcacacgcatcttcgcactgctcattacgcttttgcgcgtaggcacatatactataatacgtagcaaaattgttataagcaacagcactatgcccatagaaagaccgagatccgtgagccagtcaaagacataaattgtaaagtagcggtttatgtatctgaacaaaggccaaccaagatatacgagatgttccagcttcaagtctttattaggatttacaatatcgtctatcttttgcagtgtacggaatttgttgggaccaagatatagtttgaacgaagatgcttttgtccccgttggatcgaaagcagtttccgccgaagcgtcatattgtttcagaaaacctttgctgaagtcctcttcgggtttacttttcaggttcaccttgctcattcctgcgtcggcaatgagcgttactccgaagaattgatccttaaatgaaatccaatcaagactttcttcaatggttttctcctcttctttctgcggatcaagacggtctgtccctccgtcaacctctttataggttaacgcggcatattgattctcgaatttgtaaccgcgttcctgttgtttcaaacgttctgcccattctatgcccaatacttttgaggtcggcaaaaggtattcctgcaatccgtcggcttttacgtccatatcaagaaggaaactgtcgtgcaacttgtaaataatggaaagttttcctccgttcgcagcctgtgccaccattgttacggtagagtccgtaacattttcgggagtaaacacgagggacgaggtgttgatgttgtctttcttccctgcaagtgtgaacgacatctttgcgtatttctcgctatagagtttgagaggtttcttgtcctgtcctttgtaattcttgagaactacgtcgccgatagttccgccgcgagtactgattcctacggtgatgtcattgtttttcagaacaacgagtcgcggctgttcttctcccgtagcaaaaatactgtcttgtgccactactgtcgtggcatttgctacggaagcatcggcggagttctgttgttgcttgctgttcgcagtctgttcttcgcgttgttgcttcagttgctcctcgtccggtctgttgaaatagctgaagccgaaaatcaccgctattatcagcagaaaacctattatactgtttttatccatttctatgattatagtttgtggctcgcgcagtttttattttttgtcgtcttgcggagtgttttctacaatagtctttatgaaatccaggaacaacggatggggcttgagtaccgtgctgctgtattcggggtggaattgagtgcccacataccatttaagttcgggaatttccactatttccacgagatttgtctcgggatttacaccgtcgcacatcattcccgccttttcaaattcttcgcgataatcgttgttaaactcataacgatgacgatggcgttcttcaatgatgtctgttccgtatatctttctcactttgctgccttctttaagcgagcattcgtaagctccgagacgcatagtgccacccatgttggtaatgttcttttgttcctccatgaggtctatcacattgtgcgtggtcttctcattcatctcaatgctgtcggcatctttatagcccaaaacgtttcgggcaaattccacaaccatcatttgcataccaagacatattccaaaagtaggaatatcgtgttcgcggcagaatttcgcggcagtaattttcccttctatgccacgctgtccgaatcccgggcaaaccacaataccttgcatgcctttcagtttttcttccacattgtcgggtgtgatatattcgctgtttatgaaatgggttttaaccttgcggttattgtatgtgccggcttgcgaaagcgactccaaaatactcttgtacgcatcttgcaaatcatatttgcccacaagtcccacgtttaccacagtagttgctttgtggcgacgttcaaggaaagctctccacggaccaagccccggagtttcaccaggctctatgcccattttgcgaagtattgtagaatcaagtccttgctcctgcattctgagtggaacctcataaattgtgggttggtctatgctctgaaccacggcttccgggtccacattgcagaagtttgccacttttttgcgtatgcctgcgctcaaatcgtgttcagcacgcaaaacgagtacatcgggctgtatgccgaggctctgcaattccttaacggagtgctgcgtgggttttgttttcaattcttgagcagccgagaggaacggcacataggtcaggtgtatgcacagagcatttttgcccaattcccatttcaattggcgaatagcctcaaggaacggcagaccttctatgtcgcccacagttccgccaatctccgttatcacgaaatcaaagtggtatttgttgcccaaataaaggatgtcgcgttttatttcgtccgtgatgtgcggcaccacctgtatggtttttcccagatagtcgcctctgcgctctttttcaatcacgttcttgtatattctgcccgtggtaaagttgttgtggcgcgtggtttttatgccggtgaatctttcgtagtgtccgaggtcaaggtcggtttcctgtccgtctgcggttacgtagcactcaccgtgctcgtagggattcagagtacccggatccacattgatgtatgggtcaaacttttggatagttatgttatatccgcgtgcctgcaggagtttgccaatggacgaagagataattcccttgccaagcgacgaggcaacgccgccggttacaaagatgtattttgtttcagccacgattgtatatagttttataagttttacattcttgggaagagagggagacaataccactgcagtctttttctgcaaagcctgcataaaccctgaaagagagcggaataccgcttggcgttgtctgttgtttcagcatgattatgaaataacgtttgcaaatttactgaaaaattctcgctcctgcaataataccggtattagtaaattatgcaacgtagaaaaggagtagtggaaaaacgcttttgaagttacttttgctaactgacgatgccgcgtgaaagaaaatgccacctgttttctcaatattcggcgggcagaaaaccgatttttaatgctaaaaaacactcattttgtaagtcgttgcctttcatactcttataaaggcgaaaaatataagccatatattttgaaatacaaggcacttattttaaaataagtgccttgtatttttgaaacaaaagccttatgttttttgccgaaaccgacaagaaattaaaattgcctcttttgcgttgaatgtcaggtgtttctgcttttagtgaaagcaacctcgcagatatgacaaatagtatgtgatgaaaaacaataaaaaagcccaccattaggacgatgggcaaatccaaatgttttcacaacggaataatccttattgtgattagctgaaatttattgttgcaaatatacaaatatttattatatgtgcgtggatgtattgtgaaattttttattaaattcgcatcataacaatttttagtatcaagtacatgaaaacaatattgggtttggacctcggtccgtcaagtatagggtgggctttgataaacacagaaaatgaaaagccggaaaaaattataaaagcaggcagtcgcataattccaatggatgccaaggaaatgagcgactatgaaagcggtaagcttcagtccgctgcgtctttgcgcacgggatttcgaggaatgcgtagattgtatgaacgtgcctctcttcgccgtgagcggttgctgagagtcttgaatattctcggctttctaccatgccactatagcaatcaaatagattttgagacgcatccggggaaattcaaagacaatggggaacctttgttgccatataaaagaaatgaggacgggaaaagcgaatttgtgttcaaatcttcttttcttgaaatgctcgaagacttaaagaagaataatcccgggacacttgccgacggaaaactgattccttatgattggactatatattattgtcgtaaaaaagccctttatgcggaaatctcaaggggagagttggcttggatattgctgaacgccaatgccaagagaggatattatcaacttgatgaagaaagtgatgaaaaagtaaatgaaaaaaaggaatactgtcgcaccaaagttataaatgtagagaaacaagacgaggaccgtaagcagaaaggctattatttttatgagataacctatgaaaacggactggtgcaaaagcgaaaatgcaaaatgcaaccgtggcgtgtaggcgatgaagtggatttaatcgtaactacgccgctcgatgacagaggaaaaccaaaagttgatgaagacggaaatattgtgagacggctcagcagtccgaaagaagacgattggggacttgttatgaagaaaacgcaggcagggatagacgcaagtggtggcaccgttggcgaatacatttatgggaatctcgtgaaaaatccgtctgaaaaggtaaaaggcggatttgtaaaaacaatagagagacattattataaggatgaaataagaaagattcttgagtcgcagaaaaggttcattcccgaattgaacgatgcagaactttatatgaaatgcgtaaaagaactttataggaacaacgaggcacacgtcaatgaattgagtcataaaaacattgtggactttcttattaacgatgtaatctattaccagcgtccgctgaaaagtaagaaaagctgcatagccgattgtccttatgaaagttacaactatgtggatagtgaaacaggagaggtgaaaaaacgtcctttgaaagtaatgcccaaatcccatccgttgttccaagagtttcgcttgtggcaattcatacataatttaagaatcaccgaaaatgaaagaactgttgacaaccatgtggtattggactacgatgtaacaatgcaggaactcggaactcccgaacaagtgtgcgatttatatgataagttgtcgtctgtttcaacaataaaggaaagcgcggtgctgaaagctttgtgcctaaatcccaaaaagtataagtggaattttggttccactgaatttcccggtttgaaaactcatcattcgtttgttacaaaaattgagaaacttgaaaacgcaaagaaactgtcttctgatgaagaagaaaaactgtggcatatactttattctgtgagtgatagagacgaacttgaaaaagctctcaagcattttgccgaaaaatgcggatatgataaggataagttttacgaacttttcaaatccgttccccaaatgcgcggagactatgcttcatattctaaaaaagctgtgaaacgtttgcttagtcttatgcgtaccggcagatattggagtgcagatgaaatagacaaggttactcgcgcgagaatagaaaaacacattgcggagaacactgtgctcgaagatagttttggggaatacgggaaaatagaagattttcaatacctgcgtctttctgatgcttgttacgttgtttacggtcgtcattctgaaaatgcggacaacagcatttgggaatcgcccgaagatatagataaatatattgccggcgagtttcgtaaaaactccatgcgcaatcctgtggtggaaaaagtggttggtgaaacgctgaaagtggttcgggacatttggaaaacctatggtaaacctgcggagattcatgtagaaatggcgcgaagtctgaaagaacctaacgacaagcgtgaagaaatgacaaaaaagattgctgagaacaggaaaaagaatcttgaattacgacaaaagctgcaagaattaaaagaaaatggtaaggcggacaatgtaaatcctaattcttccatgcacatgttgaagtataaactgtgggaagagcaaaacaaacaatctccttacacaagaaaaagcatttccatcgcaaaactctttacttctgagtatgaaattgatcatataataccccagaaacggtattttgatgattcttttaccaacaaagtagtatgcgaaagcgcggtaaacaaagataaaggcgcacgtctttcatacgagtatcttcttgccgaaggagggaaagaaatttcgcttggcaatggtgagaaagttactcttaagaccgcggaagaatttgaggctttcgttgaaaacaattatagcagccaggaaaaggcaaggaagcgcaaaaatctcatgcgtacagacgttcctgcctcttttaatgcttcacaactcaataatacccgttacattgcccgtaagactgcggaaattctctcgcatattgttcgtgaagaggatgaccagggttcacgctccaaaaacattataatgacaaacggaagtataaccgaccgtttgaagaaagattggggtttgaagcagacttggaatgatatgatgcgtccgaggtttgaacgtctcaatgatatatcacaaagtaatgattacggagaggaaatagacgacggcaaaggcaagcattactttcagacaagagttccggaggcaaatgcggataagttcgatataaaacgaatagaccatcgtcatcacgcaatggatgccatagttatagcctgcacttctttgaatcatataaactatatgaataatgaaagcggcggagaaacaaaacgctatgacttgaaaaaactgctttgcgagggaaaggaccgacaattcacgaagccttgggaaacttttacgcaagattcccgtaaagctctcgatgacattgttgtgagtttcaaacaaaatctgcgcattgtgagccgtgcaagcaattattattaccattacgttgacggcaaaaaagttctaacaaaacaaacaaaaggtgatagcctttccatacgcaagccgcttcataaggcaacatattcgggactagtcagattgccaattacaaaaaatgagaaaatagaaaacactatcgacaaccccgaacagattgtagataagactatacgcaaggaactaaaaaagattcttgccggatataatggctctgccgacaaaaagaaaatcaagaagtatttcaaggatcgcgattacaaactcaacggaaaagatgtctcgaaagtaaaagtgcgtgtcatgcctgagaatgcggaatattcgtctcatcgcacaccggttgcttccataacaacgcaaaaacagttggaatctataactgataccggcataaagaaaatacttcaaaaccacttggaaaactatggcggtaatttcgaagaggctttttctccggagggaataagcagcttgaatgataacattaaactccttaacggcggacgagaccataaaccaataaaatgcgtaagggtatctgaaaagttttctactaaatttcctgtcggacaagtggcttcaaaagccaaaagttatgttgaagcagaaaaaggaaccaaccttttctttgccatatacgttgacgaaaatggaaagcgcgtatttgaaacaatacctcttatattagccgtggaaagaaagaaacaacatcttcccgcagtgccggaatacaatgaaaaaggttataaacttttattttctctatccccgggagacttggtatatgtccccgaagaagacgaacatataacattgccactaaacacaaggcgaatatacaaaacagtttctttaggaagataccaatgtctcttcattccccaatcagttgccgctcccattgtaaataacaccgaacttggttcaaacaacaagtccgaaaattcatgggacaactaccaaataaaaagccgatgtctcaaactcgaaacagatcgcttgggaaatatcgtaaaagtcataggtcatgattaagaaaacactttgcttcagcaatccggcttatctgtccatgacaaacaaacagctcgtcataaaaatgccggaagtggaaaagcccgacaatgtgtcggaagttataaagcggcaggctgtgaggacaattcccatagaagatataggcatagtggtgttggataataagcaaataaccataacacaaggagctatagaatctcttttgaacaacaccgctgccgtaataacttgtaacgacaaacacatgccgcagggtatgcttctgccgctcgaaggcaataatgttcagaacgaaaggttcagaaatcaaatagacgcttcgcttccattgaaaaaacaactgtggcagcaaaccgtgaaagccaaaataatgaaccaatacggttgtctgcggaaaaacacagccgacgaagccatgcggctatacaagttggcgcaagacgtaaagagtggtgattcggacaattgcgagtcgcaggctgcggtttactattggcgcaacatttttccaaatattgaaaacttcattcgcgacaaggaagggctcccaccaaacaatctcctgaactatggctatgcaatactccgcgccattgttgcgcgctctctcgtaataagcggacttttgccggtgtcgggaatccaccatcgcaatcgttataacgcatattgcctcgccgatgatataatggaaccataccgtccgtatgtggacgaccttgttatttcaatgattaaaagcctaaaagaaattcccgaagacctcaccgtggaaattaaaagagagatgctcatgattcctgttatagatgtaaagattaattccactcacagtcctttgatgatagcagtggggcagactacggcaagtcttgcgaaatgttttggtggagatgcaagaaaaatagtttatcccgagttttgaatgaccgatctaaatatatacaaggttatgtgggtgcttgttttttacgacttgccaaccgacacgaaaaccgaacgaaaagaagcagcacgcttccgcaaagacataatggcggatggtttcacaatgtttcagttttcgatatacgtaagacactgcgcaagcatggacaacgcacaagtacatgtaaaaagagtgcaatcgtttcttccggctcacggcaatataggaatcatgtgtataaccgacagacagttcgccgatataaaaatattctattgcaaaaagccgcgaaaggcattggcagaaggtcagcaactcgaactattctgacagttgcggaggcaatattcggataaatagataagttgttgcttttctgatatatatgaaagcaaaaaatacaagccatatattttgaaatacaaggcacttatattaaaataagtgccttgtattttttgcaacatgccttatgtttttttgcctgcgacgaacgtcctaaaaacagagccaaaacaaggaagtgaaaattcaaacatgctcgagaatcattgttagtggaaaacagaaaaaggaatccgaatattactttcggattccttttcttcaacaaccttatttttaaattctaatatcattgacatcgtattcgaaatcaaagcattagagtgctcgcgttgttgattaccttacaaaggtaagaaaatttcagctaatcacaacgcgccggctggtggataggacggcgattctgttgttgattaccttacaaaggtaagaaaatttcagctaatcacaaccactatagttgccaaaacaacaatagtttgttgttgattaccttacaaaggtaagaaaatttcagctaatcacaacatggagtccttgcgtcaaattccgtcttgcgttgttgattaccttacaaaggtaagaaaatttcagctaatcacaacagattgtagatatatcccataagacggaaagttgttgattaccttacaaaggtaagaaaatttcagctaatcacaacgacaaccttgaagaagattggaaatataaagttgttgattaccttacaaaggtaagaaaatttcagctaatcacaactgagcaatgcttttgcaaacatttccaattgttgttgattaccttacaaaggtaagaaaatttcagctaatcacaactagtcttctgtgcgcccccggctttccagagttgttgattaccttacaaaggtaagaaaatttcagctaatcacaacccgtttcggtcgtacacctctaacactccggttgttgattaccttacaaaggtaagaaaatttcagctaatcacaacacgtggtcgccgccgtaaattaaaccgttagttgttgattaccttacaaaggtaagaaaatttcagctaatcacaacaagtagattctgacggagctttgaaggatagttgttgattaccttacaaaggtaagaaaatttcagctaatcacaactgaataatgcttttgccaacattagcaattgttgttgattaccttacaaaggtaagaaaatttcagctaatcacaacaccaaatggttttggataaaaagaattttggttgttgattaccttacaaaggtaagaaaatttcagctaatcacaacagggtccatgttattctcgaatgttacgaagttgttgattaccttacaaaggtaagaaaatttcagctaatcacaacataatgatggaagtagtaagaaaatttgttgttgttgattaccttacaaaggtaagaaaatttcagctaatcacaacttaatcagaaacaaaatcaaattaattatggttgttgattaccttacaaaggtaagaaaatttcagctaatcacaacaaggagatttgacggacattcaaaaagttcgttgttgattaccttacaaaggtaagaaaatttcagctaatcacaactcttcatttcggcaagtgcgtcctgcgaatgttgttgattaccttacaaaggtaagaaaatttcagctaatcacaaccagatgtggaatatgactaacgagtacaatgttgttgattaccttacaaaggtaagaaaatttcagctaatcacaactaaaagcaaaaggttatggcggtactaaagttgttgattaccttacaaaggtaagaaaatttcagctaatcacaacatactatcagaataggctaaaaggtgagcagttgttgattaccttacaaaggtaagaaaatttcagctaatcacaacatcttcctaaatcaaatccttatagcggtggttgttgattaccttacaaaggtaagaaaatttcagctaatcacaaccgaagccatggagacccgcgaagcggggcggttgttgattaccttacaaaggtaagaaaatttcagctaatcacaacatagcgttatagttatctgtgtaaaaatgggttgttgattaccttacaaaggtaagaaaatttcagctaatcacaactctatgggtcaattggtaccaatcctttgtgttgttgattaccttacaaaggtaagaaaatttcagctaatcacaacccagaaacgccgccttaaatgtctccatgactgttgatttaactgtatttattgctttttcagcaaaaagttcatttcgttttccaccaattctcaatcttttctgaaatccatgctatcgcaatgaagacggcaaagcagatggcgtggaagagcagccacactttccagcccgacagaaagaaaatgaataactctaaaaaaatcaatgctatcataattcctcctccagctcaaaggcattcttcaatgccagtttcgccatttttgatgtctccgcgtcctttctcaaagatttcagcgcgtttttcgcgtgcatttcgccgcgcctgtacgctttcggaaatgcgtcataaagctcgtccctgtcaagggcaatcgtctccaagcctgtgaatgtgtactttgtctcgccgacccagaacgtcccccactgtccgttttcctgtactttatcatacacgcaatgtccggacatttctaccgtgtcgccgtcttcgtctttggtgatgaaatcgctttcccaaagggaaatgctgtctcccactgtcagcgcgccgaagtcgcgcaggtctatgcgtcccttgatgttgttttcccttgttgccctgtcctgcacaaacagcaggatgtcgtttcttttttccattgtcttttgctttgcgtttgaaatataaaacttttttttttctgtcatgcgcccgaagcggattttcttcaaattcggacgcacggaaaggagtttttatgctgttttcaatgctcgcttgcattgttttgcaattcaaaggtaaaaaatagaggctttaaccaaacctctatttttatgcagatttttcacacctgcaccgttccgctttcagtcgttttgttttatgagggacggctcaaaggcaattttaccgaaaatctttaccctccatgtgtgcgggcagtccaaatctaattgtagcttctatgagcctgcccaaagttttttttctccgggtttctgtactgacgtgataaactcacgcatagcctaccaaaaagtcgtatatgtcgcacatcgcgtcccagcatctttttgtgtcgtccaacactgcacggaggtcgtaaggcgcaccgcgtctgccgtgtccctcttcgtccagccatatatacgtttcccgactttcgtcaaaatcatcacaatagctgtcaaggtttctgataaaaccgatgaatgtgtcttttgcgttcctgttttctggaaatgggattgcagcccagaaatccctgccgcagggggaacgttgttgattaccttacaaaggtaagaaaatttcatagacctcaagaaaagtataaatgcaaacaagaagtggataaaaactctcaagaggtgcgtattatttctcgggtggtaaatgttttgcattatacgtttttcaaaagtatatgtatgtagacttaatgccaagcgggtgtgtatgcgattgcggaaaagtttgtaattttgcacctgtaaaattgtgtgtaggtcattttcttgtgtgttataaaggagagaatggcacaaaatattgtataaatggacagaagatcttttataaaggctacgggaacggctttagccgcagcaacggttggtgtttctacaaatgcaacggttcgcggggcttttcctgagataatgcgcaagacaaaaaacaattcagggttgaaattgtcgtttttcccttatgaacttaagctacgtcatgctttcaatctcgcaaaattcagccgcactaccactcctgatgtacaggtagaacttgagtatgacggtgtgaagggttatggcgaggcttccatgcctccttatcttggcgagagcgtggaaagcgtaaccaagttcttggggagtttggatttacaacagttcaaggacccatttcgtatagacgaaattttgggatatgttgatagtgtggctcccaaaaactctgccgccaaagcatcagtggacattgcgcttcacgatttgcttggaaaactgatgggacagccttggtataagatttgggggctttctcctgaaaaagcaccctgtacttctttcacgattggcatagacaaaccggaaattgttagacaaaaagtagaggaagcccgtccttacaaggtgctcaaggtaaagatgggattggataacgaccgtgaaactgtggaaatcattcgttccatgaccgatgtacccatttgtgtggacgtaaatcagggttggaatgaccgcgaacaggctttgcgcatgattgactggcttgccgaaagaaattgtttatttgttgagcagcctatgccaaaggaaaaattcgacgatatggtttggcttaaaagccgcagctcgttgccgctcatagcagatgaggctttccagcgcataggtgatattacgcgccttgcagaggcttatgacggaataaacataaagcttatgaagagcacaggactgcatgaggcatacaagatggtgattcttgcaagagctttgggcatgaaagtaatgctcgggtgcatgaccgaaacttcttgtgccgtaagtgctgccgcacagctcgcacctttggtggattttgccgatcttgacggaaatcttctcatagccaacgaccgttttgatggtatgaagattgtggaaggaaaggttactcttgccgacaaaccaggaataggtgtaacaccaataaagaaaggctaaaccgggagatgactgaaaagaacaaggacgtaatggagatggacggcatgcacattatgagcgatgccgagcttaatcgtaaacttgacatacttcttaaaacggggtgtttgctcatggagagccttgcagatacgagccgcgtgttgcgaaacatgaaaagagtggcggcatatttgggttttcacgagcagaatctgcacatttccataaactacgatattatacttgcaaacctaagcgatgaatatcattcgttcacaaagttcagacggtgtgaagggcacagtgtgaacctttggaccataatgaaagtgagcaaactcacatggaattgcatccgcgacgattattcgcttgagcgttatgaagaagaacttgatgccatacgcaaacacaaacgcagctatacgccgtgggaagtggcaataggcggaggttttgcctgcggaggcttttgcatacaattcggttgcgactggacggcttttttttacgcttcgatagctgccatactcggtttccgtttcagaatgtggctcggggctaaaaagatgaacgcttacgtgagcattgctgtggctgcttttgtgtcaacaatcctcgcgtggggattcatgttgctttccacccataccgatatagaatggcttcgcagcaaaacgccctatcacccgttcatggcgtgtgctttgtatatcgttcccggtgtgccgctcatcaactttgtcagcgacatgctttcgtctcatgtcaagacaggcatgatacgtgccgtaaacacgttgatgattgtattggcaatggcattcggtatagctttcgccataaacgtttgcggagtggacaactttgtgaaagatttatccatgacccctcaccatgagtattgggagtattctgttgctgcggcaatctcggcaatgggattttcaatgatattcaattgtccgccacgtctgctttgggctgtggctataggcggtattattgccatatgtacgcgaaacctcgtaagtttaggaccttccacaaacaatttcgggcttgatcagggtgcggtaataggttcgtttgtgggttcggctgttataagcattatttgtacccgtataatgcacattgttcacgctcctcatcagtgcatatccattccgagtgtcattcctatgattccgggtgtgcttatgtaccgtgctcttttcgcttttatcgacatgcacggcatcgtgggtgaagttacggtggctatgaccaacatgatcaatgcttcacttattattctttgcataagtctcggtgtggctattccgaatgtattctttcgaaagatgatagccccgaaacgtgaacagaagatggtcaactttattctgcaacgcaggttgaagcacgatgcaaccttcaatcatgaggaagtaaaatagatatgaaaaagaaacataaaggcggaaatcgaaagatttccgcctttattgtttatatgtatcggtttatttcagttttttgccgtcttcgaaagcatttcctgcttttttgcccagctgtatgtaattgtcgtgtatgggatcaaaggtaatgaggttcattttctccgtgtcgggcttaccgtcttcggcaagatatttctcatcgcagagaatgttcaccacttccgctattatatagtaaccgctttccgattcgtttagcttttgttttattctgcattccatggtcatgggaaaatcggtgaaaacaggggcgttgatgttttcggattttactgcgttccatccggctttcttcattttgtccttgtctttctttgcactcacaatacccacgaaatccgaagctacgagtgtctctgctgttgcaaatgcaaccgtgaactcgttgcagcgatttagattttccgttgtggcatgggctcccatcgaaatcattatttcgtgatagtcccaagttcccgcccacgccgcattcatagcgtttggtttgccgttttcattgtatgtgcctataatcagtaccggttgtggcaaaagccatgcttttgatccgaaacttttcattctttccatttcaacaggttttaggtttgtttttgaacacggacaaatgtagcaatattttttgaggtcagggtgtgcaggagccggtaaaatttcaatcgaaaacaggtcggcgtgaacacaaaaaccgaatgcataaatattcgtttgcagatatgttcgaaaatacaaggcttataattcaaattacgagccatatattttaaaatatgtgccttatattttgaaataaatgccttgtatttttcaatatttgtaagcttttgaaaaacaaaaccttatgtgtaacgagaaaaagtgcataaacgactgcctgtaagacgattggaaatgacgacatatcctgacttttttcgggaaagcgtggggtgggtttgtgtttgtcgtccggttgtggttttgaccccatgaaacgcttccaagattcaaatagttgaacactggcggtatctgtgcctcggaaattttgttctgtaagttgaaattcgtatctttgcgaacagaaaaattgctagcaaaaatcctgttttgctttaataataacgataaaaacaactgctatgaccgtaactctcataatattggtccttacggtgttgatgtttgcaataggtaggcttcgctccgacatagttgcgctttgtgcgctttccgctttgcttttgtttggtattcttacccctgtggaggctttctccggcttttcgtcaacggtggtaataatgatggtgggacttttcgttgttggcggagccataatgcagaccggtttggcaaaagcagtgggcgggcggataatgaagttggccggtggaagcgataccgcgcttttcctacttgtggtaattgttacgtcagtcataggagcgtttgtaagcaacacgggaactgtggcattgatgatgccgatagttgtaggaatggcttcgagaatgggcatgcatcctgcgcgccttctcatgccgctggcatttgcaagcagtatgggaggaatgcttactcttataggaactcccccgaaccttgtgattcaggacacacttacgggtgcggggctcaaacctctgggatttttctcctttctccccgtaggtgttgtgtgtatggcagtgggaattgtggtgatgctgccgctgtgtcgtatgctcttgaacaaaaacaaaaagaacggcgttaacggcaaagggaaaagcaaaacccttgatgcacttgtgaaagaatacagattgaacaacggtgtgagccgttatctcataaaaaaatcttcattggtcagggggaagagcgtggcggaactcgatttgcgaaaccgctatggtctttctattctcgagatacgtaacgaaaaagccgacaggagcggactgataagaaatgtaacccaaagcatagcaagtcccgaacgggtgcttgaggttgacgatataatttatattctcggcgataaggaaaaagccacagcctttgcaaaagcaaacgggttggaaaagttgggcaacaacaatattaatttttacgaattgggcattgcggaaatagtgttgatgcccgaatcaaggcttataggcgttacggtaagaaattccggctttcgtgaacgctatagtataaatgtgcttggcataagacgcaacaaggaatatcttacagacaatcttcccgaggaaaaactgcattccggcgatgttctgctggtacagggaaaatgggacaacatatcacgtttgggcaacgaggag

SEQ ID NO: 2977 - DNA, 16604 bp, synthetic construct
  misc_feature 1..16604: note = Synthetic
  source 1..16604: mol_type = other DNA
  variation 16295..16378: note = note, n is a, c, g, or t
ttgagcgcgcctttctccttttgggttacttttattatcacattcgatttagcgggggtttcaccatcggatgaacctattaccttgttgggtatttccacattaattttttcgctaatgtctttgccatttacgtcaatgggctttacgccaacggtgaggtacattggcaatttgctctcggcatctcccgtgagcagcagatatgttttttctgataagtcgatgtttttaatgtcgtcgttccatccgtcaaaattatcggtatatactatacttgcattctctgagaatgccaagggggcgtttactttgtatgatggttttacgttatattgttttccaaattcaattgttccggtttgggttacgtcggtcttcacctctataccatctatttttacaatgtcgggtatggtatatacaatgtctgacaggtttggcacgacataaacgttttctgcgccgtaaagtttcgtaaggtcgtctgtcttcttacgacacacgcatatctttgttacagtgtttttgtgtatgtttatatccggaaggctgacggtggcaatagtgctgccttgtttataggatattatttttgcctttgatattgtggcagcaatgtccatattgttgttaaccgtgaataggatctgcggattatacaggtcgacctttacgttgccgtcagacaggaagtcgggcacgccgttaacatttacgctgccaaagtttgtaatgtctattttggggttgaacctgccggttgcttgggtaattgttaattgtggcaggtcaattccgatgcttattttatagttattggtagatggtttaacagtttgtgtttgcaacccaatcttgaattcgccgttcaagtctattttgccgtttttaatttcgctaagtttgccaagcgaggtatcggttcccttgaagttggctcccataacaggaatgtatatcaccaaaggcgatgcggtgtttacattgttcaatgtaagcgtgttgttgtttttgtcgaatttcacggtgccggatgttgctgtgatgttgttgtctatcattaggtaaccgggcatatttatggtcatcgtctttatgctgacgtgtttgctcaaatcagaagggaagttgaaagtcaacttgaacggagatttgctggacaaaacgttatcaagttcaattacctcgcttgaattgccgtggtattcatatgtagctaaggtaatgggcttgatttctccggtaacggcaggcacgtagattgtttggcttgttgattttcccggattaagttttattttttccacaaatggttttgccggggcaacatccgcacctgcaagtttgaatacataattgccttcgccgtcaagttccacgcttccatcctgttcgagttcaaggacatcttttagctgaatgttttctgttgaactgttaggaataacgagtgaatctccaccgaagcccattgtggcatcgatgttgtcaaagctgaaatctccgtccgtgcagcctgctaaagctaatgcacctgcaacgaacacagggtacagccgatggtgagaaagatgtttgcttcccattgattttgatttaatatattaacataatggtattttaatttctgcaaagttagcaaaaataatgggtaataaacgttgaaaactcaaaaatcattctttttggtttattgataagacattttgtctgttaatataataattcgagtaaaaatttcatgtaaaagaaaatattgctgtcagctaaaactcaaaatagcatacaaagcctatccgcaatgcccatgaacaggcgttgcggatgatttttttaaaaagtaagcccccttagtcaaataaggtcggctcaggaggccctttctttgcaaaataggcgtatgaacatgaatataccgttgaaacgtagtttttaagggacggctgagtacttggatttcttgcagtggcgaggtttgcggtaaggtttgtaagttaatgctttatacaacgttatggcggtcaaaaaaaaggtctgatgtagtttttcctatgtctgatgtaatttttcctatgtcccatgtagttttttcggcatcaaatgtagttttcgggatgtttgggaaagaaccgtcgattaaggttttgctttatttgtaggggcgtatggcatccgccctgtacaccaccgcccgaaccatacagcaaaccgccgccataattaatttgtgcacttcgggcgtatggcattcgcccctacggtttccgcaaaacaaagattgcccatcctttccaaagttccccaataaaaataaaaaataagggtcggcacctttttgtgatgtgccgaccctttatgacgggcttgtattattaagattattttttcaagtttggctcttcgagtttgtagccatatttcctgtctgcggctttaaggcaaagcgcaatgatgagcgagagcactgctatgcttgtgaacacgcacattggcagggtgtagttgtataggtttgttgttacaccgttttctgtggtagtgccaacgatgcagtatttctcaagaatgtggccaataagggcaggaattccccacaggcctatattctgtatgaagaaaattagtgcgtatgctgtgccgagttgctttacagggaatatttttgccacgctcggccacattgcggagggtacgagcgagaatgcaattcccagtacaatcataagggctatagctacccatgccgcgtgtatgaatggaagagcatatatgaaatgcacgcagataagcattagcgagccaagcatcattatgcttgcggctttgcctttgcggtcgatcattccgccaaataccggtgttaatatgagtgcgccgagggcagggagaccggcaaatgttccggctatgtcttcgttaaccccatattttgttatcataagttctgtggcgaatttttggaatgggaacacgcaggaatagaatagaacgcatagcagtgcaatgagccaaaagccggggttttttacaactgccactacgtctttgaacgagaatttctcgtcagctgaactttctacggaaatctttacctggtggtcaagcttcctgtccataaagctgaatgcaatgaacgaaatcatgccgccgatgagcaaaacggcgccaatcataagcggagtgcttaggttgtagctgcgtgccatgggaatcgcaaccgcatatgcaacttgcgaaccgattctcgccaaagccacctgcacacccattgccaatgcaagttctttgtccttgaaccattttgcaataatcttgctgacggtaattcccgccacttctgcgcccacgccaaacacggaatatcctgcggatgccatgattacatcaagtttgtatcccattaacatctcgcttgttcctccgtatgtggttattgcgatgtattcaaccgttgttccgccaaccataagtaccgtggcgagtatgcctgtgaagcgtattccgaatttgtcaaggataagtccgccccaaatgagcataagcaggaaaacgtttaggaagctgtatgctccggtaaacatgccgaactccccgcttgtccaatgaagctgaccttcgagcattcctttcagcggagccatcacgtcgttcacataataagccgccatcattgtaaaggcgactatgaacagtgccgaccacctggcaaccgcagagtcgttgagttttctggttattgcagtcatatctttttattttttaagccatttgtcaagccaacggaagaatgtgcgttgccacattatgccgttttgtggtttcagtacccagtggttttcatcggggaaaagcagtaattgggcgggaatgcctcgcaggcgtgctgcgttgaaagccgactcggcctgtgtgtattctatgcggaaatcgcgctgaccgtgtatgcacagaataggggtatcccatttgtcaacagaaagatggggagaatcggagaatactttttgaagttttcccccgggttttacccatggcgctgagcccatgtcccaattggcaaaccacatttcctcggtttcaacatattgttgttgggtgttgaatattccatcgtgggcaatgaagcatttgaaacgtttgtcgtggtgccctgcaagccaatacacactgtatccgccgaaacttgcaccaacacatcccaaacggtttttgtcaacatagctttccttggcaatgtcgtcgatggctgccaggtaatcttgcatgcacagtccggtgtagtcgccggaaatctcctcgagccactctgtgccaaagcccggaagcccgcggcggttgggggctatgattatatacccattggctgccattatttgaaaattccaacgatagctccaaaactggcttaccggagactgcggacctccctcgcaaaacagaagcgtggggtattttttatttgcatcgaagtggggcggatacacaacccagcacagttctttcttgccgtcaacggtgtttacccagcgttcctcgacttttccgaatgttgttttttcgtatgtatccttgttgacatttgtaagtctttcagatttgcccttttttgcacttacaaagaaaatgtcatcggcttcgctaatgctgtgccgctttacgagcagattaccgtttgaggcaatatagcctgcaagggcataatcgcaaacctcatcggttagttgacgcacttttcctttcaagttggttgcgtagatgttggtgcgtccgtgccatactccggcgaacagcagttcttttgagttttctttccagaaaaagttatcaactccgctgtcaaaactttctgtaacatatgttttgttgcgtgttgcgaactcgtatacgcacaagcggtttcggtcgctttcatatccgtcgcgcttcatgctggtccatgctataaacttgccgtttggagagaatttaggattattatcgtatcccaggttgcagtcttctccatcgtatatccgctggtctttaagagagcgggtgtagtcaatctttatgggctgctttatgtctcttgtaattggtttgcacagattaaaagacgagccgtccgtgatgtcgtaaagatatatgtcgctgtctgtgcttacggcgtagtctctgcctttcttggcgcgcataacatatgcgagtttttttgagtcgggactccacgcaaactcttccatgcccccgaaaggagtcattggacactcgtatggcagccctttcaaaatgtccttggcgttttcaacttttccattgttgaattctgcaaggaaagggtgcggaatggagcgcacatacgtgtcccaatgcttgtacataagttcgttaataagcattcccgaagcctttggcaaatcatcgtcgtttttggctatggaggtttcggttggaacttggtggattatcacaacgtgtttgccgttgggggagaaaagaaaaccttcaatgtcgtctttttctttcgatacgcattgtttttctgttccgtcaaggttcatggtccacaactgactcacaccgtcagaagcggcaaggtaggctatcttgttgccgccttctatgaacgccggctcgttttcgctgccgccgttgtcggcggtaagatttctttcatcgccggtttttacgtccttaatatatatggaggtgtgtcccttgttctcttttatgttgtatttggtaagggtgtaaacaattttcctaccgtcgggcgaagctgccacacttccaatcctgcccatggaccatagcctttcgggagtcagaaggtcgtcattcccctcagctgctgccatgttggacgttgcacatattgcagacataatcaaaacagatatgtatttcagatatctcatattcactttctgtgtttttgtcgttcctgctgtagtttcatcatttcctcctgctgtttttgcagtgcttcgagccgtgcggcaaggccgctcattttcttgggtttttccttgtttgcctggtagtttcgctcaagacgttcaagaagctttttctcatcaatggtgcggcgcagataccacatggtaagcgcactgaaaagaagtgaaatgaagtaataatagttaagacctgccgaatagtcgttgaacacgaagaagaagaataccggcataagatacatcatccacttcatgattttcatctggctctcctgctgtccgctcatcatgtctttttgcattctcatgctcattacgctgtaaacaacgttcgttatgcagaatagtatgcagaatgcgcttatgtggtctcctataagccatatcgggtgggagaactgaataatcgggtcgtatgttgaaaggtcgtcaacccaaaggaaactttgctgccttaactctatggcattcggaataaagttgaacattgcaatccaaataggcatctgaataagcatgggcagacagccgcccatggggcttgcgccgtattggctgtaggtttgcattatttcctgctgtttcttcatgttgtcggcagggtcgggatatttcgcgtttatctcgtctatttttggtttgagcacacgcatcttcgcactgctcattacgcttttgcgggtgggcacatatactatgatgcgcagcagaattgttattagcagaagcacaattcccatagagaagccgaggtcggtgagccagtcaaatacatatatggtaaaatacctgtttatatatctgaacaacggccagccgagataaacaagatgctcgagtttcaggtccttgtccgggcttactatgtcgtccattttttgaagtgtgcggaatttgttcggaccaaggtacatcttgaacgaagaggcatctcttcccgaagggtcaaagtctgtttcggcgtaggcttcgtactgtttcaggaaacctttgcttatgtcttcttcgggtatgcttttcagcttgactttgtccagtcctgcatcggcaattagagtaacaccgaaaaactggtctttgaacgaaatccagtcaaggctttcttcaagacttttctcttcctctttttgagggtcaaggcggtctgtaccgccgtttgattctttgtatgtaagggcggcgtattggttttcgaatttgtatccgcgttcctgctgcttaagcagctcgttccattctatgcccaaaatcttggatgtaggcaacaggtattcctgcattccatcggctttaacatccatgtcgagcagaaagctgtcgtgcagcttgtaacttatcgaaagttttccgccgtttgccgcctgtgccaccatggttaccgtagagtcggtaatgttttcggggctgaacataatggaagacgtgcttatgtcgtctttttttccggcaagtgtaaacgacatgtttgcatatttgtcgcagtaaagctgaaggggctttttgtcctgtcctttgtaatttttaagtaccacattgcctatgcagcctccttttgtgttaatgccaacggttatatcgttgtttttaagcaccacaaggcgtggttgtgctccgctttccttgaaaatactgtcgtgtgcggcttttgctgttccaaaggtggttgctgtcgccttgttgtcatgctgttgtttttcagcggcctgctgctcctcgcgttgttgttttagctgctcttcgctcggtctgttgaaatagctgaagcctataataaccgctattatcagaaggaatcctattacgctgtttttgtccattttctctgattgattttttgcctgcgccgtctttattttttgtcgtcttgcggggtgttctcaacaattgtctttatgaagtccaagaaaagcgggtggggtttcagcacggtgctgctgtattccggatggaactgtgtgccgacataccattttaatttggggatttcaacaatttccacaagattggtctccgggttcactccgtcgcacatcataccggccttttcaaactcgtcgcggtaatcattgttaaactcgtagcggtggcggtggcgttcctcaattacgtctgtgccatatatggcccttaccttgctgccttccttcagcacgcactcatatgccccaaggcgcatggtgccacccatattggttatgtttttctgctcctccattaggtcgattacattgtgggtggtcttctcgttcatctctatgctgtcggcgtccttgtagcccaaaacgttgcgtgcaaattccacaaccatcatttgcattcccaaacaaattccgaaagtgggtatgtcgtgttcgcggcaatactttgcggcggttatcttgccctctatgccacgctgtccgaaccccgggcaaatcacaatgccctgcattccctttagcttctcctccacgttgtcgggggttatgtattcgctgtttatgaagtgtgtcttaaccttgcggttgttgtatgtgcctgcctgcgacagcgattccaaaatgctcttgtaggcatcttgcaaatcgtatttcccgacaagccccacatttacaactgttgtggccttgtggcggcgttccaagaaagccctccacggaccgagtcccggagtttcgcccggctctatgcccattttgcgcaatattgttgagtcgagtccttgctcctgcatccttagcggcacttcgtatatggttggttggtcaatgctctgcaccacggcttcggggtcaacgttgcagaagttggcaacctttttgcgtatgcccgcgttcaagtcgtgctcggcgcgcaaaacgagtatgtcgggctgtatgcccaggctttgcagctctttcaccgagtgttgcgtgggttttgttttgagttcctgtgccgccgaaaggaagggcacgtaagtaaggtgtatgcacaaggcgtttttgcccaactcccatttaagttggcgtatagcctcgagaaacggcagcccctctatgtcgcccacggtgccgcctatttcggttattacgaagtcaaagtggtatttgtttcccaaatagagtatgtcgcgttttatctcgtccgttatgtgaggcaccacctgtatggtttttcccaggtagtcgcccctgcgctctttttcgataacgttcttatatatgcgccctgtggtgaagttgttgtggcgtgtggtttttatgccggtgaacctctcgtaatgccctaagtcaaggtcggtttcctgtccgtctgccgtaacatagcattccccgtgttcgtaggggttgagcgtaccggggtccacgtttatgtatgggtcgaacttttggatggttatgttgtatccgcgcgcttgcagcagtttgcctattgacgaggatataattccctttcccagcgacgatgcaacgccgcccgttacaaagatatacttggtttcagccacgattatattgatttatgtattattaaagcgtttgcaaatttactgaaaaattcccgctctgccttggttgggaataagaaataagaaaagacaaggttgttatgtgttcttcgtgtatatttatccgcgtgtcgggtttgttgccgaaaatgctacaaatgccgccgggattgcgtaacttgttgaattgcagcaaaatgttttcacaaagagtgtctgatgtaaagttttgtttttcaaatgtttgcaggcggcgaaaaaaggtctgatgtagtttggattatatctgatataatttttcctacataggacatggtttttcttacgtctgatgtagaaaaagccacggcttctgtggcaaacgtggagttcgtgctttcatttccgattctgtattcgcttttcgacaaggcataaaaagtgcccaccattaggatgatgggcgatccgaatgttttcacaacggaataatccttattgtgattagctgaaaattcattgcaaatatacgtatttttgttatatgtattatagtgctgtttgaaatttttcataaattcgcaaaataacatctaaaacggcaaatacaatgaaaaccattttgggattggaccttggtccgggaagcataggatgggctttggtgaacgtggaaaacggcaagcccaaaagtattataaaggcgggaagccgcataattcctatggatgcgggagaaatgagcgactacgaaagcggcaagctgcaatcatcggcatcggtgcgtactgcattccggggaatgcgccgcttgtatgagagggcggcgcttcgcagggagaggcttcttagggtactgaatgttctcggctttttgccgcagcattaccgcgaccaaatagattttggcgaacatccgggaaaattcaaaaaccacggcgagccgctgctgccatacaggaaaaacgaggcagggaaaagcgagttcatctttcagccgtcattcctcgaaatgctcgaagatttcaagaaaaacaatccgcaggtcttggatgacggcagacttattccccgcgactggactctttattattgccgcaagaaagctcttgaccgtgaaatctcgcgtgaagaactggcttggatattgctgaacgccaactccaaacgcggatattatcagcttgacgaggaaaaaaccgaaaaatcaaatgcggagaaggaataccgccgtgccaaggttcttgatgtggaaaggttggaagaagaccgcaagcagaaaggcttttacttctacaagataacatacgatggagggcttacgcaaacgaggaaatgcaaaatgcagccgtggcgcgttggcgacgaggtggatttgattataaccacgccgcttgacaagaacggcaagccgaaaaaagacgaagacggcggaataaggcaaaccctcagcagtcccaaagaggacgactgggggcttgtgatgcaaaagacacaggccgggatagaccacagcaattgcaccgtgggcgaatatatctacaacagtctccttgaaaatccgtccgaaaaggtgaggggtggaattgtaaagacaatcgagagacattattatatggaagagcttagaaagatacttgagtcgcaggcaaggttcatacccgagctgtgtgatcacgaactctacatgaaatgcgtaagggaactttaccgtaacaatgaagctcacgtgaacgagttgaaacgcggcaatattgttgactttctcataaaagatgtaatctactatcagcgtccgcttaaaagcaagaaaagctgcatagccgattgcccgtacgagagctacacttatgtggacaaggaaaccggggagataaaaaagcgtcccttgaaggttatgcccaagtcccatccgctgtttcaggagttccgcctgtggcagttcatacgcaacataaggattaccgagaacgagaagatagtggacggacgcaagtattttggttatgatgtaacggcaaaatatctcggaacgcccgaagacgtgtgccggctttacgaaaaactgtccgggtatgagaacatagccgaaagcatagtgttgaagtcgttggggcttaatgcaaagatgttcaaatggaactacggctcaaaaaaagagtttcccggcttgaaaacgcatcacgagtttgccacgagaatagccaaacttgaaaaagcaagggaacttacgcaaaaagaagaatacaagctgtggcatatactctattccgtgagcgacagagacgagcttgaaaaagccctgaagcatttcgccgaagaatgtggctttgacgggcagagtttttacgaaaaattcaagaccgttccgaatatgcggggcgattacgcctcatattccgaaagggctgtaaagcgtttgctccagcttatgcgctcagggaaatattggaacgaaaaggagattgacgaggcaacgctcaagcggataaatgcaataatagaatacggctatagcccttatgaggagttttcggagttcaagcgggtggacgattttcaatatttgcagctttcagacgcttgttatgtggtttatgggcgacattccgaaaacgccgacaacagtgtgtggaattcgcccgaggaaatagacgaatatatcggaggcgagttccgcaaaaactcaatgcgaaaccccgtggtggagaaagtggtggctgaaacgctaaaggttgtgagggatatatggaaaacctacggcaaaccggcggaaattcatgtggagatggcgcgaagccttaaagaccctaacgacaaacgcaaggaagccacggaaagaatggcagcaaaccgaaaggaaacaatagacgtgcgtgaaaaactgcaggaactcaaagacgaacacaaggcggacaatataaatcccaattcctttatacatatattgaaatacaagctgtggaaagagcaggggggccagtcgccatacacagggaaaagcatatcgatagcaagactcttcaccgatgaataccaagttgaccacataattccccaaaagcggtattacgacgattctttcacaaacaaggaggtgtgcgagagcgcggttaatttggacaaaggcgcacggcttgcatacgagtacatacttgccgaaggcggaaaggagataaatgtaactataaacggcaagcacgagaaaattgctatattacccaaggaacaatatgaggaatgggtgaaaaaacattgcgtgagagaaaacggaatcggcagaaagggcaaaaacctcatgatgacggatgtaccggcttcgttcaacgcctcgcagcttaacaacacccgctacatagcccgcaagacggcggaaatcctgtctcacatagtgcgtgagggtagcgaccccggcgcgcgttccaagaacataataatgacaaacggaagcataaccgaccgcttaaagaaagactggggactgaaacagatttggaacgaacttatgcagccgagattcgaacgccttaacgacaaaacccaaagcaacgactatggcgaggatgttgtagacgctcatggcagacactacttccaaacaaaagtgccggaggggcttgccgaaaaattcgacatcaagcgaatagaccaccgccatcacgcaatggatgcgatagtcatagcctgcacatctctaaaccatattaattatatgaataacctaagtggcggggaaaaggaacgctatgacctgcgcagggtgttgtgcgaaaaagacagcagagcgtttttgaagccttgggaaacgtttacgcaggattctcgcgaagctatgaacaacattgtcgtgagcttcaagcaaaacctgcgcattgtgagccgcgcaagcaactattacagccattatgttgacggcaaaaagataattgaaaggcaaaccaagggcgagcatttctctattcgcaagccgcttcacaaagccacgtattcgggactcgtaaggctgccatacactaaaatggagaaaatagagaacaccatagacaatcccgagcagatagtagacaaaagcatacgcaaaggactgaaggaaattcttgtccaatataatggcgctgccgacaaaaagaaaatcaaaaagtatttcaaggacagggactataagctgaacggcgtggatgtggctaaagttgaagtgcgcattgtgccggaacaggcagggcattccgcacaccgcacggttcttggctcaataacaaacagaaagcagcttgattccatcacggattccggcataaagaaaatcctgcttaatcatttggaaaactacggcggcaattacgaggaggcgttctcgccggagggaatcagcagcctgaatgacaacataaggcagttgaatggcgggcgcgaccacaagccgataaagtgcgtgagagtttcggaaacgtttacgaccaagttcccggttgggcagactgcttcaaagaccaaaagttatgtggagacggaaaaggggacaaaccttttctttgccatatatgttgacgaggaaagaaagcggacgttcgaaacaattcctttgaacgttgtagtagagagaaaaaagcagcatcttctcgccgtgcccgaacacaatgaaaatggagacaaacttctgttttccctttcgccaggcgatttggtatatgtccccgaagagggcgagcatatagcaatgccgcttgcccccaagcgcatatacaaaatggtgtcttcgggtaaaggacaatgtttcttcattccccagaatattgccgctcccataataaataacacagaactgggctcaaacaacaaatcagaaaactcctgggataatcgtcaaatcaagagcgtttgcctgaaactcgagaccgatcgtttgggaaacatcataaagattacaggaaatgattaagaaaacgctttgtttcagcaatcccgcatatctgtctttggcaaacgggcagctcgtagtaaagctccctgaggttgaaaagcccggcaatgtgtcggaggttataaagcgcgaggcagtgaggacaataccaattgaggacatcggcgttgttgttttggacaacagacaaataacagtaacccagggcgtgcttgaggctcttttgaaaaataccgccgccgttataacctgcgacgacaggcacatgccgcttggcttgctgctgccgctcgaaggtaacacaattcaaaacgagaggttcagaaaacaaatggacgcttcgctcccgcttaagaaacagctttggcagcaaaccgtcaaggcaaaaatcatgaaccaatacggctgtttgagaaaaaacacaggcgatgaggcaaagcggctgtacaaactggcgcaggacgtaaagagcggcgatgcggacaattgcgaggcgcaggcggcggtgtattactggcgcaatattttccccgaaaatgaaaactttgtgcgcgacaaggaaggctctccgccaaacaacctccttaactacggctatgccattttgcgcgcagtcgtggcgcggtcgctggttgtcagcggactgctgccggtgtcgggaattcaccaccgcaaccgctacaacgcctattgccttgccgacgacataatggagccataccgtccgtatgttgatgaccttgctatctctgttgcaagggagttaggggaaattcccgaagaactcaccgtggatttgaaaagggaaatgctgcgtatacccgtgctcgacgtaaagataaactccacacgcagcccgctcatggtggcggtggggcagaccacggcaagccttgcgaaatgctttgccggggaagtgcgcaaaatatcctatcccgaattttgaatggcggaacttaacatatacaaggttatgtgggtgcttgtgttctacgacctgcctaccgacacaaagaaccagcgcaaggaggcggcgcgtttccgaaaggacataatgggcgacggctttacaatgttccagttctcgatatacgtaaggcattgcgcgagcatggacaacgcgcaggctcacattaagcgcgtgcagtcgtttctccctgcccacggaaatgtgggtataatgtgtataaccgacaggcagtttgccgacataaagatattctattgtcaaaagccgcgaaaagccttggcggaggggcagcagctcgaattgttttagaggcgtgttttgccacaccgttttaaggaaacgcaaaagcaatagcaatgcaggtgaatattacatgcgctcggaaccgggaaaacggcagatatgtcttgtaagctgcaaagttctgattattagagacttgtgttggcattgagattgtgctataagtttttgtttttcaagcgtttgcaagtgtagaaaaaaggtctgatgtagttagaattatatcagacataatttttcctacatcggacattgtttttcctacatcctatgttgtttttgtgatgtttgaaaaagagttgccggtttgaattttgcgccatttgtaggggtgtattgcatacgccatgtacgccacagcatgagccgtgccgcgaaccgtcattgccgcattgcaaagcgatgcaattcagggcgtatgccatacgcccctacggcggtgcaattcgttgactaattgcatgtagaatgacagcgctatatttcaatgactgctaaaacagaaaaaggaatccgaagctgctttcgggattccttttcttcaacaaccttgttttttatttctattttcttgtacatctgcttgaatgtcagaaaattatagtactcctgttgttgattaccttacaaaggtaagaaaatttcagctaatcacaacaaaatgcgtcaactttggaaaaatggaggtgttgttgattaccttacaaaggnnnnnnnnnnnnnnnnnnnnnnnnnnnnnnnnnnnnnnnnnnnnnnnnnnnnnnnnnnnnnnnnnnnnnnnnnnnnnnnnnnnnaaatttcagctaatcacaacgctcttggcgaaaattagtaagcaacgcgggttgttgattaccttacaaaggtaagaaaatttcagctaatcacaacgtttgccaactaatcgctttgtgtataatggttgttgattaccttacaaaggtaagaaaatttcagctaatcacaaccaaggacaaggaaatcttcaatacgatggagttgttgattaccttacaaagg

SEQ ID NO: 2978 - DNA, 8803 bp, synthetic construct
  variation 1926..1978: note = note, n is a, c, g, or t
  variation 202..250: note = note, n is a, c, g, or t
  misc_feature 1..8803: note = Synthetic
  source 1..8803: mol_type = other DNA
aacaattgtcttgatgaaatccaggaacagcgggtggggcttcagaacggtgctgctgtattcggggtggaactgtgtgccgacataccatttcagtgtgggtatttcgacaatttccacaaggttggtctcggggttcacgccgtcgcacatcatcccggccttttcatattcctcgcggtaatcgttgttgaactcgtannnnnnnnnnnnnnnnnnnnnnnnnnnnnnnnnnnnnnnnnnnnnnnnngttgttgaactcgtagcggtggcggtggcgttcctctattatgtcagtgccgtatattgcccttaccttgctgccttccttcagcgcgcattcgtatgccccaaggcgcattgtgcctcccatgttggttatgttcttctgctcctccatgaggtcgattacgttgtgggtggtcttctcgttcatctcaatgctgtcggcatccttgtagcccaggacgttgcgggcgaactccacaaccatcatctgcattccgaggcagatgccgaatgtgggtatgtcgtgttcgcggcagtatttggcggcggtgatctttccctctatgccgcgctgcccgaagcccgggcaaatcacgatgccctgcattcccttgaggctctcctccacgttgtcgggcgttatgtattcgctgtttatgaagtgcgtcttgaccttgcggttgttgtatgtgccggcctgcgacagcgactccagaatgctcttgtaggcatcctgcaaatcgtatttccctacgagacccacgtttacaacggttgtggccttgtggcggcgttccaggaaagccctccacgggccaagccccggggtttcgcccggctctatgcccattttgcgcagaatggttgagtcgagcccctgctcctgcatccttagcggcacttcgtatatcgtgggctggtcggtgctctgcaccacggcttcggggtcaacgttgcagaagttggcgacttttttgcgtatgcccgcgctcaggtcgtgttcggcgcgcaaaaccagaacgtcgggctgtatgcccaggctttgcagctctttcaccgagtgttgcgttggcttggtcttgagttcctgcgcagccgaaaggaacggcacgtaagtgaggtgtatgcacagggcgtttttgcccagctcccatttaagctggcgtatggcctcgagaaacggcagcccctctatgtcgccgactgtgccgcctatttcggttattacgaagtcgaagtggtatttgtttcccaaataaagtatgtcgcgcttaatctcgtccgtgatgtgcggcaccacctgtatggtctttcccagatagtcgcccctgcgctccttttcaataacattcttgtatatgcgcccggtggtgaagttgttgtggcgtgtggtctttatgccggtgaacctttcgtaatgtccaaggtcaaggtcggtttcctgtccgtctgccgtaacatagcattccccatgctcgtaggggttgagcgtgcccgggtccacgtttatgtatgggtcgaacttttggattgttatgttgtatccgcgtgcttgcagcagtttgcctattgacgaggagataatcccctttcccagcgacgatgcaacgccgcccgttacaaagatatacttggtttcagccacgattatattgatttatgtattattaaaacgtttgcaaatttactgaaaaattcccgctctgccttggttggggataagaaataagaaaagacacggttgttatgcgttttccacacacatccgtccgcacaacagaggtgtaatagaaaaaacgacaattaccgccgaaattgcgtaactcgttgatttgctgtaaaatgcccacatggaaaatgtttgatataacgaattgtaattcaggtgtttgcgaacggcgaaaaaaggtctgatgnnnnnnnnnnnnnnnnnnnnnnnnnnnnnnnnnnnnnnnnnnnnnnnnnnnnnctgatataattttttctacatcggacgtagtttttcttatatcctatgtggaatcggcttcgccttttatggcaaaggtggtgtccgcgttttcatgtcccaacccggtgttcgtttttcgtcagggcataaaaaacgcccacctttaggacgatgggcgatccgaatgttttcacaacggaataatccttattgtgattagctgaaaattcattgcaaatatacacatttttgttataggccgtgtcgcgctgtcggaaaattttcataaattcgcaaaataacatcgtaaattgcaagtacaatgaaaactatcttgggattagaccttgggccgggaagcatagggtgggctttggtgaacacggaaaacggcaagccggaaagcataataaaggcgggaagccgcataattcctatggacgcaggggaaatgagtgactacgaaagcggcaagctgcaatcgtcggcatcggtgcggactgcattcaggggaatgcgccgcctgtacgagagggcggctctccgcagggagaggcttttaagggtgctgaatgttctcggctttctgccgcagcactatcgcgaccaaatagattttgacgaacatacgggaaaattcaagaaccacggcgaaccgctgctgccatacaggaaaaacgagactgggaaaagcgagttcatttttcagcagtcatttcttgaaatgctcgaagatttcatgaaaaacaatccgcaggtcttggagggcggcagactcattccccgcgactggactctttattattgccgcaaaaaggctcttgaccgtgaaatctcgcgtggggaactggcttggatattgcttaacgccaattccaagcgcggctattaccagcttgatgaggaaaaaacagaaaaatcaaacgcggaaaaggaataccgccgtgctaaggttgtgagtgtggaaaagcaggatgaggaccggaaacaaaaaggctatttcttctataagataacatacgaaggcggactgacgcaaacgaggaaatgcaaaatgcagccgtggcgcgtaggcgactatgtggatttggttataaccacgccgcttgacaataacggcaagccgaaaaaagacgaggacggcgaaataaggaaaaccctcagcagtcccaaagaggacgattggggacttgtgatgcaaaagacacaggcaggcatagaccacggcaatggcactgtgggcgaatacatctacaacagccttcttgaaaatccgtccgagaaggtgaagggcggaattgtaaagactattgagagacattactataaggatgagctgagaaagatacttgaggcgcagtcgaggttcatacccgagttgcaggatcacggactttacattaaatgtgtaaaggaactttaccacaacaacgaatcccatgcaaacgagttgcggcataggaacattatagacttcctcattaacgatgtgatttactaccagcgtccgctcaaaagcaagaaaagttgcgtcgccgattgtccttatgagagctacacttatgtggataaggaaacaggcgagataaagaaacgccccttgaaggtgatgcccaagtcccatccgctgtttcaggagttccgcctgtggcagttcatacgcaacctaagggttaccgagaacgagaagattgtggacgaacgcaggttttttggttatgatgtaacggcaaaatatatcggtacgcccgaggatgtgtgccggctttacgaaaaactgtcgggatatgcggacataagcgaaagcaaggttttgaaggcgttgggacttaatgcaaagatgttcaaatggaattacggctccaaaaaggagttccctggtttgaaaacgcaccacgaatttgcatcgagaattgccaaacttgaaaacgcaagggaacttacgcaaaaagaagaatacaagctgtggcacatactctattccgtgagtgacagggacgaacttgagaaagccctgaagcactttgccgaagaatgcgagtttaatccgcaaaatttctacgagcaattcaaggccgctccgaagatgcggggcgattatgcctcttactccgaaagggcagtcagacgtctgctcccgcttatgcgcaccgggaaatattgggacgaaaaagagatagacgcggcaacgctcaagcggataaacgccataattgcggacggctacaacccatgtgaggatttccccgagttcaagcgggtgggggatttccaaaatttgcagctttccgacgcttgttatgtggtttacgggcggcattccgaaaacgccgacaacagtgtgtggacttcccccgaggaaattgacgaatatctttgcggcgagtttcgcaaaaactcaatgcgaaaccccgtggtggagaaggtggtggcggaaacgctcaaggtcgtaagggacgtttggaaaacctacggcaagccggcggaaattcatgtggagatggcgcgaagccttaaagaccctaacgacaaacgcaaggaagccacggaaagaatggcagaaaacaggagggatacaatagacgtgcgcgagaaactgcaggaactcaaagatgggcacaaggcggacaatgtgaatcccaattcctcaatacatatattgaaatacaaactgtggaaagagcagggaggccagtcgccatatacagggaaaagcatatcgatagcaaggctcttcaccgatgaataccaagttgaccacataatcccccagaaacggtattacgacgattctttcacaaacaaggtggtgtgcgagagcgcggttaatttggacaaaggcgcacggcttgcatacgggtacatacttgccgaaggcggaaaggagatagacgtaacggtaaacggcaagcgcgagaaaactgccatattccccaaagaacaatatgaggaatgggtgaaaaagcattgcgtgagggaaaacggaatcggcagaaagggcaaaaacctcatgatgacggatgtcccggcttcgttcaacgcctcgcagcttaacaacacccgctacatagcccgcaagacggcggaaatcctgtcccacatagtgcgtgagggtagcgaccccggggcgcgttccaagaacataataatgacaaacggaagcatcaccgaccgactgaagaaagactggggactgaaacagatttggagcgaacttatgcagccgaggtttgaacgccttaacgacaaaacccaaagcaatgactatggcgaggagattacggacagtaatggcaaacgctacttccagacaagagtgccggaggtgcttgccgaaaaattcgacatcaagcgaatagaccaccgccaccacgcaatggacgcgatagtcatagcctgcacttccctgagccatattaattatatgaataacctgagcggcggggaaaaggaacgctatgacctgcgcagggtgttgtgcgaaaaagacagcagggcgtttttaaagccttgggaaacgtttacgcaggattcccgcgaggctctgaacagcattatagtgagcttcaggcaaaatctgcgcatcgtgagccgcgcaagcaactattacaaccattatgttgacggcaaaaaggtaacggaaaggcagaccaagggcgagcatttctcaatacgcaaaccgcttcacaaagccacgtattcggggctcgtaaggctgccggaaacaaaaatggagaaaatagagaacaccatagacaaccccgagcagatagttgacaaaagcatacgcaaagggttgaaggaggttcttgcccaatacaatggcactgccgacaagaagaaaataaagaagtatttcaaggacagggactacaagctgaacggcgtggatgtgtcgaaagtgaaaatacgctttgtgccggaacaggcaaggcattccgcacaccgcacggctcttggctcgataacaaacaagaagcagcttgattccatcacggattccggcattaggaaaatcctgctcaaccatctggaaaactacggcggcaattacgaggaggcgttctcgccggagggcataagcagcttgaacgacaacataaggcagcttaatggcggacgcgaccataagccggtaaaatgcgtaagggtttcggaaaaattctctttgaagttctctgtaggacaaaactgctctaaaataaaaacttatgttgaagctgcggacaatactaatcttttcttcgccatatatgttgacgaggaaggaaagcgggcgttcgagacgatacctctgaacgttgtcgttgaaagaaaaaggcagcatctttccgcagtgccagaacacaatgacaaagagaacaaactcctgttttccctttcacccggcgatttggtctatgtccccgaagagggcgagcatatcgcaatgccgcttgattatgaacgcatatacaaaatgcaatcaactgatagtaataaatgtttttttgtgcctcaatatgtagctgctcgtatagcagataaaattgaatacggtcctaaaaacaaatcagaacgcgacttgaatggcaatcaaatcaaaaaagtttgtctgaaacttgagatcgaccgcttgggaaacatcataaagattacaggaaatgattaagaagacgctttgtttcagcaatcctgcatacctgtctttgtcaaatgggcagctcgtcataaaactccctgaggtggaaaagcccggcaatgtgtcggaagtcataaagcgtgaggcagttaggacaatacccattgaggacattggcgttgttgttttggacaacaggcaaataaccgtaacccaaggtgcgcttgaggctcttctgaaaaataccgccgccgtcataacctgcgacgaaaggcatatgccacttggcttgctgctgccgctcgaaggcaatacaattcaaaacgagaggttcagaaaccagatggacgcttcgctcccgctgaagaaacagctttggcagcaaaccgtcaaggcaaaaattatgaaccaatacggctgtttgagaaagaacacaggagatgaggcaaagcggctgtacaaattggcgcaggatgtcaagagcggcgatgcggacaattgcgaggcgcaggcggcggtgtattactggcgcaacatctttcccgaaaatgaaaactttgtgcgcgacaaggaaggctctccgccaaacaacctccttaactacggctatgccgttttgcgtgccgtcgtggcgcggtcgctggttgtaagcggactactgccggtttcgggaatccaccaccgcaaccgctacaacgcctattgtcttgccgacgacataatggagccataccgtccgtatgttgacgaccttgttatctctgtggcaagcgagtttggggaaatccccgaggaactcaccgtggacttgaaaagggaaatgctgcggatacccgtgcttgacgtaaagataaactccgtccgcagcccgctcatggtggcggtggggcagaccacggcaagccttgcgaaatgttttgccggggaagtgcgaaaaatagcctatcccgaattttgaatggcggaactcaatatatacaaggtcatgtgggtgcttgtgttctacgacctgcctaccgacacaaagaaccagcgcaaggaggcggcgcgtttccgcaaggacataatgggcgacggcttcacgatgttccagttctcaatatacgtaaggcattgcgcgagcatggacaacgcgcaggttcacattaagcgcgtgcagtcgtttctccccgcccatggaaatgtgggcataatgtgcataaccgacagacagtttgccgacataaagatattctattgccaaaagcccaggaaagccttggcagaggggcagcagctcgaattgttttagaggcgtgctttgccgcaccgttttagggaaacgtaaaggcaaggacaatgcaggtgaatattatatgcgcccgggacagagaaaacggcggatatgtattgtgaaccgcaaggtgttggttcttagggatttgtgtcaacatggcagatgtactgtaagtttttgttttccagacgtttgcaagtgccgaaaaaaggtctgatgtaatttgaattatatcagacacaatttttcctgcatcggacatagtttttcttatgtccgatgtggttttcggggtatttgggaaaggctgttaattatgcgttttgcgtcatttgtaggggcgtatcgcatacgcccggtaacaccaccgcatgaaccgcatcacaaaccgccgccacgatattgcaaagttggcgcatttcgggcgtatgcaatacgcccctacggcgatgcgattcactgactgattgtgtgctgaatgacagtgctatattccaagaccgctaaaacagaaaaaggaatccgaagcagccttcaggattccttttcttcaacaaccttgttttttatttctgttttctggggcatcagcttggatgtcagaaaattagaacactcctgttgttgattaccttacaaaggtaagaaaatttcagctaatcacaacagcagcatacgagagtacggagtactccgagttgttgattaccttacaaaggtaagaaaatttcagctaatcacaacggtacagcttgccgcaatatccgcacttggttgttgattaccttacaaaggtaagaaaatttcagctaatcacaaccggcgagcgatgcagacaggctcgcaagggttgttgattaccttacaaaggtaagaaaatttcagctaatcacaacctataaccgtttgtccgcgcaatacgcgatgttgttgattaccttacaaa

SEQ ID NO: 2979 - DNA, 23540 bp, synthetic construct
  source 1..23540: mol_type = other DNA
  misc_feature 1..23540: note = Synthetic
acaataaagatacaattatgctatttggttccacattgctagctcatccggagcttggttatgaggagtttttcagcagtgcttttattgaatctgcctatcgaaaaatgggacttcctatagaaaacaaacttgcacgaacgggtcttaaagctagaatcgaaggtaaaacgcacgaaattaccgtatgtatcctgtctgagcttgatgcagttataagcccctccaaccaatttgcagcagaaagtggagaggcccatgcctgtggtcatagcacgcaatctactcaagtctatgctgcggctcttgctctcaatactttgaaggaacaactagacggtgatgtcgtttgtatggctgttcccgctgaagagtttcttgatctccagcatcggttggaattacaaaagcagggtagcattgcctatctttccggtaaacaagagctcatccatcttggcgctttcgacgatgtcgatatggtaattatgattcattcacaacccgaaaatccatcgtacgatgtatttgtcgggggtggcagtttaggctttacagccaagcatattcagtttatcggtaaagaagcccacggggcagcccctttcaaaggcgttaatgcattgcaagccgctaatctggcaatggctggaatgaatgcaaatagagagactttctcagaagaagaacgtatacggattcatccgattttgacaaagggtggagatgttgtgaatacggtaccttcggatgttcgtatggaaacctacgtacgaggatcatgcaaacaagccatagataaaggttgtaatgttgttgaccggtgtgttcaagccggagcatccatgatgggggctgaggttaaggttaaaaccatccctggatacctcccactcaaacaagacagcaacctgagtaccctctttgcatccatagcaaaggatgtacaaggaatcggtgatgttgtttggggaaaagatatgatcggttctaccgatatgggggatctcgctcagctcaagccttgtatccaaccaacaatgggtggctttattggtgaagctcattcaaaggaattttgtatggttgatgcatgggaaagttatcggcttggaggcgagttgcttgccgagctggttctggcgctacttaccaatggcgcttgccaagcaaaacaagttcgagattcctttatcccaagtatggatagagagacgtatctggtacatctgcaagcacaaggaggaagataatgtgggatcaagtatctttggagaagcttttaactaagccttccactcgtctagttgaggacataaagagtatgaagggtgacattatgatattgggtgctggaggcaagatgggaccttctgtttgcctcatggcccagcatgctatcaatgaagccaagcttgataaaaaggtatatgcggtttctcggtttaccaaccaggagaaacgttctcaactggaaagggaaggcgtagttgttctctcttgtgatttgcagaaaaaagatgatctacaagctttgcctgaggttgagaatatcatctttatggcaggcaggaaatttggtacggatggaaatgaatggcaaacatggggaatgaatgcagtagtccccacgttggtttgtgagcgtttcaagaagtcacggtttgttgtgttctcttcagggaatatctatccattggtaacggcttccagcggaggtgcgagcgagagcacgccttgtagaccccttggagagtatccccaaagctgtcttgctagagagcggatttttgaatattacgcaaaaacctgtggtacgaaggtactgatttatagattgagttatgcgattgctcttgagtatggcgtaataagtgacattgcccgcaaggtttataatcagattccccttgatttaggtaatggttgtttcaactgtatttggcaggcagacgccaatgagtatgctattaggtccttgcttcttgccgacaatcctcccgtgattcttaatgctacaggtcccgagttggtaggggtcaaagagactgcgaagaagctcggtgtcctgtttggaaaggacccgatctttaccggagaagagaatggtgatgcatatcttataaatgcatcaaaagcccatagtgtatttgggtatcctcatgtcagcctcgataccatgattgcatggcaagctgaatggatactcgcaggcggccatgatttgaacatgccgacgcattttgaggaaaggaaggggagttactaatgcatgaccatcaagcagcgttaagaattcttgccaagggtacggtaattccagcaacaccgcttgcactggatgatgcaaggatgttcgatgagaaaactcagcgattgttgatgcgttactatcttgcttgtggagtaggtggtattgccacagcagtccacagtacccaattcagcattcgagatcccgagatacatctgtttgaaccagtcatttcgttgatcattgatgagatagctcgctttgaggcggccaacaacacttgtatcgtgcgtgtatgtggtgtatgcggaccaatcgagcaagcccttcaggaagctcgattggcgaagtctcttggctatgacgcggtattgttaagccctggtggattgaatcacctttccgaggaatctctaattgagcggacaatacaagtagcctcggtaattcctgtcatagggttttatcttcagaccgctgtcggcggacgcgtgttttcctatgaatattggcagaaactgtgtgagattccaaacctggttgcaattaagtgcgcaagtttcaaccgatataccacgctcgatgtagtacgcgctgttgcatgttcctcccggcacaaacagatagcactttataccggtaatgacgataacatcgttcatgatctcatggatgtttttacatttgaaacacctgaaggcaagcgttcagttcgattctccggaggactgcttgggcattggtgtatctggacgaagaaagctgttgagttgcataaactgctgggaaatgcggtggatgaaggttgcattgatgcttcgattatccatcttgcagcagcggtgactgatatgaacgcagcggtttttgatccgcatcatgcgttcaagggatgcattcccggcattcatgaggtgcttcgaaggcagggaatattcaagaatcgatattgcctcgatagtgaggaagatctatcaccagggcaaagtgaagagcttgatcgggtgatcagaagttatcccaagcttattgatgattcctttattctggaaaatctcccgcattggaagagagatttgtagctgtgtctctatatcagcgttagctgatttgtaatactaaggaggagaaaaaatgaagaagcttattgttttcatgcttctattgggccttacattttctgtttttgctggaggagcaactgaacagagtagcctgaaaggtgaaggacctataaaaatcggaagtatccaagatctgagtggtggagcttctacagccggccaacccaatgcatggggtgccgaatatgctgtaaaggtcattaacgagaaaggcggcatcaatgggcgtatgctcgagattactaccatggactgtaaaaacgatgctgccgagggcgtgatggcctatcgcaagcttgttgatgaggttggcgttgcagccattatcgggcctcctctgtccaatccggctgccgcatgggtagagctttccgaagaagatagtattcccatcgttggccatttcatggatgaagtctgtaccaccaatcctgatacgggtaaaccttacccctatatgttccttgcagagcccagtagtgcgatccaaagttactgcatggccgaatatgccttgacgaagcttggtgcaaaaaccgcggctacactgtacaaccctggtaatgcctttgcaaaaagccaagctgctccttttgtccaatacatgaatgctaatggtggaaaggtagtaagtgagcagaccttctcatggacagataaggattacagcgcacaggctataaagatagtggcagctaaacctgatgttgtgttcctctgtgattatctgccgcagaatgttaccagttatgatgcattgcgcgatgccggcttcaagggtgccatcattggtgcaaataccttgtcccttccctttgctacgatggtaaagaataaggtaaatgacgtctatttcttacagaactatgacatgctcaattcaaatgtagggaatatcaacgagctggtaaccaagcacatgaaagagaccggcacggcagccccagctgcaaatgttggctttggttgggatgcggttcaagtattggcccaagcaatgcgcatggcaaaggacccgactgatggaaaagaagttgctgatcttctgcgtaagacagacaatgtaatgctcagcagcggttcaaccattaccattgatcctgcaactcatcgacccagcaacatgggaatgtacattgctgattatgatgagaagttgagtcttagaattgttgatttcattaaggtaaattaagtatttgtcaagtttggctgggaggacgggaaatccgtcctcctgcataaggaactatccatggtagcgcaacttttgattaatggaatttcccttggagctgtgtacgctttgattgccgtagggtttgcggtagtcttcagtgtccttaaattcagtaactttgctcatggtgggatgataagcgcgtgtgcatatattggattttttttccagcgatcgttcgacccagcaccctccatactcgtgactatactgtttacagggctttgtggaatgggtatcgcactgttgctggatttgattgcttatcggagcatacgaaaaaacaagagtccgaacatctattattttctctcctccttgacgatttccataatcatcgaacagattctcaatatcggctacagcaaaaatccctatgcctatccaaatattttctcaagcaacttttttatgatcgggtctctgcgggtttcaaccatggacacgatgatcatggcaatttctcttttgattttgatgctgatgatactagtaattacaaaaaccaagatgggactggcaatccgagccgttgcgatcaatgccgacaccagtaggttgatgggaataaatagtggggttgtggttgtgatggtttttattatcgcaggttttctagcaggagtgagcggcgtcctgctgggtgcaaaatattcagtatatccagatttaggacagactatgatgatcaagggctttattgccagtgtaattggcggcctaggcagtctaggaggagcaattgcagctgctgttcttcttggtgtacttgagattttctggacgtatttctttggggctttttctgctccggttatgttattcattttgatgttgcttttcttgtttatcaggccacagggtattgccggaaaattcgctaaggaaaaggtataggagaaagagatgagcagttatcaacttggattaatcatgaactcctgtatctcaatcatcggtgtaaccggtgtatttgcaattacttccttggcaggaatgttttctttagggcaagcagcatatttggcaatcgggtcttacgttaccttcattcttgcacgaatgttcaacctgcctatattcgtaacatctgtcgctggtatcggattaagtgccttgtgtgcgtatgtcataagcgttcctaccctcaagttaagaaaagactatttcgcattaattaccatgggatttggacagatgattacagccaccatcgtacttttggaacggtatacaaatggttcaatcgggtattccagaattccgaaggtgaatcatcttgtctgggtgattcttggaattactgccttggtagtgttctgtgttcgcaacctaaagtattctaggttcggcagaatgtgcatcgctctaaaaactgacgaaattgctgcaaaaagtttcgggattgacgtttaccgcttgaaactgcgtatgtatgtgcttgcttctgcaatcgcgggtattgccggaattctctatggtttgaaaaatcgtgttatcctgcctgattcctttggttggaatctttctgcggaaatgcagattttccttttcttcggaggcactaattcaattactggagcagtttttgcaggtgctcttctgaaattattacccgaacttttcaggactgtgacgcttttcgggcagagccttcaggagtaccggacgatcatatactgtgtactgattcttctcataatcaattttaggccaagtggtgtgtttggcgagtatgagctctcacttcgagccattaaacgctttgtcataagaaaccggaaggagagcaacaatggctgaactcgttctgaagtgtaccgatgtgtgtatgtcatttggaggcgtaaaagcagttgatacattctccatgtccttgaatccaggagaaattcgagggattattggacctaatggtgcaggtaaaactactatcttcaatgtactttcccgcatctatcaacaggatgctggaagcatcctgttcaagggccaatgtatagatgccaaggaccaagttaccgtagcaagaatgggattggctcgtacctttcaaaatattcgcctgttcagtggtctttcagttttggagaatgtgaaggtatccttggattatgcaggaaaatactccttcttcgaagctatgtttctccttcctcgaaggttcaaacaagaaaaattgacaactgaacgagcttcgaaatgtctggaagttttgaaccttgaacaatatgcatcccttcgtcctgcgaatttggcatatggactgcaacggagagtggagattgccagggctttggtttgtgagcccagtgtcttgcttctggatgagcctgctgccggattgaatcctgaagaggtatttgaactgatagattttattcaacaaatcaagggattgtatccacagattgccattttggtgattgagcataggatggatctcatcatgaatctctgccagtacctgtacgttcagaattttggtactaccattgctgaaggaacccctacagaaatccagacaaatgaagcagttctttctgcatacttgggtgaggaggaataaccatggcactgcttgagattcatgatgttaccgtggcctatggaatggtcgaagccttacatgcaataacgatgcaaattcaagaagggactatcacttcgattattggttccaatggtgcaggaaaaactacgattattaatgctatctctgcgatggtcccttataaaggctcaatacagtttgatggaaaacaacttcccttaaagagtaaccaggtggtaagaaaaggcatcgtacaagtaccagaaggaagaaaagtctttgcagggcttactgttgaggagaacttattggtaggtgcctataccataaccgacagaaaacagctcccgcaattattggcacgtcagtatgcacttttccctcggctgaaagaacgaaaagaccaagatgcgggtacgctgtccggaggtgagcagcaaatgctggttatctgcagggccttgatgggtggaccgcgacttctgatgcttgatgagccatcgttgggattggcaccaattattgttcgcgaagtttttgagactattaagcaaatcaaagagagcggtacaactattcttcttgtggagcagaatgcgaacaagtcgctttgtatgagtgattatgggtatgtgattgagaatggtagagtcattctggaggggaaaggtcttgccttgctttcagattcaaaggtcgctgaagcctacttggggggtaagcgaaaaccaatggattgcaaatgattccgagcttttacctccttctcattcttgattattgcctaccaaaggcgtaccttgatgcccatgaagcaatcatccgacacctcgaataacagtgcactgatcttggctttccttaccgtaatgctttggtccacgggctttgtattcacacgcatcgccgtgcgggacatcgggccatttcctttgggcctcctgcggtatggatcggctgctgttattcttgtggtaattggattggtcaaacgtatagggcttcctacattgaaggatgttcctctctttctggtgttgggagccttgggtttctttttctaccagatattcttcaatgtagcgatgacaaccatcacggcagcaacggcgagcgttgtaactgcaaccgtccccgtccttacagccttctttgcctcactgctgttcagggagaaacttggaaaccttgggtggattgccgtgtgccttgagtttgctggaattctggtcctcacactctggcagcgggaagtctccatcgggtggggcttggcgtggatgataattgccgccctctgctttgcaggctacaacctgatccaacgctttgccaccaaacgctatactcccgtgcaatcgacggtctacaccatagtagcttctgccttcatgttcctgttgttcctaccccaagccattgaggaagtaaggactgctcccgtccaatcactcttggctgtcctgttcatgggaatcttccccagtgcaatcggttttctgctctggacaaaagccttgtccatcgccaaacaaatcggtgatgttaccaacttcatgtttgtcacgcccttgctctccacgttgctggagatcatcctgatcggtgatattcccgataccggaaccattataggtggtttgatgattctctttggagtggctctgttcaacaatagggcgaggctggtaccaaggcagcatgcaatcttacgtaaggaaggagtgtaaatctcctgattcttgcatatccaaatgcatcggctcttgatgttgtgcgatagttactatcagatgacatctataagaaggagcttttcagacatgaagagatttgctgacaacgtattggtggtaaccggctctgccggggatattggtagggctgtagcgcttcggtttgcccgggaaggggctattttggctctttttgatgtacgcccaagcgatgcgactcaagcagctgttgaggctatcgggggagaagcccgttcctatcgttgtgatgtaaccgatgcacaaagcgtacagacagctgttaatcaagtggtctccgactttggaaagattgacctactgttcaacaacgccggctaccaagggttgttcaagaagactcatgcatatcctcaggatgatttcttcaaggtaatcaacatcaatctcgtaggagcttttcatgtattgcgttcagtatcggaagtgatggtcaagcaaggatcgggttgtatcgtaaacaccgccagcatggccggagtaggcgttcctcccaatatgattgcctatggttcgagtaaggcggccattatctcgatgaccaagattgcagccaaggatttggctccttatggcatacgggtgaatgctatcagcccggcctttatgggccccggggtgatgtgggaccgtcaggttgcactccaagcccaggcaggttctccctattacgatagcgaccctttagtagtagagcatcagatggtcaatgaaattcccatgcataggttaggggatattaaggaaatcccaggtgttgtcgcctttcttatgagcgacgatgccagctatataaccggagagaatgtgcggatagctggaggagtttaaggtacttgttgtcgaatttcccaacaaaaaatcaggattcagtataaaagaatccctaaatctttagcatatcatatgttaagtaaaaattacctatgcataattattgccgaagtagtaaatattttatgggaaaaagaacataatattcgctatccaatcttgacatggactatacttatcactatcagcaaagacataacgtgaaaaaggaaggttcatatgtcaaagaaagtgtcacgtcggtatgaagagcaagcacaagaaatctgtcaaagactaggttctagaccgtatagcattggccttgatttgggagtaggctcgatcggagtagctgtagctgcatacgacccaattaaaaagcaaccttcggatttggtttttgtatcttcaagaatcttcatcccttctactggcgctgccgaaagacgacaaaaacgtggacagcgaaactctcttcgtcatcgggcaaatcggctgaagttcctatggaaacttttagcagaacgtaaccttatgctttcgtattcagagcaggatgtgcctgaccccgcgagactccggtttgaagacgctgtagtaagagcaaatccatatgaattacgtctgaaggggctaaacgagcaactaacgctttcagagctaggatatgccctgtatcacattgctaatcacaggggatcttcttccgtacgcacatttctcgatgaagagaaaagctccgatgataagaagcttgaggaacaacaagcaatgacagagcagctggccaaggagaagggtatctccacgtttattgaagtccttactgcattcaatacaaatggcttaatcggatatcgcaattccgaatcagtgaagagcaagggtgttcctgtccccactcgtgatatcattagcaatgaaatcgatgtattgctacaaacgcaaaaacaattttatcaggaaattctttctgatgagtattgtgaccgcatagtctctgcaattttgtttgagaatgaaaaaattgttcctgaagcaggctgctgcccgtattttccagatgagaagaagctgccgcgatgtcatttcctcaacgaagagcgacgtttatgggaggctataaataatgccaggatcaaaatgccaatgcaagagggcgctgccaaacggtatcagtcagcatccttttctgatgagcaacgtcatattctctttcatatagcaagatccggcaccgatattaccccgaagcttgtgcagaaagagtttccggcgttgaaaacgagcatcattgtcctgcaagggaaggagaaagcaatccagaaaattgctggattccgatttaggaggcttgaagaaaaatcattttggaaaaggctcagcgaagagcaaaaggatgattttttcagtgcttggacaaatacccccgatgacaaacgactctccaaatacttgatgaagcatcttcttctcacagaaaatgaggttgttgatgcattgaaaactgtatctctgattggcgattacggcccgattggaaaaactgccacgcaattgcttatgaagcatcttgaagatggtttgacctataccgaggcgcttgaaagaggtatggaaaccggtgagtttcaggaactctcagtatgggagcagcaatcgttgttgccatattatggacaaattcttactggatcaacacaggccttgatgggcaaatattggcattctgcattcaaggagaaacgtgacagtgaagggtttttcaaacccaacacaaattcagatgaagagaagtatggacggattgccaatcccgtagttcatcagacactcaatgaattacgtaagctcatgaatgaattgattacgatacttggtgctaagccacaggaaatcactgttgagttggcaagagagttgaaggttggagcagagaagcgtgaagatattatcaaacaacagacgaagcaagagaaggaggctgttctagcatactccaagtattgtgagcctaacaatctcgataagcgatacatcgagcggtttcggctattagaagaccaggcgtttgtttgcccttactgccttgagcatatctctgttgctgatattgcggcgggaagagctgatgtggatcatattttcccaagggatgatactgctgataactcttacggcaataaggtcgttgctcaccgtcaatgcaacgatataaagggcaagagaacgccctatgctgctttctccaatacatctgcatggggtccgattatgcactatcttgacgagactcccggcatgtggagaaaacggagaaaatttgagacgaatgaggaagaatatgcaaagtatcttcaatcaaaaggttttgtctctcgatttgaatcggacaatagctatatagcgaaggctgcaaaagaatacttgcgatgcctgttcaatcccaataatgtgacagccgttggatcattgaaaggcatggagacgagtattctccgcaaagcatggaaccttcaaggaattgatgaccttctgggcagcaggcactggtcgaaggatgctgatacctccccgactatgaggaaaaaccgcgatgacaaccgccaccatggactggatgcgattgttgccctctactgttcccgttccttggtacaaatgatcaacacgatgtcggagcagggtaagcgtgcagtagaaattgaagcgatgattcccatcccggggtatgcctcggaacccaatctatcatttgaagcccaaagagaattgttcaggaagaagattctggaattcatggaccttcatgcttttgtgagcatgaagactgataatgatgcaaatggtgctttactgaaagataccgtgtattcgattcttggtgcagacacccaaggcgaagaccttgtgtttgtagtgaagaagaagatcaaggacattggggttaagattggggactatgaggaggttgcttcggcaatacgtggacgcattaccgataaacagccgaagtggtaccccatggaaatgaaggataaaattgaacagttacaatctaagaatgaagctgctcttcagaaatacaaagagtccttggttcaggctgcagcagtactggaggaaagcaacaggaaattgattgagtcaggtaagaagcctattcagctctccgaaaagacaatcagtaagaaggcattggagttggttggcgggtattactatttgatttccaacaacaagagaactaaaactttcgtggttaaagagccctccaatgaagtcaagggatttgcgtttgataccggatctaacttatgtctcgacttctatcatgatgcacagggtaagctttgcggggagatcattaggaaaattcaagcaatgaatccatcctacaagcctgcatacatgaagcaggggtactcgttatacgtgcgtctttatcaaggtgatgtatgtgagttgagagcctcggatctaacggaagcagagtcaaatttggcgaagaccacacatgtgcgacttcctaatgcaaaaccaggaagaacctttgtgataattattacattcactgaaatgggttctgggtatcaaatttatttttcaaatttagctaaatcaaaaaagggtcaagataccagctttaccttaactacaatcaaaaactatgacgtaaggaaggtccaactcagttcggcaggtttggtacgctatgtctcgcctcttttggtggataagattgaaaaggatgaggtggctttatgtggagagtgattgaccttggtggtactggttattacctgcacactgtgcataacaaactcattgttgagaaagatggagaagaatcacttattccgtttgatgatattcattcgattatttgtcatggaataggattcaggtattcggataaatttttcaaatcttgtctgcatcacaaggtaccggtaacgttctgtgatgagaaacatattcccttggggatgttgctccctatgctgcagcataaggatacatctcaaagaatggatattcagttgaaggcttcgcttcctcgtaggaagcaagcctggcaacaaatcataacagagaagctgaagaatcaaagagattttcttcagcatttacaaattccaggagtaaaacgcttagatgtgttgtctcagactgtgctatcaggtgatagctccaataatgaagctcagggagcaagagtgtatttcgaatccatttatggaaccagcttcttccggtcagatgaggacaatgcaatcaatggaaaactggactatggatatagcattctccgttctgcagttgcaagggctgtggtggacaccggattgctgccatcctgtggagtatttcattcaagtcgaataaacccgttttgcttggttgatgatttgatggagccttttcgcccgatggtggattctttggtgcttgcgatgtgttccaagtatggtgtcatcgaagatctggaatcgcgagagaagaaagagttaatgcgaataacagcgagagaagtggtctttgaagagcaagatgtagagttttcgtatgcgttgcgtctatatgtgctcagttatcttagttttctttcacgtaatcgtgatgctattcaatttccgaagtaccgatatgcttgggccgtataatgctatgtgggtttttgtaggattcgatgttccgactctcacgaagctcgatgtcaagcgtgcaaatcggtttcgaaatgatttgctggatatgggattctcccggttccagttatcattctatacctattatgtgccctctaaacaacgtgctgaaaccttggcaaaacaggttgaacataaagtacctccaaatggtaaggtctcaattttctttataacagatcggcagttcgggatgaccaggacgttctatgccggtcaacaggtagagaatgagtgccctgagcagggattgctttttgaataaaaaaagagctcccaaaatagggagcattttgcgacttaagtcttattagagataatcgctggtttttgttaagatataaccatcatagagtgacctttgctcaaagtcaaggaaaattgctttaatcaccttgatttagtgcctcagaatctcagttttcttcagttggatgctacacattttcttttcccattggaatatattccagtactggtcaatcttaacaaaaatcagcggtcatccccaacactcaagagccggagccgcgaccatcacatggtcaatcttaacaaaaatcagcggtcatccccaaccagttgcctccatgccgtgaacgtgtcattggtcaatcttaacaaaaatcagcggtcatccccaacatagacagactccagtacaacctcatcctcggtcaatcttaacaaaaatcagcggtcatccccaacaagctggtggagcatatagacaaggtgctcggtcaatcttaacaaaaatcagcggtcatccccaactaggcgaagtgacgagtgaatattgcaagaggtcaatcttaacaaaaatcagcggtcatccccaactggcttccttgcccttctgttctatcttgtggtcaatcttaacaaaaatcagcggtcatccccaacgcaatgccctcgatacgagatcctcaatatggtcaatcttaacaaaaatcagcggtcatccccaacgaaatcacgcgctgtaataccgttaaaaaaggtcaatcttaacaaaaatcagcggtcatccccaacaggaaggattgcatgaaacaatacattgcaggtcaatcttaacaaaaatcagcggtcatccccaactgaactcatgtatgaatatgcacaaaggctggtcaatcttaacaaaaatcagcggtcatccccaactgttttatctacggtaaaataaacagaaaaggtcaatcttaacaaaaatcagcggtcatccccaacctcattagctttgtatgtctcttcccttgcggtcaatcttaacaaaaatcagcggtcatccccaacatacggtgacacttcctcgcaagcaatggaggtcaatcttaacaaaaatcagcggtcatccccaacgtatatggtttgattaaaagtttaaatgcaggtcaatcttaacaaaaatcagcggtcatccccaacaacggcgaactgggtcaagtacatgcttccggtcaatcttaacaaaaatcagcggtcatccccaacaaacatatctttcatctacagcactcccttcggtcaatcttaacaaaaatcagcggtcatccccaacaggtacaggaacaacagctttagactcggtggtcaatcttaacaaaaatcagcggtcatccccaacgtggatcatgagtctattgccagtacaggaggtcaatcttaacaaaaatcagcggtcatccccaaccggaacacccgattgatgatccattcgttgggtcaatcttaacaaaaatcagcggtcatccccaactgggcggtcaatgccaatctctctcatatgggtcaatcttaacaaaaatcagcggtcatccccaacgaatttcgaagttttcagtacctattaacaggtcaatcttaacaaaaatcagcggtcatccccaacataactaatcattgttatacctcccgtgatggtcaatcttaacaaaaatcagcggtcatccccaacgatttgtacttgcgaatgaaaggtgttgacggtcaatcttaacaaaaatcagcggtcatccccaaccgtcgatcttgtctgccaccggcttgagatggtcaatcttaacaaaaatcagcggtcatccccaacagtatcctacacaagtgtttgacgctctcaggtcaatcttaacaaaaatcagcggtcatccccaactcatccgtatctgagagatttgatacaatcggtcaatcttaacaaaaatcagcggtcatccccaacgacaagggagagagcagggaagtcagcaagggtcaatcttaacaaaaatcagcggtcatccccaacaaagagccaatgggatgcaggggggctgtcggtcaatcttaacaaaaatcagcggtcatccccaacattttccttgtccgtatacacgacatcggcggtcaatcttaacaaaaatcagcggtcatccccaacgagtttccttcctcgtcagcgtcgaacatgggtcaatcttaacaaaaatcagcggtcatccccaacacgtctgctggcgttggatatgggatttgtggtcaatcttaacaaaaatcagcggtcatccccaacctaggcggtagcccgactatagcgaaagtaggtcaatcttaacaaaaatcagcggtcatccccaacaaaccaaactcagcatccaacgttctatagggtcaatcttaacaaaaatcagcggtcatccccaacaatcaatcgtgtataatcggaggtaggattggtcaatcttaacaaaaatcagcggtcatccccaacaagccacacgactgatggcagacaaggaagggtcaatcttaacaaaaatcagcggtcatccccaacccaccgagacgggcaatcccttcgacgtggggtcaatcttaacaaaaatcagcggtcatccccaaccgcaagtaagagcggctggtaggccggaatggtcaatcttaacaaaaatcagcggtcatccccaaccttgagggctgtcctggcctccgaaagctcggtcaatcttaacaaaaatcagcggtcatccccaacggcataacaggaagggcatccactatggatggtcaatcttaacaaaaatcagcggtcatccccaactggcgtgcttcgcgtcaatcggtgcggcaaggtcaatcttaacaaaaatcagcggtcatccccaacgatgttgttgatctccacacggccatttctggtctatcttaacaaaaatcagcggtcatccccaacggggtatataaccctccagacatctgggtaggtctatcttaacaaaattcagcggcaaatttttattgccagatattcactaataaacagaaatggctgctacaccattgtaacagccattggagaaatcagcattgtttttcttttacttctgcttgatatgtgccaggaactcctcaaatccatcaccaccttcctgcggttcatactccaccaaaggatagtgctccatgacaaagtctatgtccttgtccccccttcctgaaaggttgactaaaatgacctcatccttactcattttctgagccagcttaatggcatgggctactgcatggctggattcaagagccgggataatgccctccatcctgctcaaaccatagaaagcttctaccgcctctcggtcggtagcactatcgtatataacgcggccaatgctgtgcaggtagctgtgttgtggtccaacacccgggtaatcgagaccactggcaattgaatagaccggcaaggcttctcccttttcgtcctggaggagcagactcttgaatccatgtagaatgccaacactacccttggtgatggttgctgcatgatcgggagtgtccaagcctcttccggccggttcaaccccatagagcttgaccagtttgtcatcgaggaaggcactgaaaatgcccatggcatttgaacctccgccgacacaagccacgattgcatcagggagggagccggtcatctcctgaatctgctttcttgcttctatgccaaccacactttggaaatcacggaccatcatggggaagggatggggaccaactaccgagccgatgcagtaaatctgggttacagggtcttggagataggcttcaaaggctgcatcaacggcatccttgagcgttttggtccctctggttacctcgactacggtagcaccgaggattttcatccggcttacatttggagcctctttcttaatgtcaaccgctcccatgtaaatgtcacactccagacccatcaatgcagcggcggtggcgagtgcaacaccgtgttgaccggcgcctgtctcagcaattacttttttcttgcccagttttttggcgagcagcacctctccgatgcagtggttgatcttatgggctccggtatggttcaggtcttcccgcttaaggtaaatctgagctccaccaactgcatcggacagacgcttcgcatggtagaccggcgaagggcggccgacatagtgtttttggaggtctgagagttcattcaggaatgccgggtcttggactatctgctcataggcttgggtgatctcgtccataactgcttgcaattggggagggatatacgaacctccaaactctccgaagcgtccttccttggtgggaagattggttgtgtttatttctttagtaagtgcgttctgcatagggtactccttcttgggttccgatgttactataggtagaaacattgtgtcaacaaaaaaccacaataaagtttctataaaaagaaacatttttcatgttgtctataaaacacccaaaaaagaatacaggattgctcgaatccttgtgtacttttcaaatttttcgaaaaaaaacccacagaatatactaatcctgtgggcttgctcctgaagatgtaagggaatttagattcccaaagactttctcagggcggctgcatcgcgtacgccaacggccttattcactaccttgccgtccttgtagaacagaagggtggggatggactgtacaccaaacgtgcctgccagttcgccttcctcgtctacgttgaccttcacaatctttgcctgatcggcagtgatttccttgtccaattgctcgagaatggttccctgcatgcgacacggtccacaccaagcggcccagaaatcgacaactacgggtacggtgctcttcaaaacttcagcttcatatgtgctcttattaacatgtttaatcattctgtgctcctctttactgtatactatacaggtgaattcttatatcgtatagatacattactacttttatttgctaacggcaactacttgggagtacttttttatgtatccagtgatcgatctgcattgtgacaccatctatgagctggagtatcagaaagaaggctccttggcagaaaacaagggtcatacctcgcttcgctggatggacaaggcgggaaaagtaaccacctgttttgccctatttgttgatacaaagcaatgcgtttctgcttggcatcaggcccaagctttacatgagcgcttccttcgtgaaatgcgtctcaaccaggataggatcataccggtttctcaagcagttgaacttgccactagcttcaagcatggggcgatactcagctgcgaggagctgcagattctggaaggaaagctggatcgtatccaaacactctcctcctggggggtgcgtcttgcaaccctgacatggaattatgagaacgacttgggtttccctcaccatcagaggggaggcttgaagtcctttgggtttgcagcagtagaggccctggaacaaaacaatattctcgtggatgtctcccacctcaacgacgatggattttttgatgtcgcatcggttgctcggaagccccttattgcaagtcactcaaattgccggtatataaccaatcacagccggaacctcagcgaccggatgatccgcaccatcgccgaaagcggtggggtgatagggctgaatttctgcccctcctttctctccgaggactggcactccagcagcctcgaggccatggtgcgtcatgctctccatctgaagaaggttggggggagctcagtattggcattgggtaccgattacgatggcattaccggtgagcttgccataccgcattatgacagcttgcctttgttgtggcaggctttggaacatagtggattcactgcttcagaattggaaggactttggtcggaaaatgcccttagagtcctttgcggagacgcttaagtagtaccttatcctcagcactgaccagcagggactcaacgcacttctggatggctttgcgccgaacaggttcctggagtcttcctgtttggagatagggtagggtttcctcacggttcttgcagaaggctgaggcataggcccaacctagggccatgaccacatagtagtggggattggtaaccgtggcgagctctctgagcgtttcgttgatgtgagaatcatcgaggtagtaatacatcaaggcaacaatacccagccgttggtcatacggattgctttctttgagcaaggaaagcaaatatggatacaacgaaggttctgctgtcaaatgtgatagacagccgctgaggttgtcattggttgcccaactctcattgaactgtctgagcttgttaaggtaggaaaaagcgctttgcccctccaacttgagcaagccaaagagcgaatagctgatttggatctcctcgtaggagggatcggtataggtgaagaaatcatcaagtgccttgatgccttcggttttgaaaagttctttgaccagcttctggatcatgggtgtccgtaccccatagatgggtctatcggataccttgagtttctcactgaaggcacgatacgatggctcagccatctcgctgagccttcgtcgtaattcgttctggttcaaagacccatgcgcttgatgaagcgcatcaaattgtccatggtcttttccatatcgtggggagcacgaggtttggcagccttgaagtcgatggccagacggttgatcgagaagattgcactcaccccttcattgtatgcgccttcaacatcgtctccgatgtcaccgacgatggcaactaccggtacattgactttctttgcccgccttgcaaccccgataacaaccttgcccctgaggctctgcccgtcaatcttgccctcaccggtaagtaccaggtcggctttggttaggagtttgtcgaagtttacggtctccagtactgtctcgatgcccatctgcaactgactgccgaagaaggctgccatgccgccgcccatgccgccggcagcaccgctgcctgcaatagcctgcacgtcgattttgcagtcccgctcgataacctttgcaagcttctgcatattggcatcaagaatcttgaccatttcgggggtggctcccttttgcggtccaaaaatgtgggctgccccggtaggtccgtaatacggattgtcgatatcacacatggttgtgatggttacattcttaagagcagggtccaaagaagaggtgtcgatgctctcgaccttgccaagcgtccctccggtgggaacaaaggcttttccgtccttgtcacggaagacaacgccgcaggcggctgctgctccacatccaccatcgttggtggcactgccaccaagacccacaataatggtcgtgcaaccagtctttgccgcgtcaagaatcaactcgccgactccgtaggtggtggtgagatcaggatggagttcatcgccaaccaaaggaagacctgcacaggccgccatctctacaactgcggtggttttcttgatcaccccgtaaaaactttccatgggaaatgcataagggccttggacggtaagacttcttctttcgcctccgagagcttgcaggaacgcgtcgacactaccttctccaccatcggctacaggaatactggtgacctgggcgtcaggatagtgttgcttgatagctctgtccatgatggaacagatttgttcggaactcatggttcctttgaaggaatcggggattaataggatgttcttcatcgcgggctcctcactgatgtgggggccgaagcccccgtagtatcagtatattacagcaaaatgagggagaaaagccagatgaaaatgatactggccaaaccttgcagcaaggtgaccatggtttgcgtcttatatccatcctcaggcttcagttttccgaagttggttaccacccagaaatagctgtcatttgcatgggataccgtcatggagccggctccgatcgccatgactgtcaaaacggctgccatagggctggcaagaccgagggcggtcatcatcgacgaactttcagcaatactgcccataatacctgcagtggtggtaatggcgactgtcgaagaaccttgggccgtcttcaagatggctgaaatcaggaaggggaagaaaataccgactgcagccagaaccgaggcatgttcctgcatgaacgctacaaagcctgcacttgcgatgacttttcccaatacgccgccggctgcggttatgaacaggatgggaccgacaaccttcagggtatcggtagtcatggtattgaagtacttcatctcactgcgttgaatgagtagcaggatgccgaacaacaagccgatggtcaaagctatgatcggtgttcctgtaaaggaaaacaggctggcaagagcgcctttccatttcaaagcagctgaaagcgaaccgagggccatggcgagaatcggcatgagaatcggggcgagggagaggaatccattgggaaggtccccaaaactcttcagcagcgtgtcgtaatcgaccccttcttcctcttctcccaaatcttctccgctctttattttcttgccgatatagttggcataaaaataggcgaccaccaacgaaggaatggagcagagcgtaccgatgactattaccataaagagattgtcaccgatgcctaaggttcctgcggcggcaatcgggcccggggtaggtggaatgagtacatgactggtgtaaagaccggcagagagggcaacggtcattgcaacggacgagaactgggtctttttgcgaagggcttttcggatagggtc

SEQ ID NO: 2980 - DNA, 13204 bp, synthetic construct
  source 1..13204: mol_type = other DNA
  misc_feature 1..13204: note = Synthetic
atgctttggcacgcatatccgaagcacgaatcgatcattgaaacgtacgatgtcggcgagctcaccgtcgaggtgctcgatcatccgagtcttcgttcctcgatcgatctcgcagtcgtcgcgttctcgctcctcgtgttccacaaaaatgagattatcgccgtattccagatcgagcaggaagatctgcgttccctgtccgagcggctggggtgcagcatccgcgagcttcaggatgaatatcggacgaaggggacgttgagcgatcctcgggtatatgtctacacgaaggagaggcggaatgacgagggtccatatgaagaggaactcacgttcttttccgcccgcgagttccttcttgaattgatgtgtgacacgttcgatctgcttttcgatcccgtcctcagagggtgaacacgaacgttccgcctacgtggatgcttccgctcacgtcctttttgtaaggccccaagaccgcagtattcccagggatgtggagaaccacgttttcacccccgacaagcaacgtcgggtactgatttgaacgttcatcgcttactcgggcacgaatcaacatgttgtcggcttcgactccgatccaatcgcctgcgacatatccgtggctgagaaacgcggcgcttgaaagatccaagacgatttcgctctctttgaaggtcgctccgaccctggcaggtcggcttgaggcgcaggatacaagcagcatagagaggagaatcatcaagagaatcttacgcatatttgatatatgtgccatccatcaactcctggcaggcaaggcgcagttcctcgctcgtgttcatggcgatagttcgttttttcataccccaatcctaccacaagcctaggagtttctctactgcaggggagtcaccggatcggtgcctcgaagaagagatgaaagaaggatgacggtgttttctgttaaaaccagacaattaataataaatgtccaagtcaatctgtaaaaaggtggaaaaaagagagaaatattctgtaaaaaggtgacagaatggaagaaaaatcgtgcaaaaacgtggagagtattttgtaaagccttataaataaaaagattaacctttttactgtgtatagaatgacgattttgtgctagttttgaatcctcgggatgatgattcaccgttcttatcagggagaatcgatctttttatcgcatcgtgcggtaagttctgttacaatggctaacagccatgttccatgggctaaaaatcatgtaggagattcaactatggccaagaagctatcgaagcggtatcgccagcaggcggaagagattcgaacgagactgaaagggcgttcatattcgatgggccttgatctgggagtgggatcgattggccttgcgatcgctgcaatggaagagtcaaaaaactacggttatgagcctactgatctggtgtttgtcacatcgagaatctttaccccctcaatcggagcttccgagcgaagagaaaaaagaggacagcgaaacgcgttgcggcatcgtcgaaaccgcctaatctttctctggaagcttttggcggagaggaaattgatgctgccatattcaaccaagagcgttgatgaccctgcaaggctccgctttaaagaagccatgatacaggccgatccctacaagcttcggctcaaggggttgacggaagcattgacgctgagcgagctcggatatgctctctatcatatcgcgaatcatcggggcgcttcctcgattcggacatttttggatgaagtgcaagacgcggatgagaaaaaacttgaagagcagcgttcgatcacgaacaagatcatggcagaatataatgtttccacgttcatcgaagtgctgaccatattcaaccgggatacgtttgtcggctatcgaaacgtggacaagctgaagggcaagtccgtcccggttccgactcgggacatcatcagcgctgaacttgatcgcctgctattaactcaggctcaattccatccgcaaacgttgagcgaggattacatccaacgaataaaggatgcgatcctctatgagaacgagaagatcgtgcctgagccggggaactgtccctactttcctgatgagaagaagcttccacgctgtcacttcctcaatgaagagcgcaggctgtgggaagccatcaacaacgcccgcttgggcgaaccggatgagtccggctctttccggcggtacaatcaggttcgttttagtgacaaggaacgacaggaactcttcgactatctcagatcagggaaaagtgtaactgcagccacgattgccaaaactttgtttcctcgttacaaaaatcatgaaatcatcctccagggccgagaccgcaagacatccaaaattgaagggtttcgattcaggcatcttgaagagaaaccattctgggcccgattcaccgaagagcagcaagatgagtttttcgcaatatggacgaacttcgcagatgaaaaaagggtggaagagcatttggtcatgcatctcggactgagtgaggaggaagccgccgatgcgatcaagacggtcaagctgattggtgattatggacctttgggaaagacagccaccttgttgttgatgaaatacatcgaggatggcgatacctataccgaagctgtgatgaaagccgtggaagccggagaattccaggaaacagcgacccgggaggttcaggagttcctgccgtactacggaaagattctttccgagtcgacacaggccttgatggggaagtattggcattcttcttttaaagaccgaattgacagaccgggcttcgtgaaacccaatacggatagagaagaagaggtgcatgggcgtatcgccaacccggtcgtccaccaaacgctcaacgagatgaggaaggtcgtgaatgaagtcattgagatccttggctccaaaccttctgaaatcgttgttgagcttgcccgggatctcaaggtcggggctgaaaagcgcgaagagatcagcaaagagcaacagaaaaatgaagccacagctcagcgcatctatgacacgtattgcaagaagaacggtctttccaaacgatatatccaagcgttccgattgtatgaggatcaacagttcatatgtccgtattgccttgaaaccatcagcgtagcggagatagcaggcaatcagacggatatcgaccacatcttccctatagaggacacctcggacaactcctatgcaaacaaggtgcttgcccacggctcgtgcaataaagagaagggtaaacgaacaccgtatgccgcattcgggcatacggaaaaatggggcaggatcatgcattatctcgatgcaacgccgagtatgaaggccaagcggtggaggttcgaaaagacggatgatgaatatgcagagtatttacaatccaaagggttcatgtcgcgtttcgccaccgacaacagctacatcgcaactgccgcgttcgagtatcttgcctgcttgtttgactacagtgagcgcaattccgttcggactaccaagggttgggagacaagcatcctcaggaaggcatggaatcttcaaggaatcgatgattactttggcagcatgcattgggacaagaaagattcccccgattcagtgaaaggaaagaaccggggcgatcatcgccaccatgggttggatgcgatggttaccctgtatacttcccgttcattgatcaaacagataaacacgctttcttccaaagggctgaaagctgagaaaattgaaagcctcattccgattcccaactactatcgtgatgattcgctgctcagggaggatcagcgaaatctattcagaaagtatgtccagtctttcttcgagcgcaacgcgtttgtaagcgtcaagacgaatcatgcgataaatggaccgcttgtgaaagataccgtatattcaattctcggtgcgaacccgaagggcgatgaactggtcttcgtcgtcaataagaaagtaaaggacattgcggtcaaacagggtaccgttgaggaggtcgagtccgcgatcagaggacggttcagtactcagggggcgtcttggtacgatgatgagctacgcatgaagattgaagcaatccagcgaacaaatgaggaaatcatcgatcgctacaaatcaaatctcgtccaagccgaacggaccctcatcgaagagaacaggaaactggaggaagagggaaagaaacagcgcaccattaatgaaaaattgatcagcaagaaggctctggagttgtccggaggaacgtatcagcttctttccaacaactcgagggtaaagacctttgtggtcaaggagccgaccgccacttccaaagggtacggattcgacaccggttcaagtttgtgcattgacttgtaccacaacgaagaaggcaagctccaaggcgaaatcatcagaaaagtctatgcgatggatccggattatactccaatgtacaaacaaaaaggatacaagctgtttgagcggatttatggaagagatattcttgagataacagcttcttcccccgtgcctgaagagaaggaggatgcaataaaaaaggttgcgagagtacgggtgcctaatgcgatggacgggagaacctatgtaaaagtggatacatttacggaagcaggtcccgagattcgactattcctctcaaatatagccaaagcagatggtggtcaggatgcaagtttcagaatcggttcaatgcaacaatatgatgtgagaaaagttcagctcagcccggcaggtttggtcgaatacgtttcaccagtgctcaaggatcttgaaatggaagggtagggatatgtggcgagtactggatcttgggggagataattattacctgcactcggaacgaaactccttggtcgttgaacgggacggtaaagagacgaaaatcccctatcaggatattcactcgatcacctgccatgggaacgggattctgtactccgattcggtattcaaggcttgtctgaaacacaatattccgatgatcttctgcgatgagcaacatgttccgaccggaatgcttcttgcgctatatcagcacaaagatagcgcacagcggcatgagattcaacttttagcgtcgttgcccagaaagaagcgggcatggaagttcatcgtagtccaaaaattgctgtgtcaaagcggctttcttgaatatcttgagttaacgaactatgccaatcaacttaagatgttctcacaacgagttcagtcaggtgatccttccaataccgaagcccagggtgcaaggttatacttcacagctctttatggccatggcttctatcggtcggatcgagaaaatgaaatcaacgccaagttgaactatggatatacgattctccgatccgccgtagcccgggcgatcattactgccggtcttcatccaagctacggggtgtatcattcgagtagaatcaatccatacagtttggttgacgacctgatggaaccgttcaggccactggtcgattcggtggttcactacctctgcagcagatacgggattgattctgagcttacgactcaagataagaaagagttgatgaggattcccggtatcgaagtggaatacaagaatcaaaagatggagttttcttatgcgctccatctatatgttcttgattatttggcgtatgtatccagagaaaaagaaacgatccagtttccaaggtattcctatgcttgggccgtataatgctatgtgggtatttgtaggatttgatatgccgactaaaacgaagaccgatatgaagcgggcgaaccggtttcgcaatgatctgctggagcttgggttttccagataccagctttctttctatgtgtattatgttccctcgaaacaacgagcggagacggtagctgatgccgtagagcgcaaggttccccctaatgggaaggtatccatattcttcatcaccgatcgtcaattcgggatgacccgctcatttttcggcggtcagcaaatctcagaagacccaccggaacaaggtcttctctttgagtaaaaaaagagccccccggaaaggggagcatgttgcgactgaagtcttattagagataatcgctgatctttgttaagatacccaaagtgtaatcgaagagtggccacgggtcaaggaaaccttgaaaaaatggtgaaatcttctgactacttgacctccaaatcttcctttttggcgatgaatactttccaactctatgactctatgaggtttatatacctataggttcatcttaacaaagatcagcaatcatccccaacttgctggtggtgcaactctcaccttcaactggttcatcttaacaaagatcagcaatcatccccaactcagcagcataacctccatttggggttcaaggttcatcttaacaaagatcagcaatcatccccaactgccgccaaacgcgcctctgaccgtcgcagggttcatcttaacaaagatcagcaatcatccccaacccagaatattgttgtagaaggaggtcatatggttcatcttaacaaagatcagcaatcatccccaacgtacagcaagcagaaccatctgcactgtacggttcatcttaacaaagatcagcaatcatccccaacgttctgctaggcgacttgtactgcgtgaagggttcatcttaacaaagatcagcaatcatccccaactaccactcaacagcatcctttcctttacccggttcatcttaacaaagatcagcaatcatccccaaccccttgtccttcaacgctctgtaatacggtggttcatcttaacaaagatcagcaatcatccccaacctaggacttggacaggaggcaagtccagttggttcatcttaacaaagatcagcaatcatccccaactaaccgtataattcaaattatcgacagtcgggttcatcttaacaaagatcagcaatcatccccaacacgccttcatcaagatgaagaatcagcttcggttcatcttaacaaagatcagcaatcatccccaacgcgaaagcgacatcatcctcactcacactgggttcatcttaacaaagatcagcaatcatccccaacgttaccaagtttgaggacgaggaagatggcggttcatcttaacaaagatcagcaatcatccccaacttcaacttcttcgtgcctgtatggaaacagggttcatcttaacaaagatcagcaatcatccccaacccaatactatcgaatacaacatcaactggtgggttcatcttaacaaagatcagcaatcatccccaacatcctcacttaccatatacggagtggcgaaggttcatcttaacaaagatcagcaatcatccccaacggcagggggcaaagagggcggatcgggtggggttcatcttaacaaagatcagcaatcatccccaacgaccaaaaccccgcacaatgcggtaagggtggttcatcttaacaaagatcagcaatcatccccaacacaattccatttacagcgtaaagctcatcaggtctatcttaacaaaaatcagcaatcatatccatgtttaattatctctgttgcctccctccaactcttgcccatcagcactcctctaagtatctttatccgaagggagaaattgtatgtcaaaacggataatcgttcttttaatattattatttcctagcttgctctttgccggtggaacgagagagagcgtttccgataaaccgattgtcgttgtgagcatcttgccccatgcgttctttatggaacagctcggtgggtcggatgtggatgttcttaccttggtgggcgaggggcagaatccgcactcctatgaaccgtccccctctcagatggcccgactctccaaagccaaagtctggattctcagcggaatcgagtttgagttggctctcagaccgaagatccaaagcctgtaccccaaactggtcatcatcgacggaaccgaggggatggtcttcagacagcttgaaggggatgatcatgagcatgatccgcttaatattgaccggcatacatggcttggacatgatcaggtgaaggtgtttctcgaccatgcccttgccgccctgatcgatctccttccggagaacaggaagatctttgaagatcgtcatggggtgctggtcaatcggatcgacgctctgtttgcgaaattgaaagaggatctggcaccgctttccggccaatcggtgttcgtctaccacccgtcattcggatatctcttggatgacttcaacctgacgcaagtcgccgttgaaaccggaggcaaggaacccaccgccaaagaccttgcttcgttgatcgaactggcgaaaagagaacgccccaaagcgatcttcgtccaaaaacagttcccggtctccggtgctcagacggtcgccgatgcggtagggagcgccgtcgttcccctggatccgttagcctatgattggcttgataacatcagagcgatcggtaatgctctggtggaatcaggaggaaggaagtgatgatcgaaaaatcgccgatcgcccttcaattcacggatgtctcgttcgcctatccgactttgcagatattggagaatgcctccttccactttcaccaaggcgagttcatcgcgctggtcggacccaacggaagcggaaagacgaccttgctgaaactgattctcggtcttgaagaggcgcagaaggggaccatcaccctcatgggcggcagagtgaaggcgatgaggcctgtgatcggatatgtccctcagcacgccacctacgatccgtcatttcctatcagcgtcatcgaagtggtgatgatgggccttgtcgattccacccgtcgattgaagaaacaggaaatccgaaacaaagctgtcgaagcgttgaagcaggtcgaattggaagacctcgtcgaccggccgtacagccaactctccggtggccagcggcgacgggttctcgtcgcccgggcgctggtttccaaccccaagatgctgattctcgatgaaccgactgccaacatggacaaagagagcgaagcgcgactgtactccaccttggagcgcctcaaaggaaacacgacgattctcatcgttacccacgatacccgctttgtttccgatctgaccgatcgggtcttctgcgtcgacgtccaacatgaaggcagtgccggccgaacggtagtccagcacgccttggagaacatcgaaggggagtatcagaaacgagtccgccacgatgtcgagataccggccgatttttgcgcctacccgagggagatgccttcatgagcggtttttttgaagtattgttttctcccgatgttccgtttatccgcaatgccctcttcgccggcatcctcagctcggttcttttcggcatccttggcagcatcgttactgtaaaacgaatcgccggcctcgccggagcgatcagccacgccgtgctcggtggcatcggaatcgccctgtatctctcggcgaccggaatcgtccccaacttttcaccgatagtcggggcggtcatcttcgccctgctttcagcgtttctcatcggagcggtctcgctgaagagcaaacagcgggaagatacggtcattcaggccatctgggcgatcgggatgagcatcggcgtgctcttcatggccaagacccccggctacaccaatccttccagttacctctttggaaacatccttctcatctccagttgtaatctgatcctgctggctatcctagatgtgatagtcctctttctcgcttggcggttctatccgcagctcgaagcgacgagctttgatgaagagttcgccgctgtccgggggattcccacccaagcggtgtttttgatcattcttgccgttaccgccgtcgcggtggtccttcttcagacgttcgtaggaatcgtgatggtgatcgcgatgctgacccttccggcgggaaccgccgggtacacggcgcgcaacttagcatcgatgatgttgctctccacgctgtactcgttcctcttttccgcaggagggctggtcgtgggctggtcactggatttgccggtcggggcggttgtcgtcgtactggcaggtctcgtcttcctgggctatgccacggtagcggtgctcaggaagaagcgttcgagtcgcgatccttcatcaagttgaaaagctgcaggcggttattcacctccagcttcgcatagatgttcttgatatgcgtcttcaccgtatttaccgagatgaagagttgtttggcgatctcctggttggatgacccatccgccaaaaggcgaagaatctcctgttcccgttcggtgatgccgaaacgctcggtcaggttcacttccggaagagccggttgctcataggtgaggaagtagcgtctgctgatgaagaagtagagatgaaccgagagaatcgcgaagctgaggtagaccaccttgaagctgaggtggaggaagaagagaatatccaagggaaagagaacgaccagcggcaggaaggtcatcgcgacccctttaagcagccactcctcctcccatgtcgaagcctgtttcacgaaaaaaagcgccacgatcgcatggatgacataaaaggtggaagcgctgaaaaaatggtaatgcatcgtttctttcagcgctttgatccaatcgcctccgctcttaccgagaatcgcccaaatggaaatcaaaaagaagagaatgatgagaaagcgtaaaatggtgttgcccaattttttctgcttttcacttgccggcagccggttgatgaagaaacggctgaacgtgaagagcatcgctgtagtgagaagaatcgagatgatcgtcgctccgagcgcgtacatcgtataggaaaagctcgccaagcgttccgctgaaagggaacgttccagataggtggcgaggagacttaaaagcatttgcaggctcaaggggacgagaaccgtcagaaagtcggtggtcagctcgtcggcgatacggacccgtagcaagatgacgaggcaggtgacggaaaagacgagcgcagcggtcaaaaaaagcaggatgtccgaaagaatgagcataaaccctccgttcggtcatcctaccatgaaaaaagtgttagaaccaagcgttcattccgatcgtgatcgagctgttgttctcccagttcttgaagaggctctgcttgtctccgaagccgtcgtagtaggcgccccgggcatacacgctcaaggaatcattgatttcatagctgagcgatcccaaagcgacgagactccggttctcgattccgtacgtcgccgccattcgaaccttgagccgctcgcgcatgagcggcatctcgaaggcgaccgccacgctgctggaataggagttgtcattcaggaaggaagcgatataatcgacggggatagtgatatcaagagtcgtctgatcaaccgagggttccatatcaccgaagatgtactggccctggtacgccaccgaagcgaagaaggaggtcttgggctccgtataggagagctccgcgaccgccaccgctttggtgctgtatttggcggggtcttcattcttgaaatcttcgctgaggaacaggccgccttcccaggcgattgtgaccggaccgacgagaagcgatccttccgtaccggcaaggtggtagcgggtgaagtcgaagtcgatggatgtaatctccacttcctgaggaggtgcaagttttgcctttgctttaatatcaaaccccatctgagggtagaagctgctgaagagcatgaagccgaggtccaggtcgccgatgctgaagcgatagcggcctccacctccgagggctttccagaactttggatgttcgtagattccgacccggatattgtccgagttgattggaagaaccattccgtttcccagatcgaaggttgcccccagaagattgtcggtgtccatcggtgcgtaccggtcggatgcgtccatgtccatcggccggtagaagggcttgatgatgagatcgagggatgagcgcttgaagtaggcgttgtagacgatcatgaattcgcttttcttcatcgcttccggattatccagaatgccatgggtgaaatcctgggcattgatgatatccacggcgtggagagtcgtgctcgttccccatggatgggtgaacattcccactttgaggtttgtcgggccgaagaagaaggtgaccgccaaagtgcggacggaaaggggatcgcgaagaatcggactgaaagagaaatcgacttcagtccggatcttgtcccggttctcttcaaaagtcattcccaacgaaattccatagccgaacggctcatcctcatccaagggatagcaggtgccgaacccctcgacgaagagggatgtgagttctttcggcttcaccgtttcggtggtggcttgcccctcctcgtcgtcgagggtggcaaaaaagtcaaatgcaaagagcggggttacaaaggcgataagcaataacagtacaagtagtttcttcatcggattacaacctccctgtttctaagaaacgaacagtgaaatatgcggatggaatgggaacatcgtagcgaacctgaaccatctcgagacgagtggcgtgcccggtcgcaattgttttcatttcgactactttggtgatcgggcggcttccgactttgccggtttccagcgtcgtgagggtttttagcaaggtcgtccggtcgggtgcatagaactcgaccttcaagggaaggaacgtttccttttccacggtcgctatattctttccatagctcttgacggttttgggaatcgattcaacgacatacgtcgtcgccgtttcttcaatcaggcggtgggtcgcctcatcggcgtcgtacgtcgtcgacgccatatcggaataggagaaatcactgcccatgaacgatcctccctcttccgtagcgctgatcttccgcactcgcttcaacgccggaagatagatccactggtcggtgacgcctttttcttcaacggatagaaagcgggtgtttttgacgctttcgggggagaggaacacggtgatgatcgacgtgttatcatcgatcgtctgactgagggtctgaatgcgccgctcccgctcggtgccgttggcctcgatgagggtcaatttgaggtccatggcagcagtatcggctttctgggtttcaatgaccctgtccatgatctgggcggcggtcggcgcggcgacaagcagcgaggggataagaatgagaagaagtatggta

SEQ ID NO: 2981 - DNA, 5436 bp, synthetic construct
  misc_feature 1..5436: note = Synthetic
  source 1..5436: mol_type = other DNA
tcgtagaggtaggtgacaccgtttttcttgttggtgacacggatgatcttcggcggtttctcgttggcatctatcatagatacaattatacctatgttttatgcttttgtcacgtactttctgccaatatttgcaactatttaaaagaattactgaattcctagatataatttggacgggaatttgagttggaatcactctccttgtgtttggaaaacagggtgattgggtttgccaatgtttcttccagattttacctgtcatatgttaagttaatagtaggtaagataataatttgttgaaaactgatcatttcgggtaatgttttttcattttcttgggcttctttcttgacttgggctatacttgtcactatcagcaaaggtgtagatttaagaaaaggagttttcagatgtccaagaaagtttcgcgtcggtatgaggagcaagcgcaagagattcgtcaaagactgggggacaggccctatagcattggtctggatttaggggttggttcgataggtgtcgctgttgctgcatatgatttggaacttcagcagccatctgatttggtctttgtggcttccagaatattcattccatcaacgggagcagccgagaggagacagaaacggggccaaagaaattcattgcgccacagggcaaatcgtcttaagttcctttggaaactcttggcggaaaaaggattgatgttgccattctccggtgaagatgttccagaccctgcccgacttcgatttgctgagccgttgttgcacgcaaatccctatgctctgcgactgaagggattgaaagagcagcttacactttctgaacttggctatgcactgtatcacattgcgaaccatcggggctcttcctcggttcgcactttccttgatgaagagaaaagcagtgatgacaagaagctggaagaactccaacagatgactgagcagttggcaaaagacaaaggcctgtcaacattcatagaggttctttctgcattcaacgctgaggggctggtcggctatcgcaacacagatgctctcaagaccaagggggttcctgttccaacccgtgatatcatcagcaaagaaatcgatgtattgttgggaacgcagaagcagttctatcctgacattctttcagaaacatattgtgaacgcatagtctcggctatgctgtacgagaatgagaaaattgtacccgaagctggctattgtccctattttcctgatgagcaaaagcttccaaggtgccatttcctgaatgaggagagaaggctttgggaagcgatcaacaacgccagaatcaagcggccaatgcaggacaatctggcaaagcgctatcagactgagtctttctcggcagagcaacgtgctgttctctttcaccacgcacggggtggaaatgacattactcccaagtttgtgcagaaagagtttcctgaactgaagacaagtgtgattgttcttcagggcaaggagaaggcaaaccagaaaattgttgggttccgtttcaagaagctcgaggacaagccattttgggctcggcttaccactgaccagaaggatgcgtttttctctgcttggacaaatattcccgatgaccaacgcttgaagaccgtgctggttgattctctttccttgaagaaggaagaagcggaggatgcgctgaagacaatctcccttatcggcgattatggcccgatagggaagacagcaaccctgctgatcatgaagtatctggaagacgggctcacgtatacggaagcaattgagcaaggaatgactaccggagagttgcaggaactctccgcatgggaagaacaggcgttgctaccgtattatgggcaaatcctgacaggttcgacacaagcgttgatcggaaaatactggcactccgcattcaaagagaaacgggatggggagggctttttcaagcctcatacgaacacagaggaagagaaatacggacgtattgccaatcccgtggtgcaccaaacgctgaatgagctgcggaaactcatcaacgagctgatcggtatcctcgggaacaagccgcaggaaatcgtcgtggaacttgccagggaactgaaagttggtgctgagaagagggaagagatcatcaagaagcaagcacagcatgaacgtgaggctgccttggtgtattccaagtattgtgagccgaacaatctggataagcggtatatcgagcggttcaaactgttggaagaccaaaacttccagtgcccatactgtcttgagcatatatcggttgcagatgtcgtaagcaacagcgttgatattgatcacatctttccaagagaggataccgctgacaattcctatgggaacaaggtggtggcgcataaacattgcaacgatttcaaagcaaaaagaacgccttttgctgcattctcaaatactcccatctggggttcagtcatgcattatctggatgaaacgccgggtatgtgggccaagcgcaagaaattcgagaaaaatgaagaggagtatgccaagtatctccaatcgaaaggctttgtatcaagattcgaaacggacaacagctatatcgcaaaggctgccaaagagtatctgcgatgtttgtttgatccgaataatctgactgctgtaggatctttgaaggggcaagaaaccagtaccctccgaaaagcctggaatcttcagggtattgactcgtatctggggaacaagcattggtcaaaggctgatgatgcttctccaacagaaaggaagaaccggaatgataataggcatcacggtctggatgccatcattgccctctattgttcccgttccctgatcaagaagatcaatacgatgtcagcccaaggcaaaagagcgagtgaaattgaggcagctcttcctattccaggatttgccaatgattccactttgacagtggaagaatgcagggacctgtttaggaagaagatacaatcattcttggaactgaacgcatacatcagtttcaagactgataatgataccaatgggccacttctcaaagataccgtgtattccattctggctacgaaccccaaaggtgacgaactggtatttgtcgtgaagaagaaagttaagaatatcgcagtcaagactggtggatacgatgagattgagtcagcagtccaaggtaggtttaccgggaaaatggccaaatggtattccgatgaactgaagctccaagtgagtcaattgcaggcaaagaatgcggcaatgctccaaacgtataaagagagcttggctaaagctgaagaactgctggaagagaataacaaaactcttgttgaaatgggtaggaaaccgcttcaagtgaacgagaaagccatcagcaaaaaagcgctggaattggtggggggaagctattacctgctttcaaacaatcaacggacaaagacctttgtcgtgaaggagccttctccccagattaagggatttgccttcgataccggttccaatctctgccttgatttctatcacgatgctcaagggaagctgtgtggcgagattatcagaaaggtaaatgcaatgaattcttcttatacttctgagtatagaaaacaaggatttgagctttatgtacggttgtatcagggagatgtgtgtgaactgaaagcagctgaatattcagaaaacgaactttcaaatttggagaaaaccaccatagttagggttccgaatgccaagtttggccgaacacttgtggtaatcaataccttcacggaaacggcatcaggcttccagattttcttctcaaatttgggtaaatcaaaaagaggccaagatgctagtttcacgctctctactatcaagaattatgatgtgcgaaaagtacaactgagttctgcggggcttgttcgatatgtgtctcctttgctggctgataaaacgctgaacgaggaggtataagcgatgtggagggtgattgatcttggcggtacagggtacttccttcatactgcacataacaaactcattatcgaaagagaagaagaggaagcccagattcctttcgaggatattcactccatcatttgccatggtttgggttttcgctactctgatgcgtttttcaaatcatgcctaagccataaggttcctgttacgttttgtgatgagaagcacatcccccaggggatgttgcttcccatgctgcagcataaggagtcctcacagagagtagaccttcagttgaaggcttcattaccccgcaggaaacaggcatggcagcaaatcgtaacccaaaagttgaagaaccaacgagactttcttgagtttctgcaagttccaggggtcaaacggctggatgtgttgtcccagacggttctctcaggggatccccgaaacaatgaagcacaaggggcaaaggtgtattttgaatccatgtacggttcaggattctttcggtcagatgaagacaatgcaataaacgggaaacttgattatgggtacagcattcttcgctctgctgtggcccgtgctgtagttgatacagggttattgccttcctgtggtgtattccattcgagcaggattaatccattctgtttggttgacgatcttatggaacctttccgtcctttggttgattctttggtgtttgccatgtgtgcaaaacatgggatagtgaaagaacttgagccgcatgagaagagagtgcttatgagcttaacgggtagggaagtggtatttgatgaacaggatgttgagttctcttatgctctcaggctctatgtgttgagctatcttggatttttggctcgcacccgagactctatccaattcccgacatatgcctatgcttggtccgtataatgccatgtgggtatttgtagggttcgatgtacccacccttacaaaaattgatgtgaaaagagcaaatcgttttcggaacgatcttctggacatgggattttctcgcttccaattgtcgttctatacgtattatgttccctcgaagcagcgagcagacacgttggcaaagcaagtagagaagaaagtccctccaaatggcaaggtctcaatcttcttcatcacagatcggcagtttggtatgacaagaacgttctatgcgggtcagcaggttgacaacgagaccccagagcaagggttgttgtttgagtaaaaaagagctcccaaattgggagcattttgcgacttaagtcttattagagataatcgctggtttttgttaagatatgaccatcatagaagtccctctgctcaaagtcaagaaataatgactcaaatgctgaaacattctctcatcatttcccattttttcaccgttggttgctgattaattctttattccattggatgatattacatcaatggtctatcttaacaaaaatcagcgatcatccccaacattcagatgcgctacaattgcctcatagtcggtc

SEQ ID NO: 2982 - DNA, 16832 bp, synthetic construct
  misc_feature 1..16832: note = Synthetic
  source 1..16832: mol_type = other DNA
gaaaatcacaatggctaaaccattcacaaagccaagcatgacagggtgtggcaccatacgaatcagcttacccagcttcatccagcctgccagcatttgcaaaatgcccattaataccaccgtggcaaaaaggtattcaacaccatgatcagccactaaggccaccatcaccacagctaaagcgccagtcgcaccggaaatcatgcctggtcgcccaccgaatatagacgtaattaatcccaccatgaaggccgcgtataagccgaccaaaggatccacattcgccacgaaggcaaacgccacagcttctggaaccagcgccagagcaacagttaaacccgacagtaagtcatttttcagactcgccgtcttattcactattaaatcaatcatttttcataccgagcaggtgaattaccccagaacggggtcagatggcgcgcattctacagaaaaggcttgttgtactcaaatcacaaccaacctttcaaaacttatcgacgttcagtgaccaactccattagacctcatcaggcgttaacttcttgtcgctacccatggacgccgttagcaccttcttcatcgcttcactcggagccatatccaactccttaaccttatctttaggcataaataaggtaaaaccaccgatctgataactcataggaatatacacggcaattaactccgaacggtcacccagcgatacatcttcactggtgacgaatccaatcacttcagccccttcttgaacctccaccagtacggctttttgcagctcctctttttcagagggcgacaaaaaacgcaccatgtcattaaaagcgctatagaccgcactaaccacaggaatacgctccatcagtttattcaagccgcgtataataagttgtcctagatagaatttaatcaataaaccaagaccgaatatcaaagcaatgcccaaaataagcccaagccctggccaatacatactcgcaggcaataccagtaaaagtaacttactcaggtaagtttcaagggtcgaaatcaaccatacaataattgcaatggttagaacgattggcaagatggcaaacaacccctgaacgaatattttacttaatgttttcatataacctttctataaacctgttatcaaagaagagcttttattctttttctgcaaaattcttaaactgctgcatgaactgcatggtttgttttggaaacgcttttttcatgaaaaagcccatcagcttcatccccaaactagtaaattgaaattccgtatgcgttgtccagtgagtttgatcgctaccaactggcttaaaccggttttcgacgcgattaaaaacaccttgagtttcataggtaccagtaaactcatcaggcaaattacgcgtttcgatggtctccaccatttcacacttacgcttccccatcaagtaaacaagctttgactgcgcgcccggttgccctgcctctccactgatgtgctcgaaagagaccaactccggctgccactttttcaggttatgagggttatcgaatagcgctatcacttcatcaataggtttattgataataatatccaacgtatatttcatgagcgactccttcttttgggctgggcttaggactaaatcaaagactaagtcttgtagctaacgtgctgatattaaacagtctataacgcctaacagcgcaatcctagcaaaatttgactgtcagtctttataaggcgaatgtttgaggtagtcttgataacgaatgtctagccagctgtcttcttgttcgatggcatgctctatcgcgttacggaattgcgggtggctgacatagtgcaaagagtgtgtgaacactggcataaagcctctcggcaatttatgctccccttgtgcaccaggctcaaaatactttaaaccatgtttaatggcgtactcaatgccttggtaataacaggtttcaaagtgcaagaactcgacatcctcaaagcacccccagtaacggccataaagagacctatccgagcgcataaagaaagcccctgctactgcttggccttgacgcttcgcgaacaacaataacgtctgctcaggcattgcttgtgcgcaagaggaaaagaagtcttgggataattgcgcccagccaccttttttatcaaaggtattacgatacatctgatcaaacagctgccaatcctcaactgtcgcactattgccatctaaccattcgaatgaccattcactatcagttacgttaaagcttttacgttctcgaacgatgttcttacgtttttttgccttcaagctagacaggaactgttggaaatcgtcatagccacgattggtccagtggaattggatatcgtgtctccgcaataacggcttattaccaagcgcctttgccaccgtctcattaacaaaattaatatgccagctactcatttggttctgttctagccactcaatagcagcgtttatgagcgcaggggtttctttcatagataaagagctgatgaatctagggcctgtaattggagtcatgggaacagctgtcaagattttggggtagtattctaagccatggcgctgataggcatcggcccaagcccaatcaaacacatactcaccataagagtgcgctttaatataactgggtagcacggcaactagtgccccacacccctcttccggctcaccttcagcactatctttctcataattgcttttctcacagccactttgacgataaaaagctaaatggcatggctgccaacctgtttctctgcttacagagccagtatcttccaaagcttttaagaattcatattggacatagggattcgtccgttcggcttcaggtaaatgcaacagaagctctttccagtcgctcggagctatatcattgatcgatgttacaggtttaaggactatcggcttagacaaaagaagcgaatgtttaaaaggggttattcgattgtaacgaaggggctgaaccaagccaataaaaaaacccgaacgctatgatgggggacgttcgggttttcgaggtattggggtaaaatacctaatgaaacgataatttggggtagaaactagaataacgtaatgactagcgctgataatacaacaacagcaattacagctactaatgcactctcgatatgctcgctcataaccatctcctttaagattaagaccgtaagtgtttgccacgggacgaattataggcgctttagatgacagttttaagacaatttcacaggatattttttaacctttcagataactaaaactaatagaatgcaaatctgagattgaatccagattgaaaaggtgaccccgttcacgaaatcaataggattgagcgaaattactgggttaaaaaagaaaaactaatgcaaaaatggatacaagaaatggtggggcttaaggattctttagaagatgaaatctgtaaaattaagcaacccagccgtagctgggtcgtctattttgtgttctaaaacttgttaacagattataaaacacgtttcctaagttgctatttgtgaccgtcgtcacaaactagacagtaccgctctaaattggtaatgtcaataaaaaaaccataaaagggaatgctcatgtcaaaaccatatttactttctttagacctaggtacttcatcgattggctacacaacatttgccttagatgaagacaaccaaccaactgatgtgactgacttaggcgttagaatattttctgatggacgcgatcctaaaaccaaagagcctctagctgttagccgccgaattgctcgcgggatcaggcgcacgcgtgatcgaggacaaaaccgcgtcaggagattagtgaaagaactaattgattttggactactcccagccaatgaagagtcacgaaaggtagtgtttgacaaaatctgtccgtacgaagcacgccataaagcagttaacggtaaagtcgacaaagaaaccttagctagggctattttccacattggaaggcgtcgtggttttaaatcgaacagactggctggggaatctgaagaatctgattataagaataaaattaaagaattacgccaagaacttggcgaaaatacactaggtgaatacttatacgcaaaacttaaggaaaatcataaacttgcgaaggccaagcggcctatagaacaaaaagtaatccgctttaggggaggcgaaaccgacttctatgctgatcgtcatatgtatgacaatgaatttcataaaattagagcaatccaaggtaacgatcatctagccgatgagcagtgggatgccctacatgaaactgctttttggcaatacccacttaagccagttccaaaaggaaaatgtcgcttctatcctgaagaaactcgcgcacacattgacttgccgataagccaccagtaccgcatatttggagaagttaataacctgaagtatgtttctaaaggcatagagcacgaacttaatgaacgtcaaaggcaggctctatattctgaattaaataataagaaaacattaagcttcaaaggaatgttaaaacttaaagatgtacataagtcgccctactttcccagcgatgcgacctttaaccttgatgtcaaaagccgctctggaaagcttcatggtaataaaaccatgtgcgacctaagaaagccggaactcttaggagagttagcagatgaactcccttccaataaactcaatgatattgttcactacttggttgagcctttaaaaaaggtcaatggcaaagatgtcattgttgaaacaccagaacttaaagcctggttaaaaagcaaactaccccaactgagtgatgagcaaattcgaaatctaagcaagtatcggtttaaaagagatacgccatcagtttcacgcaaattcatggaacaaattaaccctgtacttgaaaaaacggggttagtttattcggatgccgtagcgcagctagaagatgaaaaaggtgagaagtttcaccacagcttcataaaacctaatactttcgatgagcttccctattatggcgttgccatgccagaatcagtctggggtgatcactcagaaatcgacaaaaacaaagctcctgatgaacgcgacgaggatgcttaccagcacgggagaattgccaacccaaccgttcatgtcgctctgaaccagttaagagtcgttgtgaacgatgttattaaaaaggtagggacaacaccaagcaagattcacattgaacttactcgtgatctgaaaaactcgaaagaagcccgcaaacggattgagcaagcgcaatctaaaaacaaaaagaaaaatgatgaaatccgtaagtttctggaagaagagttcgatatagacaatcctcaccgagaagatttccagaaaataaaactatgggaggagctgggtaaacaaggagcaaggcactgcgtattcactggtaggacgattagcgcaagacagttattcaacggagaagttgaaattgaacatattgtgccctttagccgctgttatgacgatggcatggttaataaaacattagcttataaaaacgttaaccaccgtaaaggtaacaaaactccggcagaagcttttggcggagaggagtacgaagcaatcctcaagcgtgcattggccagctttggtcaaggccctaagtttgagcgctttaaagaagatgcttttgaacacttttatggtgaagaaaaaggcacaatgatccagcgccaaataaatgataccaaatatattactcgtaaagccgcccagtacctaagctgtatctgcactgacgttattacagtcaatggacgtctaacagccattctaagagatgtctggcaattaaatcacttcaaagacaaagaaactgggcattaccgggatgatcaccgccaccatatcgtcgatgctttcgtggttggtttaacatcaagacgactcattaagcagcttggtacaaggcgctctaagcatgagcaaagtgaacgcaacctctaccacttcgtcaaacatcgcgttgatgatattccacaccttaaagaacagctaatgcaggctctggataatgtttacgcttcctataaaccagatcataccgaccaaggctcaatgtttaatgataccgcttatggcattgagtatgacgacgacggcaatcaatggtgtattacacgaaaggctgtaggaaacttaagttgggaagaggtttttcgtatacgggggaatcgccagagagaaaatcttttggattatctaactgacggtcaaggcattgattttgatgttcagtctattcgaggttttacaaagcaattaaaagaacattttaagaaccagaaagagtttgaaaaggccttacagaattactctgaaaaaactggcattaagaaactgagaataaatgtacccaataacagtgttaagcctatcccaagtgccccttacaaaggttatggcttaaacggctatgcttactgtgatgtttggcaaataccaaccaagaaagatcccaaaactggcaaatggctctataaatacgaaggagctttcgtcccctatgccgaaattaaaaagtataaaaagaaaccaaaacgcccagtagataaacaagggcgaagccacccagcagcgaagcgtctgatgcgactttataaagacgataatatacagttgacgaatttagaaactggagaaatcgaggtgtttagggttgctggttataatacaagcgttaactgtattgacatacgtcctaacttacaagcagttaacaccggtcaaaaattcacgtcggtaaatacaatattccaagatcataaagtgagccggatgaaacaataaatgcgctggaatatactggaaatagctcaaaacggacgctatttaaagctttaccgtggttttctccttgttatggacgacaaggaggagctagggcgagtcattattgatgagctcaacagccttgtgctcagtgctgaacaaaccactctttccaaacaaatcatggtaaaactagcagagcatggcatcccaatagtcacctgtggtacaaactatcaccccatatccatcaccctaccctactcggttcaccaccaatctaacaaagtcattcatcttcagattgatgcttcgcagcccttaaagaaaaggctgtggcaacaactggtaaaaaccaagatttttcaccagttccgcgttttagaatattgtgatccagcgctatcagcagagacattacagttaaagcgtttaagtgataaggtccgctctggtgatcctgataattgcgaagcacaggcttccagagtttactggcaatcgttaatgggtagtgactttagacgcagaccacaatctatcgatatcgaaaatagcgctttaaactacggttataccattttaagagcagcctgtgcccgagcggctatcgctgctgggcttaacccaagccttggcctacatcatcgcaatatcaataaccctttttgtctagctgacgatcttatggagatttacagaccgctagtggatctaaccatccaaacaatggatttagaagattcgctgactccagataacaaggctactttagcaaaaattctacaagccgacgtaagacttaacaaagaaaccaccaccgtaaacacatcgatgcagaagctggctcagtcagtagtacaaagtcttgaaagtaaagaagttaatttgcagatccctgaattggttatataatagacaatccgctacaaaaaaggagtagccatgtcaccgattaggtacattagtggttataagtttatgtggatgatggtgatgtttgatttgccgacgatgactaagtcggatcgaaaagagtatacgcgttttagaaattatttactcgattgtggctttgatatgtctcaatactcggtctattttaggctggtctcaagcaaagagcgtgtggaacggtttgaggataaaatagccgatcaactaccagaagcaggcaaagttcagatcattaccataactgataagcaatacgaaaacatcaaggcctactatgggaacgaccctgaaagctgtaaaaaaacagaccaacttcacctattttaagcgcgtccgcttaacttttgcgatgaagccagccaatttttatcatatctttcaaaaacttagcaacgttctattatagcaacttaggaaacgcgctcaatccgcaacgggctgattgtcccttaatcctgatgcgctattatagcaacttaggaaacgcgctcaatccgcaacgtcgttttctttacagctcatcttgaaaatattatagcaacttaggaaacgcgctcaatccgcaaccggaacagtaatgagtgaggaaatgtgtgaattatagcaacttaggaaacgcgctcaatccgcaaccgctacaaccttattcaatcaatgtagcatattatagcaacttaggaaacgcgctcaatccgcaacacaacggcaatgtggtagaccacacattagattatagcaacttaggaaacgcgctcaatccgcaacgtgcggttcaacaccaccaccaccaacagcattatagcaacttaggaaacgcgctcaatccgcaacgtggaactgtacggtgatcgccttggcttcattatagcaacttaggaaacgcgctcaatccgcaacattcgcgcggtcgtttcattctgcttgctgattatagcaacttaggaaacgcgctcaatccgcaaccacatcagcgcgaccacgtggaatgcctgtattatagcaacttaggaaacgcgctcaatccgcaacaaagaattgataaaccaagtgatctagtagattatagcaacttaggaaacgcgctcaatccgcaacaggggctttgttgtgctgattacagcgattattatagcaacttaggaaacgcgctcaatccgcaactagttggcacggcggctagctttatagccaattatagcaacttaggaaacgcgctcaatccgcaactgcagcgagctatttacggcggccacaatcattatagcaacttaggaaacgcgctcaatccgcaacaaattcgattatcgtgtggtgatggctaaattatagcaacttaggaaacgcgctcaatccgcaacagaaacaatctcaaactgataattgtacgattatagcaacttaggaaacgcgctcaatccgcaacatgcaaaagatcataacttaagtatatattattatagcaacttaggaaacgcgctcaatccgcaacgaccgttaggtaacagaaagccttctgtaaattatagcaacttaggaaacgcgctcaatccgcaacattgctacgtgcagacctagagataggtaaattatagcaacttaggaaacgcgctcaatccgcaacggttgcatggtttgttgtgtttcgttgctgattatagcaacttaggaaacgcgctcaatccgcaacaggtggtttttgctttgtgggacacaggaaattatagcaacttaggaaacgcgctcaatccgcaacctgatcgatcaaggttacttatgcagagtcattatagcaacttaggaaacgcgctcaatccgcaaccgacagcattaacgatgttacagactgggcattatagcaacttaggaaacgcgctcaatccgcaactctattgcgaacgcccagacgtatataaaaattatagcaacttaggaaacgcgctcaatccgcaacatgaattaagtcatgctcggaaatgtgttgattatagcaacttaggaaacgcgctcaatccgcaacttaaatcatggttgctaaaaataggcgctgattatagcaacttaggaaacgcgctcaatccgcaacgaacctctgtgactatgctctataagcattattatagcaacttaggaaacgcgctcaatccgcaactggttatttggtgcgggtgctattcgcctaattatagcaacttaggaaacgcgctcaatccgcaactcttttggatttttggccaaatcaaaagatattatagcaacttaggaaacgcgctcaatccgcaaccattaacatcactgaaaccaagaaggcaaaattatagcaacttaggaaacgcgctcaatccgcaaccaagtctagaattgagcgggttcagtaacgattatagcaacttaggaaacgcgctcaatccgcaaccataccaatcctctttgattgcattaatacattatagcaacttaggaaacgcgctcaatccgcaactttctttgcaaaatctaacgcggtggttgtattatagcaacttaggaaacgcgctcaatccgcaacggctggcaacgttggtcaaactacagtgctattatagcaacttaggaaacgcgctcaatccgcaacttgtaactgcttcgccattcttcaccatgtattatagcaacttaggaaacgcgctcaatccgcaactaaaaagcgcgcgtgcttagtgtggcatcgattatagcaacttaggaaacgcgctcaatccgcaacttgaagtaaaaaaaggtgattatgtagattattatagcaacttaggaaacgcgctcaatccgcaacgcgtgtcagcgttgtattgtatcggcggatattatagcaacttaggaaacgcgctcaatccgcaacgctacccaggtgggcgatagagccttaagattatagcaacttaggaaacgcgctcaatccctatcaggttaacatttaaaggatacaaaaaagccgcccgaaggcggcttaaaaagtgttaaaactcttgtaaaaaagctttacttactctttatctgactcaatcaagccacgactgatcattaagtacttaggatcagcttcttttccacggaattttttatacaattccaatggatcttgtgtgccaccctttgacaaaataaactccacatacttatcggcggtttctttatcgaagataccgttttcgcggaatgcctgataagcgtcagcagcgaagatttcagaccaaatgtagctgtaataacctgcagaataaccaccgcttgcgcttgagaagatgtggttaaagtaggtcgtacgataacgtggtgcaatttcaggaattaaaccaagctcgtccaaagtcgctttctcaaaagcgtcagcatcttttaggtctttgccatcaagtgtatgccaagccatatctaacaaggcggcagccatatactcagtagtcgcaaagccttggttaaacttagatgccgcttggatcttgttgattaactcctgaggaatcacctcacccgttttgtaatgcttcgcaaacttagctaatacttctggctcaagcatccagttctctagaacttgagatgggaactcaacaaaatcacgaggaaccgacgtacccgtttgtgatgggtagataccgtcagataataaaccgtgggctgcatgaccaaactcgtggaacaaggtattcgcttgatcaaaagtcaacaaggttggctcatcacctacaggacgtggatagttcaatacatttacaataataggcttaacaaactcaccgtcttccgtaacaaactgcttacggtaagagttcatccaggcaccaccacgctttccatcgcgaacataatggtcggtaatatagataccgattagctcaccatcattatctgtgacttcaaacgtacggacgtcatcatgatatttcggaaggtcgaaacgctctttgaagttcataccaaacaacttattagcggtatagaaaacaccctgtaatgtactctctagcgagaagtagggttttaccgcagcctcatcaagcgcgtacttttcattacggactttctccgcatagtagcgccagtcagatgcttttagtttgaaatctttaccatctttagtgatttgttcctgcatcaaggctcgctcagctttcgcctgctctagcgctgctggccatacttgattcaacaagttatacacgttctcagcatttttagccgtacgctcttctaacacaaagtccgcatgagtgtcataacccagtagctgagctttcttggctcgaagttgcgctaactttgaggcattcaccttgttatcgttagcgttgtcgttatcgccacgatgcgtgtaggcataatacattttctcacgcagttcaggcttttctgagtacattaaaaatggcgtcttactcggacgatgagtcgtgaaaacccacttgccttcgtgaccgcgttttgcagcagtgtcagccgcagcatcaattagaccttgcgacaaacccgctaaatcttcctcgttatcaataaccatttcccagttattggtttcggctagaacgttttctgagaacgataacgcaagctcagtcatttctttatttaaatcacgaagttgttgtttttcttcatcatttaactttgcgccacctcgaacaaatgacttgtagttctcttctaacagacgcatttggtcttcgcgtaaaccaagctcttcacgctggttataaatcgtttcaacgcgcttgaatagtgttgggtttaaactaatatcgtcgcgtaatgctgacagttttggaccaacgtctttctggattttctgtaactcaggattcgtatttgctgacgttaaattaaaaaacacgttggcaacctttgtcatcaacttaccgctgtactccattgcctcgatagtgttttcgaaagttggagcttcagggttattagcgataacctcaacctctgcacgagcttcagcaatggctttctcgaaagctgggccaaagtgttcgtctttaatttgttcgaaaggaggcatgccataaggcgtatcccactctttaaagaatggattatcatcagcaccagccatatctttctcagtgccagcctctggattagtagcagccttagcatctgcagcttcagtttgcgctgctttggtttcagtggtctcagctttttgtgctgagtcatcaccacagccagcggccaacagagccgacacaatagctgccccaagtgttaattttttcatataaaagtacctgtagttcttgtattaatacctgcaactgatcttttatacgtggtctaaatccaataggcaagaccatgccaccattaggaaacagaaaaatgtaacaaagttaaacaactcgagagccttattgacaagcctttaaactgacttcgtaagcacagcgtcgtgcgccctccagcaaataatcaacccgtttgacgtcagtccccaaacactttttgaatatgttcaattccgagcggcaaaatccttggcatgcttgggctgcggcgcatatcggacagtgattttctatcagtaagtaaccgccctccaccctctccacctcagccatatacccctcttctgttcggattgctgctaattcatgaacttttgcacgcagacttgaatgactttctagccgctgcaaatattgctctaaagactgctcttctcgaagttcaatcagcttttccatggcttctgcccctaaagcttgtgataccccagaaataaggcttaatgtcagatctgagtgcctatcaggaaaacgagagtgccccttatccgtcagcgaccagaacagcttgggcctacctcgtccctgaacgcgcttctcagaggaaactaggcccttagactccagctcttggagtaattgacgcgcccccatcatagtgacccccagttgttcgcctaaaatcgttgccgttaagtcgccccgagttttcaaaagatagagaatacgttccttattgctttggctatacggcttagacatttgcaacctccgcgaccttctcatcaaaaccactcatcatggcctcttgacgctgccgagtgactagcatcaccaccaccgatgccatcactaacccagcaccggttaaaatcacccagcgagagcttaaaatactgagtggcccacctaaactagcaataataacgttggtcacacagaatgttgacgtttgtaatcccatgaccttgccttgacctaagtgtccgaagtactttgataagtaagttggaaccatgccattagcaaccgcgataaagacgccgatcatcgcgaaaatcggaaatacgcgatccatgccgatgaaaggctgaattataaaagccacagcaagcaagcttccccctaccaccatcagcttgatttcaccaaatcgagcattgagcttatcaaccaaaaagctactaacaattatcatgcaagcggtaagcgctaccgtggcccaggctatggtttggctatctgcgtctaagtaatccacaaaccacaccgggtagaaatcataaaaagcattcaaccccatcgaatataaaaaatagaaccagaatattggcaggatttgtttattctttagtaaagccagagagttgttgcgtcggataatactccaaaattggatcgagctggtatccctagccacttgccgacgttctatggtgaaaaacaccaatgcaaaagctacgccaataccggctgccgcaaataaaaacacggtggaaacgccataaatcactaagaaaccaccaattacgggcccgattaaccaacctgcgtagttcgccgcgtaggacatagagatcgctttagtgcgctctatgtgaggatgtagctcagcagcaatagcacgagcaatcgacatattgccttcacatactccggtcagtaaacgggcaagagtgaagccaatgaacgactcatacaccaccgctatagctgttaataagtaacctacggcactaccaaacagagtgatcagcaacacttttcgtcgcccgtaactgtctgaaagcgctccaacaaagatattccctatcaataaaccgagcgggtaaaacgctaaggaaaaacctagcaatattttggggtgaatccccataaagtgagttaggtcattcggtggcgagtctaaaaagtaaggtgctaacactggataaggcaaagcgataccagctgtccccaataccgataacaacataacgcttgctaaaacccacattgctttttgtttggtcattccaactttcctgactaggcatttttatgaaatagtaggtctcgccaatatataaagcaattagtttatatattggtcgctaatagaaaatatcaattacaataatacgccaccataaaaaccagccacactctggacaaaaaaggagccttgaggctccttttttgcatagggttagtttgtatggctacatagaaactgtttccatatcctcagcttcctgcattcgtttcctacgagatttggcgtgtagcaatttagcctcttccagtcgcccttcttcctccagtaaagcgatgtgcatcttgcgatacattcttagagagtagaagctaaatgggctgaagaacaatttaatgatgacgggcatcagctctatggcgataaagaatattttaagcaataaactgaataggatcgcggcttgcccaacaaccggatcattatgaatgctctgaagagccagatatcggcgtaacatgcctgttttgacttcataaaagagcccatcattttcgagtttgacccgatactcgtccatcttggtttgcttacgatcaatttgctggttcaaggcgaccgttgcactggatagttcatcttcgagtcgtgtaatagtctgttcattctgctcaaaattagtctcgctaagcaccaactgattacgctgaccctgaacatcattaagctcactagtagccgtttctatccgtggcttgagttcatcaagacgagcctgtgtatccactaaagccgcttccaagattccaatttgtttctccaagtccgtataagtagcaaccgcgcggttatacttcgggccttctgtcggtgcacgaccatcctttcctgttcgctctaacaatgcttcattaaaccaaaagtcatattcttcgcgagcattggctaaccgttcatttatccctgaaatttccgcattgagcacctgttgtgatttttgtaactcttccaagttgctttgtctaacgtctaaagtattctccacagattgagtgtcgttggactctttagcagctttataagcagcattctggttacgcaacgtttgaatctgctgctgaagctcttcaatacgcccgcgttccacgtttattgccgtgtccaattctttctcatgagcttcaagctttgcgaaatattctcggttcttgacgttagactcttgctgaatctgttcatcaatagcattagactgcaaactaatttcagctaaagttgccaagcctattgcaataattaacgagtaaataattcttggaacgagcccaataagactgcgtaatggaatgccactcttaaaagggtttctaagcgcccagtcagaaccaataatggcctgatcgagaaagaacaaggttaacgcaaaaatgaagcctgtaatgatcgcagcggtagcccctaagaatagtgacaccccgtaagcgaataacataaaggtaaaaataaaggttactaactgacggaagaccatggcgtatgccagcattctgtcataacgaccacattctttaagtacttcggagtcagtcagagaaaggaagcttattagcttgaaaaaacgtgagtctttcttttctgtcatagccctacctcatcatcgtaataagtaaatctttaattgcagaggggagctcagtaaggattatcatattgtcggtctgggttcccctattagcctacccccaacaatgtcagtgtcaggggtaaaactaagtcccattcctcgttagatacacaatgaaccgatatagtttaaatacaa

SEQ ID NO: 2983 - DNA, 15093 bp, synthetic construct
  source 1..15093: mol_type = other DNA
  misc_feature 1..15093: note = Synthetic
actgcagaatgccgatctgagctttgatgaaatcgccaccgatattgacctgacagccgttaaagagccacaggagactgtattcagtctcgaacaagaagtgattgcgctgatcaaaccgacgttacaggaaatgaacaacatgacccgtaatgtgcgcaaaaaatcagcattacgagaaaccattgcccgcaacaaagaaaagcaaaagtacatcaaagaggccatggcgcacttatccgagttgctcagccaacctgtacaggacaagaaactgcgcagtacgctacaggcaaaaatggaattctggaaaaaagaatatgccatgacgaatagccaactgaccagcgcctcacaacaactgaaaaaactggtggccgccgaggtgccttttgctgagtcaacgcgtaactactttaaaacatttttcaagcagcgcggcctgtatatttcacaggcgttactggctatcgcggtcattttcatcctttctcggttgacccgtgtgctattgaaaaagctggttccccagtttaatcgccagtcacgcagctttcgtatccgcctgatcgacttatcacaccgcgtcatcacgttcattctgattgccatctgtccggccgttgtgttttacctcgcggaggactgggtgctattcagctttagtttgctgattttactgggcattgcctggacgctgcgtactgccattccggcctatcgcaagcagattgagttattcttgaatgtcggcgctgtgcgtgaaggcgagcgtatttttctggatggcattccctggcgggttgatgtcattaacatttattccattctggaaaatccggtagccggtatcaaacaacgtattccaatcaaggagctagttggtctcaggtcgcgtcctgataaccatgatgagccttggtttccctgcgctaaaggtgactgggtgattttatcggatggcattcgcggtaaagtgattggtatttcatccgagtttgtcaaactggtgcaacgtggcggtgcgcacaaaacctacctgacacaggactttctggcattagcgccgctgaacctgtcagttaatttccgtatcaaggaaaccatcggtatcagctacgatcttcaggcggccagtaccgaggagattccgaacattcttcaggaaaccctgcaacgtaaattcgaagaagaaggctacagcaaagacctgttgaatctgcgggttgagtttgcctatgccaatagctcttcactggatctggtggttattgccgactttaaaggccgtcttggtgacttgtacaaccgaatcaagcgggccatacagcgctggagtgtggatgcctgcactgaaaatcactgggagattccttttactcaggtaactgtgcataatccgtcgccatctcaaaaccatgacagcggctatttgacgtcgaacagtagaccgatgaatttgccaactcatgtataatcgactgttttcggggagatcacgttaaatacaatgccataccgttatctattaattgttggactgacgctattctggctgatcctgtcaggctactggacgaacccgttgattttgggtttgggcgcagcatctgtcgcgctctctctgtggatggccattcgcattgagcgcaaatacgcatttcgggcgcgtggtctgactgttttacgacgccaacacaggctttggccctggttaatggttgagatcattaaagccaatattgtggtgttaaaatgtatctggtttcctaaaaagtaccctatttccccggttattcgtaccttacgtatggagccacgttcccgtattgcgcggacggtttatgccaacgccattacgttgacaccgggtactatttctattgaagtgagaaatgatgagatattggtgtatgcactcttagaggaaggcatggaagatttggaagaaggtgaaatgggacgacgcgtccatttgctggagggtaaagactcatgatgtttgctgtaacgtgcatcgcctttttaattgtcatggggatcgcactggcacgtgcctttattggtccaagtgtttacgaccggattctggccgttaatatgttcggcactaaaacggtattgtttatcgctgtctacggttttttaactggccgtcccgactttatggatattgcattggtctatgccttaatcaattttgttggtgtgattgcggtgttaaagtttgtggagcgttttcctccaccctccgccagtaatgaggactaacagatggaaatgatcatcaatctgctcagttgggcgtgcctgatgctgggttgcgtactggggctaagtggtgccatcggaatttttcgcttcgaagaattttacacgcgcctgcatgctgccagtgtaacggacacgctttgtgtcttttttgtgattatgggattagtgctgcaagcgggtttttcactggtctccgccaaactgctgatgatcgtcgggctgctgtggctaaccagtccagtcgccagtcatgcactgattcgttcggcttatcaaaccggcctgaaacctgttctggccacgtcgcgtagcgcgacctctcacagggaggaatcgtcatcgacatagtcattctcatcgacattgtgttactcacaatgttggtatttagcaccattgccattgttcgtctgcgcaatttattcgctattatcatgctgtctggtatttacagtctgatttcggcgttgctctttgttattttggacgcggttgatgtggcctttaccgaagccgccgtgggtgcgggtatttccactgtactcatgctggccactatcggtattaccggctatgagcagaaaaaaacgcccaccattaatgcggttctcccattcattgtggtctccattaccggtgcagtattggtctatggcacgctggatatgcccgtattcagtgatcccacagcccccatacaccagcacgttgcccctcgctatattcaggaatcccctaacgaaattggcattccaaatatggtgacatcggtgcttgccagttatcgtggctacgacacgatgggcgaggtgattgtggtcttcgcggcgctggtcggtgtgttgtcattaatcggcatacatgagcctaaaattgcgcctagttattccgaagaaccggctcgacctattttgcaggtcatgaccaagtttatggtgccatttattctgctgtttgccctatatgtgcagtttcatggcgactttggccccggtgggggctttcaggcgggtgtaattttttccgttgccatcatcctctacacgctaacctttagtcagtatgatggcatgcaactggcaccacccaaattactaaaaacactggcatccgctggtgtgcttatctatggcggggtcggtatctggactctactaaagggcggtaaatttcttgattatgacgtgctggcaaaagatcccatcactgggcaacacgagggcattttgatcattgaatttggggtcggcctgacagtggcatccgttatgattctgatgttctttgcctttattagccgtggagaccaaaacccatgattgcattggagctgtataattactgggtcgtcatttttttaatgatggcgggtttctacacattaatcgccagtaaccatctaaccaagaaaatcgtcggattgaacatttttcagacctctgtttttatgctgtatatctcgatgagtaaagtgtcgggcggaactgcacccattttggtcgaaggggtaacaaactactccaaccccctgccccatgtactgattctgaccgcgattgtagtcggtattgccacgacctctttggggcttgccttgattattcgcattaaggaagcctacggcactgtccaggagaatgaaatactggagcaggattacattgctgaccacgcacgcagagaggaagccgacgcatgatctcagaacacctgcccgcattgcaggtggtgctgccgctattggtggcaccggtatgctttcttattcccaaccggcgtatatcttgggcgctcgctaccttaaccagttggctggcatttgccattgccatcattctggtattaaaaacccacaacggcgacatcatcagttatgcgtttggcggctgggagccaccgtttggtattgagtatcgagttgatattatcaatgcttatgtcttgatgatcgtcagcggcatcgcggccttggtattcccctatagctggactagcattcaaaaagaagttgcgaaaagtcatcaccagctctttatcacggctttgttgctgtgtttggcgggcttgttgggaatgattattaccggggatgcgtttaacttgttcgtattgctggagatttcatcactgtctagctatacactgattagcctggggcgcgaccgtcgtgcattaacctcctctttccaatacttgattatgggaacggtgggggcaacctttattctgatcggtgttggcctgctgtatgtgctgaccggcacattgaacatgatggatttggccgcgcgtattgcggagctgccagaatctcgcaccttgcaagccgcttttgccttcctgtttgtgggttttggtttaaagctggcaatgtttcctttgcacttgtggctgcctaatgcctatgcttttgcgccttctgcggtatcggcgttcatcggctcaaccgcaaccaaggtggcgatatacgcattattgcgcttcctgtttacaatctttggggtcaagttcagctttgagtccatgcatgttcactggctgttgatgccattgtccgttatcgccattatgttcgcctcgctggtggcaatttttcaggatggcaccaaacgggtgctggcttattcctccgtcgcacaaattggctatatgttgttggggctgtctctgaccaatatcaccggcttgacggcaactttactgcacttatttaaccatgccttgatgaaaggtgggctgtttctggctgtcggcgcgattgcctatcaaatgggcgggacgcgattggagcacttgcgcggtgcaggaaaagccatgccgtacaccatggcagcatttactgtgggtgtctttagtttgattggtgtcccactcactgttggctttatctcaaaatggtacctgattctggcgaccattgaagctggctactggctactcacaattatcgtactcatctcgtcactgttggccgctatttacacttggcgtttattggaaagtgcctatttcaagccgcgtccagtaggtgcgccagaagtcaaggaagcaccgctgagtctgctcatccctactggcattttaattggcgctaatttgtactttgggattcgttccgaaaatatttctgtcattgcccgtagtgcggcagagttactcagcggaggacaattctgatgggattgatgcctgatgatttaatggttctcgcgttggtgattccactgtttaccgcagccggtattgcacttgcttccccgtggccaaacattcgggaagcggtgaccttgctgggttcattgttgctgtttgctacggtggcctcactgaccccggacatactggctggtgaacgaccaagcctggagttaatgactctggtcagtggcctcacaatcaagtttacacttgagccactgggtatgatattcgccttggttgcagccacactttggccggttaactcactgtattcaatcggttatatgcgcggcaataatgaaggtaaccagacacgtttctatctgtgttttgcagtggccttatgctcggctatcggtatcgcattttctggcaacttgctgacattgtttgtattttacgaagtattaaccctctccacttacccattggtcacacatgccggtcacgttaaagctcgtgatgctgggcgggtgtatctggggattttgattagtacctccatcggtttattgctgcccgctattatttgggtctggcatcttagcggtaccactgattttacggtaggcggaatacttaatggtcacatccaggggccattactaaccctgctaatggccttatttgtatttggtatcggtaaggcagctgttatgccaatgcaccgctggttgcctgctgcaatggtcgctcccaccccggtcagtgcgttgttacacgcagttgcggttgtaaaggccggtgcctttagcgtcattaaggtcgtgacctatatttttggtctggatttattaaagactgcaccggggctggagtggattatgggggttgcctgctttacggtaatcacagcatccatcattgccttgcagcaggataatctgaaaaaatgcttggcttactccaccgtgggacagctctcttacatcgtgatgggcgcactggtattagcacctttttccattgttgctgtttcactgcatattgccacccatgcgtttggtaagatcaccttgttctttgcagccggctctatttataccgccagcaaaaaaacagaaatcagccagatgaatggcatcgggcatcgtatgccgtggacaatggcagcattcagtattggggcattatccatgatcgccctgcctcctgccgctggctttttatccaagtggtatatgtttaagggtgccagccaggaagcacaatatctggtgatgtgtgtgattttcacctccacgattttaaatgcctcttattttattccgattatttataccgcatttatgaagccggaagacccccaacaaacgcgggatcataaggaagcgccattaccgattgtcattgccttgacaataacagcctgctcaacgctgctgctgttcttcttctccgaattaccattggctctggcacagagcgttggagtagccccatgagtcaacaaaagcaacaacactggttgtaccgtgctgaaaatcgccgaaagttttggtacacgctaatagcactaatggctctgtcactgctgcctgagttgtttctccatcatcatgcccactttgcagatcagggtattcttttggaagcacaacccggcttttacccctggttcggttttgtcagttgcgccattatggtgttaattgccaaattactaagctttgtactcaaacgaaaggatgattattacgatgaatagcttcatcctgcctcctgctttcatcctgatttttggtggtttattactgccatggatagccgctcgttttcgtccggtattggtcattggcctgccgctgcttacccttcttatggtatggctggtgacaccggaacacagcctgacgctgcactttctcgactaccaactgaatattttgcacctcaccgcaacgggacgagtgtttgcaacggtattttccattatggcctgtgtcggtgggctatacgccttaaaacaggcaaactcaatggagctgagtaccgcatttatttatgccggagccgcaattggtgtgactttctctgccgactttcttggcctgtttatcttttgggagattatggccatcgcctcgacattggtgttgtggtctaacgtcagggaaaaccccagagcctatcgcgccagcatgcgttatctattggttcacctattcggtggtgttgttttaatggcgggtatcgcaacccacaccacagccactgatagtattgcattgacgacattacgtgctgacagcattgccagtgtcctgattcttattggctttttggtcaacgcaggtgcccccccgttttcatcatggattcctgatgcctacccagaagccagtcccagtggctcggtgttcctatctgcgtttaccactaaaacagcagtattcgctattttgatggtattccccggagaagctatactgatttatctcggtttattcatggtattttacggcatcatttatgcgctgctggagaacgatattcgccgtattttggcctacagcatcgtcaaccagattggctttatgctagtggccattggcgttggttcagagttggcactcaatggcgcaaccgcacatgcctttgttcacattatttataaaggcttgttgatgatggcggcgggcagcgtattgctcatgaccggaaaacgcaaatgcactgaccttggggggctgtttcagtccatgcccgtcagtacctttgcggcagtaattggtggactcgccgtactcgccgcccctttcacttcaggctttgtcacaaagtcattggaaaccagcgcagttgccaaaggcgcacctgccattgtctggtttctgatgatggcagcagcggccgcctcagtattacacgcgggatttaaattccaatggtttgtgttttttgatagggactcaggcattcgcaccactgatccgtcatggaatatgcgccttgcgatgtggattatggcggctgcttgtattctgattggtgtcgcgccgtccctgatctacggtattctgccctatcctgtggattatcatccatactcggctgagcatattgtgacgcagatacagcttattttattctcagcgtttgcattctttattttactgccactgttccggcaaaccctgagtattacactggactttgactggacctaccgcaaacttctgtggttggcaattcggtggataaaggaacatacacctaagtttattaatccgatgatggcgagtattaaggcatttggacagcgctattttgaccatttgtttgaagcacatggcccacagggattttttgctcggacatggccaagtgccagtatggtactctgggttgcgattctgctggctacttcgatgattctttattacgttaaactgtagtggctcagcagctatctagcttaaaagttagccgcacgaacatggtcattactgtgacttagactataacaagccgcagggttgtggtctgagtctcaggttttttctgtactcacagtggcgcgtttcttagcataaagtacagccaatatgcagatcactatgaatgcgccataacaggttaatttatacacccatggcacaccgggcaatgcgccgtacaggcgaaggctgtcattcgcaataaagagaccaatggccgagatagtggctgtcactttgaaataaaagaagtttcccgactgaatagtcaatatagaaacaagcaatatcaaaaatgcaagccacgacgcaatcactgaaacggctcccggcacgacactgggaataagcagcaacacagatacaatgattgctacccaccccagtactttatagaacatttgttttcagccgccgacgggcgtacatagttcaataactgagccttcggtagattggatatatgtataaccacatttcatttgccgttctccattttcaagagactctttcgttcatcggtaaacgcccaccacggtaatgcttcaccactttccatgaaatgaatgacagaaataaacgtatcaagcacacaaggatcgtacctctcccctgacacagcgcaaaggtgctcatatagctcaaggggctgttttccaataagtgcttttggctgatcaataccaataagccgtagcttacctgcaatcgactttcctatattcggaagctcttcaagttgggagatagcttccctgtttggggttttcatggtttccttcagctcccttgtcgcagctcacgaccaccagcgaagcacagagactgccacaacccatcacccactctgttgtttgatcacagaaaggcgaacagctttcaagcacttacagcttcccagaatatttgttcaataatttttgccgtgtacaaagaaaaaagctaccctgccgtagcagggtagtctattttgtgttctaaaacttgttaacagatagaacacgcttcctaagatgctaccacgtggccgtcgccacaggagtagaataacgagtgaaacttgattgtcaaccaaaaggtgaaacatgcacactccctatttgctatcccttgatatgggcacatcttcaattggttacgttgtattcgctatcgacgaagacggtgaaccaactgctatagaagaccttggtgtaagaattttccctgatggccgcgacccagatagtaatagtaacgaaccattggccgtagcacgacgcaaagccaggggcataaggcgaacgcgagatcgtggccagaaccgtgtgcgccgcctggtcaaagagcttatcgagtgcggattattacctgccaatgatcaggagcgcaaaataatactgcaacaaacctgcccgtatgaagccagagcactggcagtaaaccagccagtagaaccctatacactgggaagagccatttttcacctggggcggcgacgtggttttaaatcaaacaggctggcatccggtggtgaagaatcggaatacaaatcaaaaatcgaatcgttgcggaaatcccttggcgaccagacccttggcgagtacctttaccaaaaaatcaaacaaaataaagtgttggcaaataaaggcacaccgataaaacaaaccccggtgaggttcagaaatggtgaaaccgaattttatgccgacagagccatgtaccaatccgagtttcgaaaaattcaggaaacccagggcaatacgctgataagtgacgcacagtgggcactattagcagaaactgttttttttcaatacccattgaaaccggttctcaaaggcaaatgccgcttctttcccgaagaaacacgcgcccatatcgacctgccaataagccatgaatttcgtattctacaagaagttaacaatctgaaatatgtctcccagggtgttaaccatgatttgacagaaagacaacacaacgcgattattcacgccttaaacaaaagcaaatcaaaaactttttcatctttggtaaagctcaaagacgaacacaaaaatccgtttttcccttccgatgctcaatttaatcttgatgtggcaagccgcagcagcaagctaattggcaatgaaactctgatcaacttaagaaaaaccgattatctcggcaagcttgctgatacactgagcaccgacaaattaaacgacattattgaatacctgatagaaccttttgaacaagtcgctggtaaaaatgtgattgccagtgatgacaaggtaatcagttacttgaaggaacaacttccatccttatccgacgaacaaattaataatctttctaattatcgcttcaagcgcggcacggccagcgtatcacgcaaatttatggagcaaataaacccattcttgaagcaagggctgatctacagtgatgccgttacccaactgggtaatgaaaccggtattcctttacatcacagccatttttcaatggacgagctgatggacgaacttccttactatggcgttgcaatgcctgaatctgtatggggagaaaaacctgaatctgatgccaataaagcgccacacgaacgcgatgaagatgcctaccaatacggtaagatcgcaaaccctacggttcaccttgcacttaatcagctaaggtttgttgtaaatcaggctatcgctaaaatgggtggtacgccgcaaaaaattcatattgagctcacccgagaccttaaaaactccaaacaggctcgtgaggaattatcacgtaacaacgcaaaaaacaaaaagaacaacgaccgcattaaagaccttctcaagactgaatttggcatagaaaatccgcggcgagaagatatacaaaaggtaaaactatgggaagagctggatgatcgcacctgtatatttacagagcaaagaatctccgcaagacaactctttaatggtgaagttgaaattgaacatatcattccattcagccgctgctacgatgacggtatcaacaataaaaccctcgcgtttaaaaatgccaacaacatcaagggcaaccgcactccttttgaagcatttggagtagatcaagaacgctattcaataatgatgaagcgcgcactgaaaagtttcggtcacagttctaaatacgaacgcttcaaagaaggtgcatttgaaaaattttatggcggtgacagaggtgacatgatcgccaggcagctgaatgacactaaatacatcagccgaaaagcaaagcagtacctgtcttgcatatgtgaaccgcaaagtattatttcggtaaacgggcaaataaccgcaattcttcgtgatgtgtggcaactcaactactacaaagacaaaacaaccgataactaccgtaatgatcatcgtcaccatatagtggatgctttcgtggtgggaatgacatctcgctcactgataaagcgcattaacacaaccacttcaaaggatcagcgccacatcaacaatttgtatcaatttttaaaagatcgtgtttccgacaatctggacgcatctctcaaggctcaactaaagcacatgcttggcgcagttaacgcatcctacaaaccagatcatactgatcaaggctccatgtgcaatggaacagcctacggatttaccgaattggatggcaagaaatatggcgtcaccagaaaacctgtaaacaaattgaaacattccgatatattcagcatccgtgacagccttataaaaaagcgaattttgcaacaccttacgaataacaaaaataccatagaccagaataagttaagatcaaccatacctaaaagccagctcacacataaactggcagattttaccaaaaccacgggaatcaagagtgtccgcattctggttaaaaatcagagtatcagccctattcaaagcgcaccatacaaagggtacgcactcaactcctacgcctattgcgatatatggcaaaccccatataaaagagacaaaaaaaccggaaaatacacctacaaatatgaaggtgcgtttgtgccttatgcagaagtgaaccaatacaagtccacccccaagcgaccggttgacaaagaaggccgctcccaccctgcggctaaaaaactgatgcggctgtataaaaacgactgcattgaattagtagacaaacgctcgggagaagtgttcagcaagcgcgtcgccggatactctgtcagcaataacaagatcgacctaagaaacaaccttgagtcgcaaaataaggagcgaaagtttatatctatcaacaagatttttaatgaaaatcatgtcagcaaaaagaaaatctgaatatgcgctggaatgtcgttgagctatcagaaaacgggctgtatgcaaagctgagcagaggctttttatgtgtaatgaatggagaaaaacaactcggaaaagtaattattgacgagatgtgctgcctgctgcttaccgctgagcaggccgttctatccaagccactgatggtcagactggcggaatgcggcataccgattgtgatatgtggcagtaattaccaccctatttcagtcaacctcccatatgcagcacaccaccagccgaacagagcgctggatttacaattatcggcaacagagccattaaaaaagcggctctggcaacaggttgtcaaaagaaaaatagaaaatcaggccagcacacttaaacagttacaccctgataagacatcagttgaaaatcagttttcgagattggccgacaaggtgcgctcgggcgacccggaaaacatcgaagcacaagctgccaaactttattggaaaaccattatgagcggtggtttcacgcgcaacagcggctcccaggatacattgaacgccgcattaaactatggctatacggttataagagccgcttgcgccagagcaattgtggcggctggcctactcccggcgctgggtatataccattcaaatcaacgcaatgccttctgcctagctgacgacctgatggagccctacagaccattggtagattacgaaattttcaaagccgataataccattaacgaactggataaacacaccaagcaaaaactcgctaaacttttagtattggatattgaagtggacggtaaaaacaccatcgttaacaatgccatgcaaatgtcagcgttttcatacgttagcgcgttaaaagacaaaacaccccgattatcgctacccaaactggaatagcgtatgaagcctgcttactttcttaatgggtacaagcttatgtggatgatagtaatgtttgacctgcccgttgttaccaaggcagatcggaaagaatatacacgttttcgaaattacctattagacaacggttttgatatgtcccagttttctgtttatgagcgcctcgtttcgagcaaagatcgggttaaaaaatttgagcgtaaaataacgcaccaactcccaaaaaatggtaaagttcaactcattacaatcaccgacaaacagtatcagaatatcaaatcctactatggtcagtcccaacttacgccagataaacctgatcaacttcaccttttttaggctcgtcagccttaaaaaagatcagacttatcctcatatttttcttagtaatcaatatgttacaagacatggaattgtagcatcttaggaaacgtgctcaatccgcaacgcgtcgcgctgttggaaaacggtttggtgcattgtagcatcttaggaaacgtgctcaatccgcaacgcctttagtggaatgttgaaccctcatttcattgtagcatcttaggaaacgtgctcaatccgcaactaaaacatgcacatggaatccaatctgtctattgtagcatcttaggaaacgtgctcaatccgcaacccagggtgatgtagagctggcctcctctacattgtagcatcttaggaaacgtgctcaatccgcaacgatctcccgcaagctgcacgcagggcagggattgtagcatcttaggaaacgtgctcaatccgcaacgatgctaatgacatcgcagccaaccagaccattgtagcatcttaggaaacgtgctcaatccgcaaccacaacagggttagggcaatcgcacttaatttcacttgccgaccaagcaaacaaagtgtagatgataaaggatttggcttccccccatgtcctcaaaaactgcttctattttccatcattttgccagtataaaagatccc

SEQ ID NO: 2984 - DNA, 14422 bp, synthetic construct
  source 1..14422: mol_type = other DNA
  misc_feature 1..14422: note = Synthetic
tatcgcaagccaaggaacagagtcgcttattagccagcatgctaacgaccaaaccacagacgaagaagcctaccgaatagcacaagcggcaccaaacaacgaagcactacaagcggtaggaataagagccttacaagacggtaaaacattgagtgtggctgaaaacatgatcaacgcggatcaacttctaatgcaaatgtgcaaggagaaagccggctatcttcaaatggcattttgtctggcgtttccgatgcagttggtgtgtttgagtctaaagccaatgatgtttcattagtgacacttactgaggtgaggaaagacgataaaccaattatggctgcggtgcacttgggtataggtggaagcattaacaaactcgctagcgtgtacccaaggtcgggtgacttaggtgcatggattaatagttcaacagacgctagcgatgtaacttacatcaacaaagaaaaaagccaagctcttaattccattaactccgcgctacaattgcgccttgagaagttggaaaaagacactcgactttcaaacataagatattcacagaaaacgatcttgtcaagtttgagagcgaaaacgatataagatttagacaagacaacacaacaagtagacctatcagaatcaagatgcgcgacagttctgcgtaaaattcaggataagtttaagccggtcaaaacacttcaagagcggtcttcacagcaaagacggtgatcttgattcccagaataggcaaaacaccgagaattttaataacccttcacatcaaacgatctctttttatatttaagcagttcctgagctattctcaataatcttttcttgggcaactataaaacgctctcactatcgcaagccaaggtcgcaggtgctaactaagctagcatgttgacgaccaaacctaaagggaagcgcaagaagtgttaacatcttgtactactaaaactgtggattggacgggtctgtatattggcaggatttagaagctacaacgttgatatctaaattttccttgattgtttagtgaatacaagtgtatttattctaaatgggcagtgaccccgccgtagcggagccatcaattttgtgttcttcaacttgttaacagaatgaacacattacctaagatgctaacgtggacgtctccacgttcataatatattctaagtattaaacgcctgtcaaatttaaaggactaaagttatgagtgtctcaagcccttatagtatttcattggacatgggaaccaattctattggttacgtcgtgtttttgttagactcatccacggaagcgccgaatcgtatcttagaccttggcgtgagaatatttaatgacggtcgagacgctaaaactaaaactccattggcagtagagcgacgagaagcaaggggagtaagacgaaaccgagatagaaagaaaaatcgtattcaacgcttaataaaagagctcaccgaattcggtctattgcctgagtttaaggtagaacgagactcgatattcaaactttgtccatacgaatgcagagcaaaggctgcggttgaaaaagtttcaaaaaatatgctagccagagctattgttcacattgcgaataatagaggatttaagagtaaccgtttaagcggcgagcacgaggattcaaattttttccaaaagattgacgctttgattaacgagctcgagggtaatacgctaggtcaattcttgtatgcgagaaaacttgtcaatgatgagcaacttagcctaggtctgaacaagaatctaaagccattgaaatttaagccaattgaaaaccaattttatccaaataggcaaatgttggaagatgaattttcattacttaaaaagatcaatcgtgaacatttaacggaaacacaatggcaagcaattgaagaaacagttttttggcaatatcctctaaaattggcggaaaaagggcggtgtagattcttcccagaagaaactagagcatacagcgcgctgccgataagccatgaatttcgaatacttcaagatatcaataatttgaaatatgtgtccgagggtcagcagcatcaacttgacaaaaggcaacggctacatttaattgagttattcaataagcaaaaaagtatctcgttcaaatccttattaagacaaaaggatatacaccaatcgcctatttttcctgccgattcaaagttcaatctagatacacccgttcgtaacggcaaattatttgggaatgaaacactaattgaactcggtaaatcagaatacttaggctctctaatatcaataattccatatacaagtttaaacagactcgttgcacatttgattgagccagtgaaaatagtaacggacaagcgaggaaacaaaataaaggttgtagaagaagtttccgaaactaaaaaagaaataaaaagtttagtacctgagttagacgtcgatgccataacaaacttagcttgcaaatctttctctaaaaagacaactaatttgagtgtgaaatttatggagcttgttttgccttacatgaggacaggaatacaatatcatgatgcggtcactaaagtagtagatgaagcaggtattgcatttcatcatagccaatcaaacattaaacctacacacgaagcactcccatattatgggaaaatactcactgattcagtgactggacaatttaatcaagttgatcaggataaagtagaaagcgacagagataacgaagcatttttacatggtaaaattgctaacccaacagttcatatcgctcttaaccaattacggcgagtagtcaaccaaattataaagtcatttggtgcaaaaccagcgaagatcaatattgaactgactagagaacttaaaaatagcttgcaaagtcggaagcgcattgaaaaaaataacaaagataacgccaagcacaacgagcgaatccgccaagatatatcagagttgactggaatctcatacatcagccgaagtgatattcagaagtataaactctgggaagaattgggtgttttgggggctaggcagtgtgtattttcaggtaaaactatttctgtgtcacaattatttaatggcgcagtagaagtagaacatattataccattttcaaggtcttacgatgatggaatgaataataaaacattagccttcaaatcagtgaacaacataaaacaaaataagaccccatacgaagcatttgggaacaccgaagagtatagtcagatattacaacgggcattacaagcattcggccaatctagtaaatacgaacgatttaaaaaaggagcattcgagtatttttatggcgaaaatggccaaaataattttattgaacgtcaactaaacgacacaaagtatatttctaaggtagccagaacgtacttatcgtgcttaatccctattcagaacatcattccagtcaatggacaaattacagcaatgttgagacatatatggggtttgaatcattttaaaaataaagcatcaggtaattatcgagacgatcatcgacatcacataatagacgcatttgtcgttggacttactagtcgctcgcttattcaaaatttaaatactgtaaacgctacctctaatcgtaatgaagatagtttgtttgtacttttgaaaaatagaagcaaagtccccgacgcgttaagagctgaatttttgagaatgctggatggagtaattgcttcacacaggcgcgatcatggcctacagggttcgttgtttaacgataccgcgtacggtttagacgcatctaaaaatacctatattacacgtaaaaacatcacgtcgttgagtgtagatgaactttttcgtattcgagacgctacaattcgacatgatttgtttacgtatttggtaaacagacctgaaattgaaaataaacgggagtttttatctgtttttggtgatgtaaaaacactcgaaagaaaattgcatcaatttgtttgtgaaacaggtcataaaaaactccgaatagatattcaaaatgcaagtatcaaaactattaaatcggctccattcaaagcatatgcgctcaatagttattcatttgttgatatttggcaaattccaactaagaaagacaaaaagaccgagaaatggttgtataagtacgaggggaattttgtggcgactgtcgaagcaaggcaacgtctaaagcataataatgaggatcggccccacccagctgcaaaatttgtcatgcggctttttaaacaagactcgattaagcttgtggacactcaaacaggcgaagagacgttctgcagagtcgcggggttttctgcgtcaaacaacaagttagatattcaaccaaatttgaaatcaggctcaagtcaacaaaagtttatgacgataaacaagatattcggaggaaacaaggtcgaaaaatttcgaacgtaataaatgcagtggaaagtattggaagtaaatagtgatgggcagtatctaagcaaataccgagggttccttgtcttaaagttagcaagggaagaacaagcaagaattccgttagcggatcttaactcagtaattatttcatcaaacaacgcaacactctctaagcaaataatgtgctccttagcggagcataaagtgccgttggtgttgtgtggcagtgactatcttccccagtcaataacgctaccgtacggcaagcaccaccgtttcaaaaagatactagatgctcagatatcctccaccgctgccatcaaaaaacgtctttggcagtcacttgtttgcgcgaaaatcaaaaaccagcatcgagtcatgtgcataaatggtaaggatgagcccggccgcaggctttgggaactcgcaaaaaaagtaaaatcaggagatgtaaccaatgttgaggcacaagcggcaaaacattactggaaacacttctgcgagaaccgtttttatcgaaatccaaataaaagagacgatatcaacatattactaaattatggctatattatcttacgttcagcatgtgctagggctctcgtgtctgctggtatgttgccggcattaggtttggctcataaaaatatttataaccctttttgcttagtcgatgacctgatggaaccctttcgacccatggttgatcaactggttttagaaataatcaattctggggcaacacagctaactccaagttcaaaacagttgttggcaaaagtgctgaccaaaacaatgtttgatggtagtaaaaaaacaattgtaagcgaggccatacaaaaattagcattttcgctctccaaaagttttcaaacaaaaaaagtcgtacttgagttttgcgaggtaccaattgactagtcaatcgaaatttttatgtgggtacagaattatgtgggcattggtgatgtttgaccttccggtcacaacagcggcggcaagaaaagaatatgttaaattcagacattttttgttagacaacggtttttcaatgtcgcagtattctgtttactttcgaatgctttcgagcaaagataaagtgtttaaattagaacgaagaatagctgaacgcgtaccccccaatgggcatgtacagttaattgcaataacagacaagcaatatgagcaaatcagaattttccacggaaacatagaatcccgtcataaaatcgaggggcaattacttttgttttgataaaaatcgtcatttttatctgcaaaaaataaaaaaccgccataaatatcaatatcttgcctattatctagtttagcatcttaggtaatgtgcgcaatctgcaacatgacgtagccggcattaatacagcccaaaagtttagcatcttaggtaatgtgcgcaatctgcaactacgttttatgcaacgtgaaaaaacaacaaagtttagcatcttaggtaatgtgcgcaatctgcaacatccgtctttcattcgatacggtgttgcagagtttagcatcttaggtaatgtgcgcaatctgcaacaggtacgattaaacgcaagcgcgaaaaagtagtttagcatcttaggtaatgtgcgcaatctgcaacagcacacgtatttcggagattacaagatttagtttagcatcttaggtaatgtgcgcaatctgcaactggtcatttcttctctgttacttcttatgaagtttagcatcttaggtaatgtgcgcaatctgcaacgtagatagccgtttgctttgctgtatacgcagtttagcatcttaggtaatgtgcgcgatctgcaacagaagttgaagggttgcaaagcgcagaaacagtttagcatcttaggtaatgtgcgcgatctgcaacagatggtgaagggttgcaaagcgcagagatagtttagcatcttaggtaatgtgcgcaatctgcaaccaaaggtagatggtagtcttggtggtcttgagtttagcatcttaggtaatgtgcgcaatctgcaacataagtggggatcatgatttactcacttgtagtttagcatcttaggtaatgtgcgcaatctgcaacacaacttccgtcttggttgatttatcaaaaagtttagcatcttaggtaatgtgcgcaatctgcaacgatagcttacaacttgagtcacatttatatagtttagcatcttaggtaatgtgcgcaatctgcaactcagcgcttaacacggtttctatggtgtcgagtttagcatcttaggtaatgtgcgcaatctgcaacatgccgcattatgtcgataatgtggatttaagtttagcatcttaggtaatgtgcgcaatctgcaaccgttcctatctgtggggcgtgatctgattgagtttagcatcttaggtaatgtgcgcaatctgcaacaacaggcgcaaccgtagtgctagcgctaaaagtttagcatcttaggtaatgtgcgcaatctgcaactaataagcggcaatcaacaaaacatcaattagtttagcatcttaggtaatgtgcgcaatctgcaactacgcagagatatacagacacagcgttttgagtttagcatcttaggtaatgtgcgcaatctgcaacaccacctatgccttggtaacaacttcacatagtttagcatcttaggtaatgtgcgcaagctgcaactggaataaccgttgctaccgcaccatgaagagtttagcatcttaggtaatgtgcgcaatctgcaacttggcgtcagagctggatattgacgtcagcagtttagcatcttaggtaatgtgcgcaatctgcaacaaccaaggtggtcgatgtattgattcgcttagtttagcatcttaggtaatgtgcgcaatctgcaactaagcaacctaaatacaaaaaaactagctgagtttagcatcttaggtaatgtgcgcaatctgcaacttgtgatagcgtgttaatgaaaacgccagtagtttagcatcttaggtaatgtgcgcaatctgcaactctaaccctagacaagaagcgtaataataaagtttagcatcttaggtaatgtgcgcaatctgcaacgaaatcctcgcaagtgagcaaagacttgttagtttagcatcttaggtaatgtgcgcaatctgcaaccgtagatgaggcgcggtctaaaagcttattagtttagcatcttaggtaatgtgcgcaatctgcaactgataccgcaagccttgcaattttcgtcacagtttagcatcttaggtaatgtgcgcaatctgcaaccacttttaaaaatgcaatgtgcgcaatctgcaacgcgcagcacaagttagtaaaaatcgcctcgagtttagcatcttaggtaatgtgcgcaatctgcaactagtgggatactgtatctcaaaaacagttttgtcgaaaaaaacagttgtggtaccgtgtttgcggtaaagaacgccgaaggactgtataaattaattgcaaaagcataatggaaagtgggaataaaatttcgggttctgaatttagatttttaagaagagagtttggcctctgacgaaaagtgtgggccatatggttgttactactgagtaaactattgctaactgtgacaagggttctagttctcctcaaaaatgccctgtcgcgcatggtactaggattatcgaaagaaactctactgcaagcaagaagtgttattagtgaattagttggtattataaatttaacatattagatacggataaggtaaggtaaaagactatgtacaattcttccaagcaaaacagtacacccaagaagaggctgacgcagaaggaattctgggaagagcaacaggcaaaagggcttacattatcgcaagccaaggaacagagtcgcttattagccagcatgctaacgaccaaaccacagacgaacaagcctaccgaatagcacaagcggcaccaaacaacgaagcattacaagcggtagggataagagccttacaagacggtaaaacattgagtgtagctgaaaacatgatcaaggcggtcatgtcgatgcaaaatacaactcaatcgcaaacaggtgatttgtttggcatggatgattccgcattaattgaagcggaaaccttatctaaaacagccagtaagaaacaatcagaacttaaaaagcgcttatccgctattcgtggcgcagctaaaaacccgaaactcgctagacaggaaggtgttgacgtaaatgatgttgatgctgtcaatgcgaggatcgggcaacttcaacaagaggttaatcaactagagaattggcacactaaccctgaattggtctcaatgattcgacaagaagccgggttagagcaagctaaacagcaagaaactgaagtcccacaacgagcagatccgcagaactacgacaagttcgacataaacgcaaacctaacacgtgataccgttgttggcgatgtaaatgaaataataaatattactaaacctgagtctggctataaaaaagttagatacgctgttgtcgatgcagaaaaagcaaaaaaattaaacaagtagttaatattggcgttgaaggttacaaacatgttatcgacgactcagcggttaagcatgctttaaatcagcatgggtcagaaaagcgggaaaaagcgaaaggtcaactacctgtatctataaatgatatcgcaaaaatacctgatatagtgaagaattttgattcgatcgaaaaagggtacaaaacagtcgatggtagaccatccattcgctatacaaaaagatataatggaacgacatatgtagtcgaagaggtgagaacaaaacgcaaagaaatggcttttaaaacgatgtggaagcgtccctccgcgccagatgcacctgctttacagcagtcctccgctcaatcgtccgaaacgttcgggggcatacttccaacatcttcgaatgaaaatggtaaccttctgggtgataatgctaaagcaaaatcagaccagacttcatcctcactctcatttcaaaatgtagagcagaaaaacaacgatgtcaactttgtaatgtctttgactcaacggatagagcagggtacccaagtagcagacgaatcagatattagggctttacgtgaacaatataaagatagcgactttgagcgatggttcgaaaatgagcttggatacagctttgactatcttacagcgtccgaggcaaggtatcttcgaaacgccaaggatgctgacacagcaagagcaagaattactcaggcaagacaagaaggcaactcacgcttatatccagatgaaataccccgatctgaaagagaggcttcaagcgaagttcgcaaaaagcaaacgccaaagcctaacagcataacaaaccaacaagagctgctaaatagcggcttttttgatcaatcagcgccatcaagcattgaacgctttgaagattttggggaagtattgccggacgcaagaaagcatcaagcttggtttaatcaagctatttcatcgagtgatatagatttgcgatcggcgccgctgagtaagtcctttccacgccctgactacaataaattaattgattccggcatgcctcctgaaaaagcattattgcttgcaaaggtacgcgctgaagttccaaataaaaaaccatctcgacttactcagtgggtaagcaaggtagaagaggcaagaaacaaagctaacaccataatgcaaagcgaggcatcggcccaagcacttgcggctgatatgtacaagtttaataaaaaaataaatgattacttagcgattgcgaatgatgtaatgccgcaacaaattgaatctctggctaaattcgatatcagtgaaagcttcttccagttgttcagaggtgaaaaaaatgtctcaaaagtaactgtcacagatgctagtaaaaaatctggtgcatttgggcgtggtcgagaaacttactttgatacaaccgaggaagcgatcgcgtttattaagtcgcaagttacggctcaagatagtcaaggcaagccagcaaccaagtttgatatatggtcagttcgtggtgagcgtggttattttatcggtaaaaaggttgctgcgcgtaagtttattgaaccagcaaaagctgaaacgctcagcgaggcaaaaaagttgatccgtgaaaacaatgcgcagtacgtcgagttgttagcggaaaagcgtaaagtgggtgcgcatcgcaggatagaaaataatccgcgaattggaaaagactatcgtcaaggcgcgaacgttacatctaaattgtttgccaataccttcggttttaggggtgttcaatttggtaactatgttgaaaacgatagacgccaagaagacatcaacaatgcatacgatggcttaatggatcttgcctatatattggacataccaccaaaagccttatcgttaaatggtgaacttggtttagcctttggtgcgcgtggaagaggaggccaaaaggccgcaatggcccattatgaacctgataatattgttatcaatctaactaaaaaaaatggtgctgccagtttggcgcatgaatggttccatgcgcttgaccattattttggtcgaaacgacaaaatcatcggtgataatcctcgtttcgaagagtttatgactgacctttctcgtaaacgcggcattgtaaaggatggtgtgtatcgacgtactacacttgatgatttctcaacgcgacaggccgtgtttaatgcatttcagtctgtcattgaggctattgattcaactgaaatgcctaatcgttcgaagcgacttgataataaaaaagttaaatcatattggtcaacgcgcatcgaaatgggagcgcgaagctttgaacggtttattatcgataagttacaacaaaagggctatgagtctgattacctcgctaatatcatcgacaaagaaacgtgggatgaaaaccaaccagatgcggtgaataacgaggatagttatccatatccgacagacagtgaagcgctggtaattaatgatgcatttacacgcttatttgacattattgaaaccaaagaacaagatgacggcaatgtcattctattcaataaaacggtaagcactaatgaccagtccacagttgagaaggctaatagaagagcacaatatgaagaacggcttggacaattcttcaaagaatacgcaggcgcaaaaggacaaaccaacatcgtcattgccccaacacctacccaagtcttcggcagtgaagccaccgcaggaaaaggagcagaacgcgcgccaggcgcttacgatccggcaacagatacactctttcttttcacggataatatccaaaatgaagagcaactcttaaagacgcttcgccatgagttgataacgcacaaaggccttggcatgttcggagtcgagcgccaagctgaactattacgtcaaatcaatcaaaccaaaaccagcaataacaaacaaattaaagcattgtggcaagagattgacacacagtacggtaatgaaagcgatgcaatccaagctgaggagtttttagcaaaattatcagagtctgacatgcctgcgcaatcgtggttgtctaaacaaatatcgcaactagtcaaattatttagacaagcgctacgttcgatgggcttgatggtagatgacaatataagcttgcaagacatgaagaatgtcgtccttgatatatctgatgcattaagagcaggtattgaacctgccaagcgcaacatcaatcaggttgaagcattattcgacagtgctgtcagtgggatcacccttagtgccgtcaacgacaacgccattaacaatcaaaacgttaccattgggcgtgcggatgcaagtgaaatcataagtggggtcgtcggcacgggtttcagcaacttggatacccagaacggttttaccttggtatctactttttatgagcttcctgcggaaataaaacaagcagccaacgaaagcggcaataatcaaaatgtatatggcgtaattcataacgatcaaatcttcctagtgctagacaaacatcgtaacgcaaaagaattagaaacaacaattttgcatgagtattacggccacaaagggttgcgcaatttattcggtaaaaatttattgacgtcgcttaatcagttgtttgtggctaatggtggcatgcgtggattattggaaacagcgaagcgcaacgatattgatttagcaccatacataagcgctggcgaacagatgtcaaagcaaaaccgccaagcaatgcttatggatgaattactggctcaccttgcacaagataatcgcccctcagttaaatgccttgctttagaagtactaggatatattcgtgacgtaatgaggaaagtcggcttgtttaatctatctcgattgaatgattttgacttgatgtacacgcttaaacaagcaaggcaaacattcgatggtgatactagtggcaatgatgccggtaaaaactcaccaagattcatggtagttgcaaagcaaagacagttcgacagaagcgccatgggaaaaattgaaaaagcgattgatgcaatcgtagtagatcgtcgcttcaaaaaggagaaagtatctctaggtgaaacacccaaagtcatgcaaatgcttggtgcaaagaagcttccgctaaaatttgatctaacaaagctatacgatactgtttcaccagacagaaaacataaccttactgccgaacaagcgattcaggcaattgagcatatagccgatccagttgctgtgtttgagtctaaaaccagtgatggttcattggtggcgcttacagaggtgatgaaagacgataaaccaattattgccgcggtgcacttggataaagaggggaatattaacaaacttgctagtgtatatgagaggactaataacgtaaaaaaaatggctagatgattcgatttataaaagcaaggcgatatattacaaccaaagaaaaagccaagttctcaataccattaactccgcgctccaattgcgcctcgagaagttggtaaaagaaactcggcttccaaacaagaggatattcacagaaaacgatcttgtcaagtttgagaacgaaaacgatataagatttagactagacaacacaacacaacacaacacaacacaacaagtagacctatcagaatcaaaaggcgcggcagttctgcgtaaaattcaggataagtttaagccggtcaaaaccctgcaagagcagtctccacagcaaagccgatgatcttgtcaacggcagtttaaccttgcctccctgagttatttttacacggccgttaacaacctcatatttcgcttaattttatgtcgccagttgagtttgcaaaacaggcagcataatgtaaaaagtcccatccgtggattggtgctaatatcggggataggttataagcagaccatcggcgcagaagaactccaaaacggtctgacgctaatttgacgtagatatatcatcattttatttgacgacgatttgacagttccccctttacctttaggttttgagttaagcaaaagggtaaaaaagtgaataaattatatagaaaaaacaagttaaaatacgcaatcggcctattggcattgagccttgcagtacttgccttcatttggtggcaattcattagcttaaaaccttatcacattagccaaactgaaattagaaacatttatcagaagcacgctgattatacacctgaaatcacctttagagagattaaggccggacaatataacattcgttttatcagccatgacggtgacaaggtggagggccggttagaaatcccccaaggaaagtctctggaacaatgggtgagtgaatacaatagaagtggtactgaagtatttttgggtatttctgcgatgggacgtaattatctgagatggtggcaagactcctttaaagaaaagccaacggttactcaggtaaataaaattggagaaatggcccttgcatcaaacagcgtgcttgtcgctatcgatgcgcgttatcatggtacgcgtaaaagtcaatcgcttccactaagcaa

SEQ ID NO: 2985 - DNA, 6774 bp, synthetic construct
  source 1..6774: mol_type = other DNA
  misc_feature 1..6774: note = Synthetic
gtttttgccctgttcatatagtgaccacaaacctatactgtgcgctttgctgatgcctcgggctctttgccacgtcgatggcgtatcagcacgtaagcaaaacaacatcatcggataacaacaccatgtctgaatcgtcaaatctggctttggatcgaggctttttcggtcaccccaagggcctgcaaaccctgtttttcactgaaatgtgggagcgcatgagttactacggtatgcgcggcctgctggttctgtttttaaccacctccatcaatgagggcggttttgcctatacggcggcagtagccagcgcaatctacggactctacaccgcctcggtgtacttcatgggtttacccggcggctggatggccgacaggctgatcggctcacagcgcgcggtgtggtacggcggtattattatcatgtgcggccatatatcactggctattcccaacgacaaaaccttttatctgggcttgattctggtggtgcttggcacgggattgctcaaacccagcatcagcgccctggtgggcaccctctacagctccaccgatgagcgccgcgacagcggctatgcgatttattacatgggcatcaacatcggctccctgatcggctacaccgtgtgcggcgccctggccgaagccgatgcgttcggctggcactgggcgtttggcgccgccgcggtgggcatggccataggcctgatccaattccgaaaaaccgttggcaacctgcaaggtgcaggcgcagcgccactacaaccgatgacgccagcgggaaatactcgttcctggcgaattatcggtgtcttcctgctgggtcttgtggtagtaacactctcggtgatgaacggacttatcaccctgaatcccatttccctggcgcagtccgtcgcggttgcttttaccgctatttttgtaatttatttcagtgcggtctattttcttggcaggctcgatccttgtggaaattcccacggtttggtttcagtctgcaaactcaacctttatcattctgctttcgcccttctttgccgctatgtggatcagactcggcagacgcatggtgtcgccagcatacggggtgaaatgcgccgttggtcttatcatcatggcaagcggttttatcgccatgtactacgccgcacacattgccgccgcggggatgaaagccgctgctttctggctgattttaacttacttcttgcacacttgcggcgagttgaccatcagccccatcgccttgagcgccgtatccaaactggcacccaaacgctacctgggccagatgatgggcgtgttcgttttgacctactctatcggcagcattatcgccggtatcttcgcgggcaaattcgaccccaacaacgtggcagaaatgcccagcctgtatatgcagattgtgacgttcagtgtcggcgtgggcgcgatagtgttgctgtttagcctgtttaccaaaaactgggaaaccgaagtgcaggctgcgcatgcgagagaggaaaaacaataactcagctaaacaaccgccacctgccagtgactcgcgctggtaggtgctgaatcagcacactgacaattcaggccggtgggtttgcagctgaggtagacacggggaatttccgagcaaaggcatttgccgcaggctttgcgggctgatggcagagaggcttggtggcagtttttaaatctaccagatagaacagagagaagatttctagcttttttaataaaaaaagctaccctgccgtagcagggtagtctattttgtgttctaaaacttgttaacggatagaacacgcttcctaagatgctacgtggccgtcgccacaagacgtagaatagcgaattaagctcgattgtcaattaaaaaaggtaaaatatgcacattccctacttgctagctctcgatataggcacctcttcgatcggttacgtcgttttcactatcaacaaaaaaggtgaacctaccgccgtggaggatcttgatgtaagaattttctccgatggccgaaatccagaaactaaagaacccctcgccgtaggccgacgtaaagccagaggaataaggcggacacgagatcgcggccaaaaccgcgtgcgccgcctggtcaaagagcttattgagtgcgggttattacccgccaacgatcaagagcgcagagagatactgcaacaaacctgtccgtatgaagccagagcgctatcagcaaaccagcctgtggaaccttatacattgggaagagccatttttcacctgggacggcgacgtggcttcaagtcgaaccgactggcatctggcggtgaagaatcggagtacaagtcaaaaattgaatccttacgtgaacaccttggcgatcacaccctgggcgaatacctataccgaaggattcaagaaaacaaggcgctggcaaataaaggcacgccgataaagcaaacccctgtgaggttcagaaatggcgaaactgagttctatgccgacagagccatgtacaaatccgagttccgtaaaatccaagaaacccagggcaatactttgcttagtgacaagcaatgggcgctattggaagaaactgttttctttcaataccccctgaagccggtaccaaagggcaaatgccgtttctattctgaggaaacccgggcccatatcgacttaccgataagccatgaatttcgcatcctgcaagaggtcaacaacttaagatatgtctcccaaggcgtcagccatgaactgacggaaagacaacgcaatgcgattattcaggccttgcacaaaagcaagtcaaaaactttcttatctttagtaaaacttaaggacgaacacaaaaatccgtttttcccctctgacgctcagtttaatcttgatgtggcgagccgtagcagcaagctgattggcaatgaaacccttatcaatttaagaaaggcagactatctgggcaagctcgcggacacactggataccaaaaagctaaatgacatcgtcgaataccttatagagccttttgagcaagccaacggaaaacgtgttattgccagtgataaaaaggttatcagttacctaaagaaacagctcccatccttatccagcgagcaaattaacaatctttctaattaccgtttcaagcgtggcacagccagcgtctcacgcaaatttattgaacaaattaacccaattttgagggaacaaggccttgtttacagtgatgccgtcgctcaactcagcgatgaaatcggtattcctttgcaccacagcgactttgcaccagatgagctgatgaatgaactcccatactatggcgtcgcaatgccagaatccgtgtggggagaaaagcccgaatctgacgccaataaggcgccgcacgaacgcgatgaagatgcctatcagtacggtaagattgcaaacccaacggttcacgttgcacttaatcagctgagatttgtagtcaaccaaatcatttccaaaatgggcggcacaccggaaaaaattcatatagagcttacccgagatcttaaaaactccaaacaggctcgtgaagaatactcgcgtaaccagaaaaagaataagaaaaacaatgatcgtattagagacttactccaaactgaattcggcatagaaagaccgcgacgagaagatatacaaaaggtcaaactgtgggaagagctagacgatcacacctgtatattcaccgaacagagaatagcagcaaaacaactcttcaacggcgaagtagaaattgagcatatcgtcccgttcagccgatgctacgatgatggcatgaacaacaaaaccctggcattcaagaacgccaacaatatcaaaggtaaccgcacaccttttgaggcattcggaacggatcaagagcgctacgccgtcatgatgaaacgcgcgctcaagagcttcggccagagttctaaatatgagcgctttaaggaaggcgcattcgaaaagttttacggtggcgacaaaggcgatatgatcgccagacagctcaatgacaccaaatacatcagccgaaaagctcgacagtacctttcttgtatatgtgaacccaagaatattattcccgtaaacggacagatgaccgccgtgcttcgcgatgtgtggcagctcaatcactacaaagacaaaacaacgggcaattatcgaaacgatcaccgtcatcatattgtggatgcttttgttgtgggaatgacttctcgcgctttgataaaccgcatcaacagaacgacatcaaaagatcaacgtcacataaacaacctgtatgaactcttaaaggatcgcgttggtgatgccttagcaccatcacttaaagctcagttacaacacaagctgggctcggttaccgcatcctataaaccagatcacaccgatcacggctcaatgtataacggcacggcctacggacttatcgaactggacggcaaggtatacggcgtcaccaggaagcccatcaatgcactaagtcatgacgaaatattcagtatccgcgacgaccgcttaaaaaagaaaattctgtcatacctcacagataacaaaagtgccaaagacagcaaagagttacagacaatcgttcctaaaaagcaactcacacgaaagctaacgggctttactgaggagactggcatcaagagttctcgtattctcgtttcaaataagagcatcagcgttattagaagcgcgccatataaaggatataccctgaactcctatgcttactgtgatgtctggaaaatccctcataaaaaggacaaaaaaactggcgtatacacctacaaatacaaaggtgttcttgtaccttacgccgaggtgaaccaatacaagtctacccccaagcgacctgtggacaaagatggacgatctcatcccgctgccaaaaagctgatgcggctatacaaacatgactgcatagacttaattaacaagcgctctggagaagttaccagaaaacgtattgctggattcaaaaatgataacagacttgacttacaaaatagtcttgggtcgctaaaaagtaaacaaaaacccatatctgtcaacaaaatttatactgaaaaccatatcagcaaaaagaacacttaaatatgcgctggaatatcgttgaactatctgaaaacggacgttatgcaaagctgagtcggggctttttatgtgtaatggacggcgatgaacagctcggcaaggtgattattgacgagatgtgctgcctgcttctcaccgcggagcaggccgttttgtccaaaccactgatggttagactggcggaatatggtatacctatcgtgatatgcggtgaaaactatcaccctatttcgatcaatcttccctatgcagcacaccaccaacctaacagagcactggacctgcaactatcggcaacagagccgttaaaaaaacgcctctggcaacagattgtaaaaagaaagatagaaaatcaggccaacacactaaagcaactgcaccctgatgaatcatcagttcaaaaccagttttcgagacttaccagcaaagtacgctcaggtgacccggaaaatatcgaagcacaggcagcaaaactttactggaagactattgtatcgggtggctttacgcgcaacaacgcttcacaagacacgctgaacgccgcactgaactacggttataccgttatcagagcagcctgcgccagagcaatcgttgcggctggcctgttgccagcgctgggcatataccattcaaatcaacgcaatgccttctgcctggctgacgatcttatggagccctacaggccactggtggattatgaggtttttaacaccggagttgccagtggcgagctagacaaacacgcaaaacaaaaactcgccaaacttttattgctggatatcgaagtcgacggtaaaaacaccatcgtcaataacgccatgcaaatgctggcgttttcatacgtcaactctttgaaagacaaaacaccccaattgtcgctacccaagctggaatagcgtatgaaacccgcctattttctcaatgcgtacaagcttatgtggatgatcgtcatgtttgacctgcccgtcgtcaccaaggcggatcgaaaagaatacacccgctttcgtaaccacctgctagacaacggttttgatatgtcccagttttcggtttatgagcgtctcgtttcgagcaaagatcgggtcaagcaatttgagcgcaggatagccgcggaacttcccaaaaatggcaaagtccaaatcattacaatcaccgataaacaataccaaaatatcaaatcttactatggtcagtcccagttcactccagataaacctgatcagcttcaccttttttaggctcgtcagcctcggaaaaagatcagaatatctttattttaccctttacaatcagcaccttaccaaacatagattgtagcatcttaggaaacgcgctcaatccgcaactcatgcaagaccacccagaatatgaaggttattgtagcatcttaggaaacgcgctcaatccgcaactgtagatttgatggtgatgaaggtggatatattgtagcatcttaggaaacgcgctcaatccgcaactatcagcactagcaccacccgtgtctgcacattgtagcatcttaggaaacgcgctcaatccgcaactacattactaattgtgtaataattcattgtattgtagcatcgtaagcgacgttaaatcaccccctttttttcagctcccatcctgccagacaatttctcctgttcacccacgcaggagacgaccatggacaacaaccag

SEQ ID NO: 2986 - DNA, 23210 bp, synthetic construct
  source 1..23210: mol_type = other DNA
  misc_feature 1..23210: note = Synthetic
ttgtcattgacccaggccatggcgggattgacccaggcgctgtgggatatcagggcctgagggaaaaagatattgtcctgcaggtcagtcaaaggctccgcaaattgttaaatcaggcaggctccaaggttatcatgacaagggaatcagatatagatctcagttcacctgaaacaggtgggccgtccgcgcgaaaggtagaggatctgtcaaagcgggtcgaactagccaataacaacggggctgacctgttcctaagcattcatgtaaatgcctttccatcttcccggtggcggggggctcaaattttttaccagaggaacgagaatgaaagcaagaagctggccgaggccatccaatcagaattaaccagaatcatgggtaatacgacaagggcagccaaggcggcagactattttacaacccggaatacaaaaatagcggctgtaatcattgaaataggttttatctccaatccagcggaagctgaacttttgaaagacccggcttaccagcgaaaactggcctacgcaatttactccggccttgtcaaatattatacaaaatgaaaaaggaggacatttctgttctcctttcggtgttacttttggtatatatattcctcttttgactgtacagtttctacacagaaattattgggaaaataaaaaaaggaaggtgtaaaccttccaagaaattaacgtttggaatattggggggcccggcgggctcccttgaggccatatttctttctttccttcatcctcgggtctctcgtcaaaaaaccagccttctttaacgcactacgcagattcgggtcagccttaatcagagcacgggcgatgccgagtctcatagctccggcctgaccggtggtgccgccaccctcaaccttagctaaaacatcatactgaccaccggtattggttaactcaagaggctgtctgacaatcatctcgagagtctttttgccaaagtattcatctaacggcctggaattaacagccagttttccctcgccgggaaccagccttacacgtgctatggcgtttttcctacgacctgtcccttgaaattgcacttgtgccactctttctcctccttcccgttacttaaaccgcaaattcccatacttccggctgttgagccatatggggatgttctgtccctctgtataccttcagtttgcgtccctgggcacgccccagccgattatggggcagcatgcctttgacggctttttcaatcgccagttcgggtctttctctgagcagtctttcgtaaggcattgtcctaagaccacttggatacccggtatggtggacataaagtttttgctgcagctttttgcctgtaaggacaaccttttcagcgttaatcacgattacgaaatcaccggtatcaacatggggggtaaaaatcggtttatgttttccccttaggacccgggctatttcagtggctacccggcccagaggttttcctgcggcatctataatgtaccatttcttgataacttcatttggttttgccataaaagtagacatttttttccctccttgcactcagatatcttgccgccatctaccaatagcaggcaatgtcaaatagtccggggctttggactaattgtttataaagtcacgcatatattttattataaaaagtggcagtatgtcaagtaaatctaactgtttttgtgttttttgtcttatacaaaaagtgaacctccaaattaccggagatcctgaaattattgttaaagacactgaggagcctaattagtcctcgtaatcattgtttacctgactatgaaatatttgatgtaaattcatctctggttcttgtacttttacctggctttcaactttagtaacaccgcgggctttgctcgcggaatcgcgtgcttcctctatttcatttggatctgtaacatttcctaccagagtaactatgccttcggtacttttagcgccgatatgtttcaagtttacatttggattagcatttagctcttccgccacttcgaagtccacagaaccatcggtaatatcgccatccgtactgatagatatactattatcaactatttttatcccggaaatgcttttcgcgatattttcagcatgccctttctcagccagtgtatctacaatacctagtaattgtgcttctccttccactatatcgcctttcagagcataccccttaagattaacatctttttcaagctctctctgtaaagcctcttttaatttctcgtccttttgaccagacatataaaaacctcctataacgatcaatattataaaagcccttttgtagttaaaatcttttatgtaacatatcttttcccaataataataaagtttatttaaaattatttgtacttagtgaaaaacggctaaattctatgcggtcatttgcggaacactctatctgcagttttcccctaatgtgatatactaaagataaaatgaagggagatgatttaatgtttaaatcatataaaactgagtcggtatcatgcggggaggtgcttgcagaatagagtactatctgccctccccgattggtcaacagcaaaaatagggaggacaattaaaaatgactaaagtgaatttatataaagttggcctaaccgagcgccttgagcaggaagctgctatgcatgaaggcctatacctggcaagggtatcagtacaacacaaggatatatacaaagtcgttacagaaaacggtgagatgcaggccgaggtttctggaaaaatgggatatagggccagaaatacctcagactatccggttgttggggactgggttatggtggaccgtgtcgatgacagcggtggcaatgccatcattcacctcatccttcgccgcaaaagcttgtttaaacgcaaggcggcaggcacatccaatcaaagccagggcgtagccgctaatattgatactgtttttatctgtatgtccctaaataacgattttaatctgcgtcgattagaaagatacctgtccatcgcgtgggacagcatggccacccctgtcgtcatcctgacaaagtcagacctgtgcagcaatgtaccggccaaactttcagaagtgtattcctctgctttaggggtagatgtactcgtaacaacaagcatggacgatgacggacatacagcagtaaacaaatatattaacaaaggtaaaaccattgccttcatagggtcatcaggcgtcggaaaatctacattaatcaaccgtttattgggtgaaaaaatacttactaccagagaaatccgtggagacgataagggtaggcatgccaccgcccacagacagctgatcgctctcccggacggcggtctggtcatagacactcccggcatgcgtgaactgcaaattgagagcgctaacttgtccaagtcttttgccgacatagagaaactggcccaaaactgccgctttaatgattgtacgcatcgccaggaaccggggtgtgctgtaagggaagcaattgaacaaggtattctctccgcaaaacgtcttagcagctaccacaagcttcagactgaaatgaggtaccaagggctaaactcacgccagcttgagcaggaaaaaatcaataaaatgtttggcagcatgggtgctatgaaacaagcaacaaagtctgtcaaggaaaagaacaagcgaaggtagttttagataaggagtaatcagaacaaactcctgccagagttttataaaaaaccctggcaggagtttttggcgttatatgatatttacattgacaatacacctggaattgcatcccatgttttccctaaaagaacacgcccagccttctttttgttaactccaccccattgtttaaaataaaaaagtactctttgtctttcacattcatcctttattgttaaaacccaatcttgctttatttctctagccccaaatccactttctccgcctacaatcgcccagtcaatacttgtaagatcaacgtcttttacttcaccaatcaaaggttcaaaagagataaatctgactcttgctggaacctctctcaaataatcaattctatttttgtgctcaccactctcaactgtaacaccttgccaaatattgggtgtccagttaaggtgcttcgctacttgagcaagcctttctgctctctttgtcagtatttgaaaattatgccatgatgctttattcatgacatcgaatacttttgtaataaactctagcggaatatcttcatgaaatagatcagacattgaattcacaaatattaaagccggctttttccatttgataggatcatcgaggcaaccttcatgaagggaaatgtcaaagccatttgcatatttagtattacccattaactttaatctttttgccatagtaagggcatagcagtttctgcatccctcagagattttggtgcatccggttacagggttccatgtactttcagtccattcaattgaagatttgctccccatctacctcacccctttttaggaaaagataccaacactttatccccaaatgtaatctctccccttattatctttcgcttctcagcagcaggatctgcaatgattttcccttttgactctaaatttcgcaatgcatctttgtaattcttttttatatagggcttatctacattatgtttttggtaaatttgaatcatgattagactttgtcccgaaaaatcattaacgagcatctcttcaagctcatccaacgggcgacataattcaaataacgctttataccgtttatccacaggattatactgaaatgacggtacattctggttagctgaagaactttcctttgccattatctccttcattatttcgtagcctgtagaattcttacttacgaaaatcagatggtggctagtccggttcccacggtcgtttttaaaagaaaatggcagcacgtatttgccacccaaatctttaagagcatggaccaattcttccactattgtcatttctctttcatacgggctcaaattattaagcctctttcttaatgcgtttgccctttcttcaccaaatagtacgtccatgtgttcttttacaagaggattacttaatccagcgtttattctgttgtaattgaaaaaaaatatgcaatcactgccccagtctttcaaaacggagttgattaagcgcaacgataatcctttgtatccccatggatccacaaagaaaagagttggaacaaggctcgttttttcaaataccttggaaatttcatcaccgatctcaatattatctacctgcggagcatatttcaaactatcaatcctgggaatctcttcaatggcttttgcaagtgaacccgaattatttttatttacgtcattaaaaattgtcacgagcatttgtctcatgtcaggattatcaattgctttttctaaaattagcacaggggtagattttgaaccgtctttatatcttccaggccccgcgaataaatcgatgtatgccactttgttaccatacttttttacggtaggaataatgaccctagcccatgcccagaaatatttgtacactattgtagccttaacaaccgattgctcctttgtttcttcgaaaaattttttggtactcaatgaaatcactccttgaaaaacaaaccacttcccattcggagcaaccaaacatatgtttgtattctatgttgtcgttcatttttcctgcacagaagtttctaagtcgcaaatttttcttgacaaaccaaaccaatacttatgatacggttcgccccgttcgattctaaaataatttcctctcttccccctaaaggttgcagccggtacaggaggttatttacagaggggttgggtattttataagggtttcccttgcgctgacgtcgttggcaatcttgctgccaccggccagccgcaaggcaaggggtcccagcatgtctgaagatggcgaaggccgccggtaagtttcatgtttctcgaaacgggaggcggccatcttattaggaatgcattctgagccatcaagttctgggacattgccttgcggctggccggtggcggcttagattgccaggcggcgagcgggaaacccgttaaaatacccaaccccggccgcctacagacaaccctccggtaccggacaaaaccgcatcacactttttccggttctccataatccactccataggtttcaactgttacttttttaatcatctgactcgcatagggcctgtccctaaagtctctttctactttgactatccggtccacttcctccattccttctataactttgccaaaagaagcatattccccatccagatggaaagaatctgccaccataatgaaaaactgggaaccggcagagttaggaagcgcggtcctggccatggaaataatacctctgtcgtgtttcagtttgttggcaaatctattagatgaaaattcccctttaataccgtatcccggattgccggcgccggttccttcagggcagcctccctgaatcatgaatcccgggataacccggtgaaacgaaagaccgtcgtaaaaacctttttggaccagtgatataaaattcctcaccgtattgggggcaacctcgggataaagctcgattttaatcttttctccattctctgtttccattgtcactacagggttttcgctcataattaccatcctttcaattatactgtaatgttaaaacagccctttgctgtataataaacttcataacctattaatccaggagaaaacggcccatttgcggtggatgcggcgaagacgtttagggacataggaatattcctggatggcacactcaaacatgtgtctggctttttgcctgtcaccttgttttttgtacacgacgcccatccggtaaaaattttcggcgctggcgaagctgccaagtccctcctccaaaaccttgatttcatcaaaaaaatggttcgaccgttttaattcatactgcagcaggtaaatatacggcagaccatggccaactttacggtctaatcccacagcttggtccaaagcctgtttgccctctgtcgaccggtttaattccatataagccatccccatatagagatacaacctgggcgaattaaataccttttcgtttgcttttttcaggaactgcagagcccggttatagtttcttttttcaaaatacaatacgcctaattcctgagcactgtcggcgttagcggggtttagttccaattcagccaacagagttttgattcggctgtttcttttaaatggagcaataaaatcaggtaaaaacccaaaatatgctttgtctgccactgcataaataacaaataaaagaatgagagccagaaatgggtttctcgtcagcattgataaaatgaaatagagagcaaagcctttaagcatataaccaccttctagatataattaccacccactaagtattttatcatagggacgggcatcctgctatgctaactatttgagaacaaaaatactaaagtggtaattccattagaccgatattgatattgtatatctttttgctttactgacactccggttcatgaattcctgagtacttaaattaaagagaggtaaatagatgagaaaagtcactcttgactgcatcaaggtaggttctacattagcccgtgcaatatacagcgcccacggtcatagccttttgcgcgaaggtacggttctcactacaaaatatcttgagcgattaaaaaagatgggattctcgtccgcatttattgatgatgggctgatggatgatattgtccctgatgagagtatttcggaagaaaccaggcagcaggcgattctctgcatccaggaagtctcggatgatataaaaaatagtaaacccattaaagcggccttagcgaaaaaagtcgtcttagacattattgacgatattatcggttccagaaatctgttgttaaatttatctgatattcgtttccatgacaattacactttttatcattctgtgaatgtcacggtaatttccgtcatgattgggattatcctctattatccttatgaccggctgtgtgatctcggtttgggtgtcctcctgcatgatatcggcaaaacccagatccccataggaatccttaataaacccggcaagctgacaaaggaggaataccaaatcgtcaaacaacacacctggtatgggtttgaggcattaagggctactccggaatttaaagttacatctgcccatgtggccttacagcatcatgaacggtacaatggctccggttatcccagagagcttcgcggtaacgatattctcgaatttgcccgcatcgccgcggtagcggatgtttatgacgccatgactaatgaccgctgttaccgcaaaaaaatcccggtcaataaagttcgccagcatctgatcgacaactcggggatcctgtttgaccctggcgtgctggaccgttttatcgaaaaaatcgcgttttacccccagggaaccaaagtcgtgctaaaggacggccggtcgggggtcgtcattaaacaaaataccgccgatcctatgcgcccgataattcgtcttttctgggataataatgtccatctgaaggaaccaatagaagttaaccttttagactgccctgatttgaaaattgtaagggtccttgattcttagccggtttaatgaacaaagggggtatcccaacgtgggacaccccctttttgatgagattaatattcttctttgctggccttatgtttgactgtttcgcggatgattcccctgatgtcgtcaatattaaatggttttgcaatatacccagaagccccgtaacgtaaagctctatcaataatttccggctctgctaaacctgtcattacaacaaatcttgggcggttggccatttccttggtctttttcaaaacctccatcccatccactaccggaagtttaatgtctaaaaagaccagatgaatatcaaccgcttccaaaatatcgatcgcctgtgccccgtctaaagcccggtatgagttgtgaccttctttatcaatgatggcctttaagagacagcaaattggggccatgtcatcaaccgctaaaatgtttaggcgtttgcgttccataaattacacccccgtgatggaactgttcgccggattctatatattacctacctacctggtctataatgcggttttggggggttgaaatgcggttttggggggttgaaattttgctggagtgactagggcatggatggtctcaacaagtttctcttgtgctcatctagccaactaaacctcagcctatgaggaatgggagggtttcacccgcccaagcgccatccgtggcgctgggcggctccgccatccgtggctccgccctcccattcctcataggccgaggtcaagttggctgacgatggaaacaaaggaaacccgttgagaccacccatgccctttagctgtcactctgccaaacgtttagacttggctttggagagaaagttggtgagccgtggcgctgggcggctccgccgtccgtggctccgccctcccattccgcatgggctgaggtttagttggctgacgatggaaacaaaggaaacccgccgaagccacccataccctatatttaggtcactagcaaacttatagacctggtttctgataaataagaaaagaaaagcccggccacttttgtcaaacctaatactgccgtctttaaaaattgattcatacaattggatttacctccatagtattgacaaaacttgtattttttgattataattacaataagcatatcatatcaggattcgcggaggttgctgtaataaggcgacatgccgcaaagctctaaaccggtcacttgttggccggtttatctcttttttattacagaatagcacaaataactgaaaaatcattgataattatacaatagctttatataatgagcttacagtgtatccatattatggaacagggggcgaaggtgaaatggcatacaggattgggcttgatataggtattacttcagtcggttgggcaacagttatacttttagacgggcaaatgatcagtataggggacctaggggtccgtatctttgataaagcagaaaaccccaaagatggggcatcccttgccctgcctagacgggaaaaacgttctatgagaaggcgcttacgacgtcatcgttatcgcatggaacgaattaaacaacttattgaaaaatccggggtattgagtattgatgaaatccatcatatgtatgaagataacctacaagtgcctgatgtatacaaattgcggtctgaaggccttgacaggttgcttacttccaaagaatgggctagaatactgattcatattgcaaagcgccgaggttttaaatcaaaccgtaaatcagagacctccaataagaaatccgatgaagggaaaatgctgacttcagtgctagagaataataaactgatgaatgaaaagggctaccgctctgtaggcgaaatgctgtgcaaagacgaaaagttttcccggactaaaaggaacaaaagcgaggaatacagccatacactatccagagacctcctagtacaagaaatagaaaagttatttgaagcacagagacaatttggcaatgccggtgcatctgaggccattcaagaagaatatatcaaaatattttgttcccagcgaagctttgaccagggacccgggctccccagtccttatgcaggtaaccagattgaaaaaatgctaggtgaatgtacctttgaaaaaggtgaaaaaagggcagttaaagcctcttatacttttgaacggttcatgcttttaaccaaaataaacaatatgcgaattaggactacgggcaccggtataaggaaacttactgatgacgaacgtcgacttctccttgaagaagcgtacaataagactgaccttaaatactctgcagtgcgcaaactactcagccttggtggcaatgactctttttcgggaataagttacggtagaaaaagtgaagaagatgttgaaaaatcctcattggtgaaacttacggcatggcatgatatccgcaaagccttggacaaaattcataaaggttatattgaaaaattaagtaaagaagcacttgatgaaattggctgggcgttaacagtttataagaatgatatacaaattaaagagtacctgtcttctgcgggtattgagaatcaagcagtagaaaaactgctggacttatctttccgtaaagctggacatttatcattgaaagccctaaagaaaattattctttacatggaatccggacttgattatgacaaagcctgcacagaagcgggctacaacattcacggtctcgaaaataccaaaacccgtaaactgcttccaattgacgatgagtacatcaccaacccggtggtcaaacgcgcactgtcccaggcagtaaaagtcattaacgcaataatagaccgatacggaagccctgatgccatcaatattgagttagccagggatatgtccaggaacttcagggaacggaatgagattaccaagcagatggaagaaaacatgcaaagaaatgataacgctagacaaaggattgttagcgaatttggtataatgtccccaaaaggtaatgatattgttaaacttaaactctttgaggaacaggacgggtactgcctttacacaggagaaaaaatggatgtgcgcagaatctttgatgatgggtacgctgatgtggaccacatcattccttacagtacttgttttaatgacagctataacaataaggtcctggtcaagtcagcagagaaccgccagaagggaaacctcctgcccttggaatacctgcatgacaagccggaaaaaatggaaaaattcctatcgctggttagcacccttcaactgtcttatccaaaaaaacaaaacctacttaggaagtcgattggtgaacaagaagctgaagaatttaaagaacgcaaccttaacgataccaggtatattacccggtgccttaaagaacatatccgtaatcaactgctgtttgcagatcctgacaggaaaaagcctgtggtttgtgtaaacggacaagtaaccgcatatgtacgaaagcgctggggtctcaccaaagtacgggacgaaggggacaagcaccatgcgctggatgctgtagtggtggcttgtatagatgatggtattatccaaaaggtaacaaagtatcacaaataccaggaaaccaggtttttaaaccgggaagtcttatcaaatgctccacacttccccgaaccctggccgaaattccgcaaggaacttgaagcccgtctttccgatagacctcaggaattgattaaaagcctcagacttcctttttaccataatgatgaggagataaaaaatatttttgtctctcgcgctccacgccgaaaaaacagaggacagggccataaagatactatatcgagtcccagaatagtcccagaaggttttgtcatcaagaaaacttcaattactaatctgaaatatgaaaaaggggaaatcaaagactactacaatgcagacagtgaccgtttattgtatcaagccctctgccgcaggttagatgaatttgatggtgatgcggaaaaagcttttgccggaggtttctataaaccgaaagcaaatggagaacaaggaccgttggtgaagaaggttaaggttatagaaaaaagcaacatgggtgttgcactaaatcaaggcaaggggtatgcagccaatggagatatgattagaattgatattttttcaaaaaacgataagtattattttgtccctgtttatgcggcagacacaacaaaaaaagaccttcccaacaaagcctcggcaagtggaaagccctatgaacaatggcctgaaatggatgaaagcgcgggttttctgtttagcctgtatcctaaagacttgataagaattgaacacaaaagcggtgttgatttaacttttaacaatggtaataaaaagaaagttactgaagggtttttctattataggaaggcaggaatagcaacagcttcaatagctgtcgacaatcacgacaattctgcctcaataccaagcatgggcattgccactctgaaaaaacttgaaaaatggcaggtagattatttaggtaaccttacaaaagtaaaaaaggaaaaacgcatgggttttagcaataaaggataaggatggggtggtatcttgccataccgtcatgtattaatttcaaaccaatcaatgatttcggttaggaatcagcaactggtgataaaacaggatgaagagtacactatacctctcagcgatatatccaccattatgctggaaaaccacaggtgttgcgtgtcagcagcctgtcttgcgtcattagcggactacggcatttccttgtttacctgtaatgataagcacctgcccaacggagtactaactccattcaacagtcattcgcggcaactgaaggctttagaaaatcagctagctatcgctaaacctacaaaaaaaagaatttggcaggcaattatcagacaaaaaataacaaaccaagcccagtgcctggaacaaatgggcaagcccaatgccaacaagcttaagcacttggcagaaaaagtagaatccggtgataaaactaaccttgaaggcgtagccgcacaggtctattttaccagtctcttcggttcaagatttagtaggcgaacagaaaccccaatcaatgctggactgaattacggatatgcccttttcagggctacaatcgcaagaacactaactattcatgggttgttgcccagcctgggtattttccatcacagtgaacttaataattttaacttggccgatgaccttctggaaccattccggtcggttgtagacaggtgggtctgcagcaatatttctgctaatgaagagaaacttacaccgtcccttaaaaagagtctttatagtcttttctacgaaagactagggattaatcagggggtttcgacagttactactgccatcgagctatgcgtgtcaagttttgtgaatgctattgacaacaaagagcatcaatcattgaaactgccttcattgctgccaaggggtgaggatggtgattaggtttatgcgtctgctggtattttttgatctccctgtgacttccaatgaagagcggcgtattgccaccaagttccgcaaattcctgataaaggatggtttctacatggtgcagtactcggtgtattgcaggatttgcaacggatatgattcagtccgccagcatgaaaaacttgtggaggtcaacatccccaaacaaggctcggtgcgatccctgatagttacagaaaaccagtatcagggaataaaacttttagttggaaagaaaaaaccaaatgaacgcaaatatattgaaggtcaaatcaccatattttaaacaccttttcaagaaaaagaaaaaaatacaccaaaagaggctaccagcagttgcttttttggtgtttctgaaactgttttttcttacagtcccaagtgattccggataggtgagcatatcatatcaggattcgttagggaactgtaacgatgtggagaagcgatagacgaggaaaacgagcatatcatatcaggattcgttagggaactgtaacgaaggaatctgcgggtataattacacataaagcatatcatatcaggattcgttagggaactgtaacacttcttgccaatggtttgaatgtctgaatagcatatcatatcaggattcgttagggaactgtaacagtttcctcagttctgtttaccgttgcttcaagcatatcatatcaggattcgttagggaactgtaacttccgttgggcgggtaatatccaagtacatagcatatcatatcaggattcgttagggaactgtaacctcattttaccacccctttttccgtctacaagcatatcatatcaggattcgttagggaactgtaacatttgattctctttatgcatctctataatcagcatatcatatcaggattcgttagggaactgtaactgttggttagtgtggctataattgctactgagcatatcatatcaggattcgttagggaactgtaaccgcccaacaggtttcgcaaacaccaatggaagcatatcatatcaggattcgttagggaactgtaacccaattccattataccatgacgagggtattagcatatcatatcaggattcgttagggaactgtaacggttaagtacgcttgataaatttttagtaaagcatatcatatcaggattcgttagggaactgtaacctataacatcagtataccgtctgtataataagcatatcatatcaggattcgttagggaactgtaacgcgtcagatatgccgtattccttatatgctagcatatcatatcaggattcgttagggaactgtaactagacacagcggaactatatgacattatctagcatatcatatcaggattcgttagggaactgtaactgaatgtcaccgatttgaccccgatgttcaagcatatcatatcaggattcgttagggaactgtaactcttgtttgtaggctacggaggcacgggtaagcatatcatatcaggattcgttagggaactgtaaccccgaattggcccgggatcgctgcaattttagcatatcatatcaggattcgttagggaactgtaactcaaaccgtggcatttcgcccccactttctagcatatcatatcaggattcgttagggaactgtaacacccacgcgccaccatacaaaatccaggatagcatatcatatcaggattcgttagggaactgtaacgcatgtcccaatcccccaattttttttgagagcatatcatatcaggattcgttagggaactgtaacccggaaggccatacgtggaaatcgtatgcaagcatatcatatcaggattcgttagggaactgtaacaagtatgatgattggtatgttatcacgataagcatatcatatcaggattcgttagggaactgtaacagaacgcattctttgaagctgtcgtgtaatagcatatcatatcaggattcgttagggaactgtaacaactgtctgtgtttcggctaatgctccattgagcatatcatatcaggattcgttagggaactgtaacattaacctcaatccatccatccagggttatagcatatcatatcaggattcgttagggaactgtaacgcttatacccggcagaacacacagcatgcgagcatatcatatcaggattcgttagggaactgtaactatgaggtgcagtagcttggtaataagtctagcatatcatatcaggattcgttagggaactgtaacacataaccgatgttatattcacccaggacgagcatatcatatcaggattcgttagggaactgtaactccagccttggacgtttgatgataaaccctagcatatcatatcaggattcgttagggaactgtaacaagtaactaattatgtttgcactgtcattgagcatatcatatcaggattcgttagggaactgtaacgtaaatttaaagataaaaacagggcatccgagcatatcatatcaggattcgttagggaactgtaacggccgctttctttcgcttcttgggagccttagcatatcatatcaggattcgttagggaactgtaactccgcagtaagcacagagccgggattatcaagcatatcatatcaggattcgttagggaactgtaactgttttagggccagtgatagctcccatgcgagcatatcatatcaggattcgttagggaactgtaactaaaagatgcgcattatgatgttatccgtaagcatatcatatcaggattcgttagggaactgtaacccaagccttcgccggtgtgggcagtccatgagcatatcatatcaggattcgttagggaactgtaacagaatatcagccgggccgttttggtggttaagcatatcatatcaggattcgttagggaactgtaacacatgaggcagctgctacagctgcacaatcagcatatcatatcaggattcgttagggaactgtaactaattaactgtcctagttatgcctttttggagcatatcatatcaggattcgttagggaactgtaaccaaaaagatagagttgacagaggggaaattagcatatcatatcaggattcgttagggaactgtaaccatcagtcagtccggagatgccgggtgattagcatatcatatcaggattcgttagggaactgtaactctagacccctcataagtgcctcattcgacagcatatcatatcaggattcgttagggaactgtaacgttaaaatcgaaggttcgcgcttaagcgcgagcatatcatatcaggattcgttagggaactgtaacctatgacctaacctcttggctgctgttttgagcatatcatatcaggattcgttagggaactgtaacaaaggaattaacgaatgttttcctggaaaaagcatatcatatcaggattcgttagggaactgtaacgaacaaaaggttattttgatttccctactcagcatatcatatcaggattcgttagggaactgtaactttactttcaacgaacccgccattccggacaagcatatcatatcaggattcgttagggaactgtaacgatgtggaccctcaacagtctgctaccttaagcatatcatatcaggattcgttagggaactgtaacgggggagcacatctgtaggtaattgcgtacagcatatcatatcaggattcgttagggaactgtaactttggaatcgtcgtgccgtctgcgattgtcagcatatcatatcaggattcgttagggaactgtcttcgataacaccatcgatcttgtcaagcatatcatatcaggattcgttagggaactgtaacacgaatagcggctgccatatcaggcccagcagcatatcatatcaggattcgttagggaactgtaacatgatgcccgggtggtcgacctggtagtccagcatatcatatcaggattcgttagggaactgtaactacgcagaaataaccccaactcctccttttagcatatcatatcaggattcgttagggaactgtaactgaaaacggctattatgaacggttggagagagcatatcatatcaggattcgtaagggaacctggcacctgacacttttcacctagctacttactattaccctatccttttttcgaataaccgaacgtgccgagtttttctgagatagcccggtattggccggtacagaaggcgtagggcttgattttgtccaggtcgggggcgccgttttcatcgagcacattttcatcgtagtggacagctaggacttcggcgatgaagatatcgtggctgccgagggaaactacctgctgtaccttacattcaatattgacagggcattctttaattaaaggcgctttgacatgggcagccggtagtgccgtaaatcctttttctttgaatttgttgacatcccgaccggagactgtcccgcaatagtcaacagcttcaacccaatctgccgaagggatgttgattacatattcccctgactccctgatcatcttgtgggaatgcctctccggccggactccgatatacaccatcggaggtatgttgttcatcaccccggtccaggcaatagtaataatattcggctccccctcacccaaccggctggtgaccagtacagtaggcaccggaaacaaagccgtggacggacttttagtaattttacttatgataatcatccccttttttaatcataaattaattatataacatttacgggaaatttatttataagttaaagataccacagagtacctagcgcagcaaaaggtgcagtcaaaccttaaaaaaccaaaaaacagccacggattacacggatggacacggataggttcgtataacaattataaaacattttaataaaaataaaaaaatcaggtacagttcatacaagcttacttgtctaccaaaccggagtgtaactaatagtgtgacagagtttcccaagcaagctattaaaccgcagtttaaaatatagttcttttagcaaacttttacgaagtagtagtacagagaagttcctacaggtaaaactattttgcatagaaaggtatactagttatgacctgtaactgcttttttgttttgtttatatattttattatttattaatctcggcactcattatccgtgttcatccgtgtaatccgtggccggtttttatataatcgagagtttactacgtaaactcttccgaccctctcgtagcccgtagggctcagagcactggtcactgacaactgataactgtcaactgtcacctgtcaactgtcaactagtatttcacttccatcagacacagcccctggggcgggactgtcggacctgcctcttcccgttggcctgattctatgaagtgacgtacttcttccggggtaatcttgccgcgacctacataaaccagagtaccggcaataatcctcaccatattgtacagaaatccgtcagcttccacagttaaaaataaatgtggaggcttggattcaatatcaagtcttaacacattcctgatcgatgtcttcgccttggaagcggaggctctaaaagcggtaaaatcgtgttctccgacaatatagccggcggcctctttcatcttttccagacttagtttttgtggtacatgatagctgtacagcctgtcaaaagcggaagggagccgcgaattaaagatgtggtacctgtataccttgcttttggccgaaaactgagcatgaaaatcaaattccacctcttcggcctttttagccactatatcttctggcagccgctggttcatcgccaggacaatcctgccgacaggtatgttactctctgtcctaaagttgattacctgtccctcggcatggactccggcatctgttctgcctgctcccaaagcacagactgggtatttcgttaaatcagtaagtattttttccagcacctgctgaactgtcggcagattatctgtctgccgctggaaaccatggtagttcgtgccgtcgtaggcaattgttacattgatgtttcgcaaacatgacacctcaaatcagttgacagttgacagttgacagggtattgcgcttgagcgaaacgaggcgaaaaggtcggtttactcacttcgttcgtaaaaccccgatcatatattaaacagctgttctataccacagaaaaactgcagccaatacagatactacaaccaaagtcacataatctcttttgtgcatctccaactcatataagctggttctttccatacctacagagtagccccgggcttccatcgatacagccagttcatcagattttcggaaggcgctgacaaacaagggcaccagcagagcagtagcgtatttcacccgccggctgaggttccacgtattaaaatcggcgccccgggaaacctgggctttttttatcttatctgtttcctcccaaaatgtcggaataaaccttagtgctatattcatcatcatgcccagctcacttaccggaacacctattcttcgcaaaggcctaagaagacgctccaacccgtcggtcatccggacaggagaggtggtaagggtgattagagaggatactgatatcagaaaaactagtttgagccctatcaccgcccccagtataaacccttcccgggtgactgctaccggcccaagactgaagattgagtgccccggggtgaaaaccatatttactgttagtgtgaataaaatcagataaaaccccggtttcaaaacacgcaggaaactgcctgtaactccggccatgaaataagaaaagacaataaataccgaaaaccctacaaactcggccggtctggttaacagaaaaaccatccataacaggataatagaaataacgagtttactccgggggtcaagccggtggataaatgaattccccggtatatactggcctaaaacgataccttccattagcaaatcaccgttctttaaattatctcagcaaatttacgatttcctgtttaatttcatctatagtaaccgggtatcctgccagaggctttcctttttttctaaggccgtctgctaccgtaacagctatcgggacgtctaacccaagggctgccagccgtgggtctgccaaaatttcacgggtggcccccacggcctcaacccggccgctgtttaaaaccagcagcctgtcagccaagtcaacaacctctgtgatatcatgagtgacccacaccacggtaaccccacggtcacggtttaaccgccgaacagcctcaacaatcctctgtattccactgtagtccatcccagccgtaggctcatcaagaacaataaaacgggggttagcggccagtactccggccagagcaacccttcttttttcccctccactgagttcggtcggtgagcaatctttatatctggtaaattccaggccaacagtttccatagccttttttactgcggtttccacatcggaaccggagaacccgaagttttccggcccataacaaatttccttccagacggtggaactaaacagctggtgctcaggatactgaaaaacaagaccgactttctgtctcgtttcccttaatattttggccgaagcatggatgttaaaattgtcgatcagtactgttccggcatcaggcttcagtaagccgtttaaatgctggagcagggtcgacttaccggaaccggtgggacccataacggctatccattcaccatccccgatatgcaggtcaacatcccttaatcccagccgggccacgggtgtcccctttaaatatgtataactgacattggttaattctatcggcatatcgcacccaccagttcttccggggaatttatccctgtgggcacctcaatgcctgcatcgataagggctctgacaagttctttgatggcgggcggtctaagcccggcccggcagagatgctccggactcataaaaaattccccgggcaggccggtaaagactgtttggccttcaactaaagccaccaagcggtcgcagtacaaggcctcagtcatgtcatgggttacataaatcaccgtcatctgttgacaggtatttaaagccctcactgcttccatgacctctctttttcccctggggtcaagcatagaagtcggttcatcaagaattacacactcaggccgcatggccaggattccggcaatcgcagctttctgtttctggcctccggacagccggtggggtggatagtccctatactcggacatcccaaccctggccagggcttcatcaaccctatcccttatctggaactggggaaggcacatgttttccaggccaaaggccacatcttcttcaaccacagaggcaaacagctgggtatcggggttctgaaaaaccatgcccactttccggcgaataaagggcaggttgttttccatacccgtatcaagcccgtcaacaacaaccctgccccggcgggggatgagaagcccattgaggtgcctgatcagggtagatttgccgcacccgttaggccctacaacagcaacaaactcccctcgtttaatgctgagattgatatccttaagtatcggggtctccgcattctccgccttataccaaaaactcaaattttctatctcaataaaatcactcatataacctcaaccccataaatttggatagctctgaggaacattgatgggtatcctacgtaaattattttcttaattagccgcggatgacgctgatgaacgcggatagactcacagattcatgtttttcgcggataatctattgtaacatcctttttcctcgttagcagaccggttcaaaaaaagatattaatcataaaaaaacaataccctacaggtctttcatcactagatattctatcatacacaaatattttacttggcttctagatgcactttttttgtagaaaactacatttggtcgtcctgaaactgtttttattatttatatttttattaattacttagattctcggcatccattatccgcgtttttttaatccgcgtgtatccgcgttatccgcggcaaatttgtttttataatcggaagtttacagagcagactgtccatctctttagagtcgaag

SEQ ID NO: 2987 - DNA, 8660 bp, synthetic construct
  misc_feature 1..8660: note = Synthetic
  source 1..8660: mol_type = other DNA
atatattactattgtgtggttacaaacacggataccggcgctacaggaattcagactgccacagcgacaagcgagacggcagctgtaagagttgaaacgtccacactggaaagcatagcaataacaacactaccaaataaactagcgtatacagtaggaagcgaactggatattaccggtatggtggtaacaggatcctacagtgacaattcaacagagatattgtcaataacagcagcaaatgtaacaggatttgacagcagtaaagctgtagaaagtcagacgttgacagtaactgtaagtggcaagacagccacctatacaataaagatagtagcagaactggtctgcgatcctgattcttcctttagcggggtgggaattttctcttccccgccaggcgctgttgctacgaaaccgggcctgtccagaaatgtgacattcctgcttggctcaggttatctgcctggtaaaaaaatgcccagtggcatcatggctttccagttttctgccggtaagcagctgtttatgggaacgactcaggaatggttatgtattgacggtaacctggtcttgctcaaggggaaagggatgctaaacggcaggaccgggtatagctacctcctgtctgccgttgacgggggcacctacagcaagaatgaccgaatccgcttccagatctgggacaaatcgggtggcattgtctacgataatgagccgggcgcggaactttacgcagtccccgacaccccgctgagtaaaggcaacattattataaaaaaggtcaagcaagtttggcgttaacaagatcctctcgtttccagtaaaaaggataattcggagattgtcgacgtcttcctgatggatgtagttgaaggatctaagtgcttgtgcttcggttttacgcgaggcacttttctttttggtcattgccactttagttttaaaaagacgggatagctgtatcacggtttgttgccttggtcaaaatactttgccgcatattgtcgcatgaaaaaaggatccccctgctttctcctgatctacagatgggctcgcttttacgcttgccttacatttccctcgagatttagctcttttcgcgcattttggggcagggatccgcagggaaaagggtgaattaagatgaagaattgaaagattggttaatttgagctttagctcaggaaggcggtaatgtaattgccagtaagtgcactcattaaggcagccagtcgcggggagtcgccggacttcattaaattcttaattgagaatgaaggcagtgatgtgaatgagcggggcgataatggcatgagcccgttgatctacgctgcctatttcgcgcatgatgatgtggtgagaacgcttctagatagcggggcggatgtgaatgcctgcgggaataacggaatcaccgccttgatggctgccttgcaaaacccggctggtgagatgattgccagactgctgatagctaatggggctaatgtaaacgccagtgacggacagggtttgactccgctcatgacagctgtctacacagaaaacatagagatgacatcttttatccttgaaaaaggggccgatgttaactttaaaagtagccaggggtggaccgcccttgaccttgcgaaacaaaaagagcaccgccagttaatacagctgttgcatcaggccggttgttttaaaaatgccgacttaatatacgcggccaggataggcgatgctgattgggttgccgcactgatcgacgcaggcgcagacgtgaatgaaaagaacgaagaccaggagaccccgctcttgtgggcatcgtttaatggtcatctgaaagtgatcaggtacctgctggacaatggagccagggtagatgaacggaacaaggaaggttggagcgccctgatggcggcagtgctcggcgagcgcctggaaacagccagggtattattgtcgagaggcgcggatcccaacgccgccgtccgtgagggggtaactgcagctatgaccccgcccggagacggtgaagaatctcctaattgtgataaaaatgaaggggtgaattctaggtacattggtaaaacgcccctgatggctgcagcggaaaccggcaacgaaagactggtaaagctcttactgaaaagaggcgcagagatcaatctaaaaacagaatccggtgacacggctttgacttttgccgaaaagaatggctacagcaatataattggaatcattaaaaattacagggccaaaacaggggaaaggcagtaggttgtggggaagtcgtttttgagtattgcccggattggtcggaatgtacacaactggaattttgttcttgtcaggctgccgatattatcggcagcctggctttttgtttattgaataccacctgctatgcaggtggttccaaaaagcttatagctatgggtagaaataaaaagcctccaactgttacaataatgcgggtttagccaaccgcataaaaaacagaaggaggtcgtacaccgtagataataatacactagcacatacaaaagggaattgtaaataccatattgtgtttgcaccaaaatacaggaggcaggtaatttatgggaagataaaagaggatgtcgggaaaatacttaggaagctctgcgagtataaaggtgtaaaaatattggaggcaaatgcatgtaaggatcacatacacatgctggtctcaataccaccgaagctaagtgtatcaagtttcatgggttacttaaaagggaaaagttcacttatgatatctattaagctgacaattcaaccgagatattgtcaataacagcagcaaatgtaacaggatctgacagcagcaaagctgtagaaagccagacgttgacagtaactgtaggtggcaagacaaagtaaaacagggcagccttttatttctcgatatgatcgaagacagggaaggctccagcgcttcttcgatcctttcaaattcctacattctattcagtctgccgtccggaaggttttcggcaataatcattaaatcaactcggagacggcccgatgagttccccggccaacagaaccaaatactatcagggttaccaggcggttcccgtaattattcagaataagttttgatagctaaaaatacgtccagtcttatttttatggactatacactaaggaaattattcatttcctgggacatcgtggcaggaaatattcaaactcaataatactgctactgttatctattatgtctaaccggaaattctaaccattatgttggattcttgcgcagaattaggacttgatctttaaaattattgaataatgcaccaattaattctttcctatttgtccaaactatgttaatattggtatggggataccataccctgaaccatttggttgctgcaataaggcagtaggccgaaaagctctgatagcccgactgactttgttgggctatcatctttgctgggctttttaaaaaggagaacagtatgaaatatcgtttaggtttagatatcggtattacttctattggttgggcagtgttggagcatgacgatgacgaagaaccttttcgtatagctgacttgggggtgcgaatattcaaagccgcagagaatgctaaagatggatctgctttagcattgccacgccgcgaggcgcgcagttcccgccgccgtcttcgacgtcatcgtcaccgccttgagcgcataaagcttctccttgaaaaaatcaaacttatttctatcgcagagcttgatattgtctatcacgattcacaaaaattaactgatatttatgagttgcgtcaagcaggacttgaccgtttgttgaacccagaagaatgggcccgagtgctaattcatctggcacaacgccggggttttaagtcgaaccggaaaaacgttgccaaagataaagaagctggaaaacttttggctgcagtcaaagaaaacaacaatcttatgacagaaaaatcctaccgaacaattggagaaatgttttttttagatgataaattctcccatcaaaaacgcaataaagctgaggaatacgctcatactataagccgggataaggtattcgacgaaattgtacggctttttaatgcccagcgaaaatatactaacccttttaccgatgctagttttgaaaaaaaatatacagagatagtactcggtcaacgatcttttgacgaaggtcctggtttccccagtccttatgctggcaatttgattgaaaaaatggttggcaaatgcacatttgaaaaggacctgccccgtgcatccaaagctacctattcctttgagctattcaatctccttcagaaaattaacagccttagaattgaagacataagtggtagcaaccgaaatctgaatagagaagaacgtcaaagagtagtagaatcggcccatgaaaagagcgatcttaaatttagtgatttgcgcaaactattaaacctatcccctaaccatagatttaatagtttgacctatggctcagccgatatgaatgaaatcgagaaaaaaagtaagtttaactaccttaaagcctttcatgatatccgtaaagctttagacaaggtcgctaaaggacatattaaccaattaaccattgaacaaaaagattctattggcgaaacctttactctgtttaaaaatgaggaaacggttgctggcaagttaaggcaagctggattatctaagtatgacattgaagcgttgttgcatctatcatttcgtggctttggtcatctttccttaaaggccctaaaaaatatcatcccccatctgcaagaggggttggtatattcggatgcggctaccttagccggctacaatttcagagcccatgacaacgagaacaagcacatgtatctgccagccaatggcgaagaattaaaagacattaccaatccggtagtccggagagctgtttcccaatcaattaaagtaataaacgccgttatacgccaatatggcagccctcagctaatctgcttagagttaagtcgcgaaatgggcaaaaattttattgaccgcaaaaagatagaaaagcagatcaaagaaaacaccgatttaaatgatgctatcagaaataaggttatagaatatggacattccaatcctaccgggcaggatattgttaagatgaaattatggcaggaacaggatggtaggtgtgcgtattctggacaagcaattccaatttcaacgctttttgagcctggtgtagcggatgtagatcatatcatcccttacagcatatcctttgatgacagttatgccaataaggtgctggttaaaagcagtgaaaaccgccagaaaggtaaccttttaccctgtgaatacttaaaatacaaccctgctaatttagaaagatttatgatctgggtcaataccagcgtacggaattatcgcaaacagcagcggttattaaagcaaagcattaccgcagaagaccgcaataaatggaaagaacgtcaactgaatgacaccaagtatatttccaggtttatgctcaactacatacgtgattatttgaaatttgccactgttgataatttaggaaaacgccaggtgatatctgtcaatggtagtattactgcttacatgcgtaaacgttggggactaaaaaaagatcgtctagcaggggacttgcatcatgctatggacgcggccgttgtagcatgtatatccgagagcatgatccgcaaaataacgcgctacagccagtactgcgaagccaaatccatccgtaatcgttttattgactatgaaaccggtgaaatcatcaaccccctgcaaaagcgttttggagttaggttcatcgagccctgggataaatttaaggtcgaattggaaagccgcctgagtgctgaccctgctctcagaatacaaacctataatcttaaaaactacctcaatcctgaaaatgtaaaaccaatttttgtttctcgtatgcctcaacgtaagaaccgtggaccggctcataaggataccattcgtagcgggcgcttggcagcgaaagggttaacggtatccaaggttgaaataacaaaactcaaactggatgccgatggcgaaataaagggttattattatcctggtagtgatctaaaactttataatgcgttaaaagaacgtttgcatgattttggtggggtagctttggtagcgtttaaggaaacgttttataaaccggcagctgccggtaaaccagcttcaccggtaaaaaaagttaagattattgattcctgcaccctaaatgtaaatgtaggttacggtatcgccgcaaatggtaatatgcttaggattgacgttttcaagaaaacggatggctattactgggttcctatttatgtatccgatactgtcaaatcaaccttgccaaataaagctgttctggcagccaagcccattaaattgtgggtggaaatgcatgatgatgattttgttttcagtctttaccctaacgatctaattagattcgtccataaaagcggagtgggagcaacatgttgggataaaactaaagtcactttgaaagaatcctttatgtactacataaaagcgagcataagtactgcatcaataagcgtggaaagccatgacagttcttataccattcccagtctgggcgttaaaaccctggcattaattgaaaaatggaatgttgatgttttaggcaatagaagtttggtaaaaaacgaaaccagacagtattttcccgggcaaacaaagtgaggtgagccgccatctcctaccgtaatatcatgattacccatagatctaggataagtagcaaaaatgagcaactgcagattgtcttggattcaggtgaacatcattctgtcccaattgaagatataaacagcgtaatgattgagagtgaaaaggtgcaaataagcagtcatgttctacagaagttggttcttaacggaactgtaacatttttatgcgatagacaacatatgccatgtggcatactactgcctctcaatgttcattcccggcagttaaaaataattaataatcagttgtctgtaaaaaaaccactgaataaacgcctatggcagcaaatagtacagcaaaaaattattaaccaggccgaatgtttgcgtatttgcggcaaagaaggacatttggacttatataatttgcacaaaaaggttcaatccggagacgttacttatatagaatctcaagcagcagcaaaatatttcaggttgctatacggtgatgattttcgtcgttataataaaagaggttacaataataccgacattattaactcggctttaaattacggttatgctatcttaagaggggctatagcgcgaaccttagtagtctatggatttgagccctctctgggtatattccatcataacgaaactaatcgttttaatttggcagatgatttaatagaaccttttcgccccgttgttgatctttttacttttatacatatcaaaggagataaatttacatctcagcataaacagaatttatatggaatactaaattacgagataatgtcagctaacgaaaaacatagtgttatctattccattgaacgaatggttaaaagtttgaccgccacttatcagaataattgtgggcaattaaacttaccggttatttgtccactcaaaacccatacttttgagtaatcgatttatgcgtataatggtattttttgatctacccgtggccacaaagtctgagcgaaaaatcgcttcgaattttcgtaaatatttaataaaagacggttactatatggttcagttttcagtttacgctcgggtctgcaatggctacgatgccgctgagaagcatattaacaggcttaaattaattgctcctaataacggctcagtccgtgctttaaccattaccgaaaaacaatacgaatccatgtatgttatcacggggaaactattaaaagctgaacgcccaattagtgttcaacaattgaccatattttgaaaaaggacgaaaacaacctgaaatatttaaagaagctttatatattattcataaataaaaccccgatatgcccggcatatcggggttttattggggtgtataataccataccttgaaccatcagggagctacaacaagggtatcgtctaccccatcgtttccggtataataccataccttgaaccatcagggagctacaacctggaggataatgtggcatttgattgtcaggataataccataccttgaaccatcagggagctacaacggtcaaaggctgtgtgatcacgtcggccagataataccataccttgaaccatcagggagctacaactgaaaactgcagatatgtttttgaggtcgaaataataccataccttgaaccatcagggagctacaactgcggcagtgttaactaccctgcctcccgtataataccataccttgaaccatcagggagctacaaccgccagtaatgttttctaaccggttttttcataataccataccttgaaccatcagggagctacaacttagtgatataaacatttgtaaacatcaaaataataccataccttgaaccatcagggagctacaactggcctgggggctggatgtatatgctaatctaataattgaccggtttaacccgtaatgctaagcaaaaag

SEQ ID NO: 2988 - DNA, 13079 bp, synthetic construct
  misc_feature 1..13079: note = Synthetic
  source 1..13079: mol_type = other DNA
tataagacaaatattttatttcatgctgatattaatggtgcaatcaatcacgtcaaagttaagttttccaaacttaacttttcgtggttgaaaaattacaaacaaaaaatatgtaatccaataatttttaataaaagtgaaaattttgctattttatagcataatttttgagtaaggatcgattaaagatcaaaacgtaataggttttcacttgatttgattaagcttgaagaactataaagttacggcgtagtttaattggtaaaactgtggattcaaaatccattcccttcaaccatatcttcaaaataaggtagaaaattataacaaataaaatatgaaattttacattttttatttttgtgatattatgaaatttaaagaggtatctggaccttataaatcaaaaactaaaaaaggagttttgatatattccagaaaatcgatatcaaacagagttttaaattaataaaatctagttaataaaaaacatttagatacaattagaaaggacagacgttttttatcataaatatattaaaatccttttctaaaaaaaggaataaaaaatgaaaaattataattttttcatcttgatatttatatcatttgctttttcggctcacttggttgatccaaggatttcgaaatatcaatatgattatgatatctattaaaaacaaaaaaaagaaatcattggggaatgatttctttttttttatttacttgttacaactaaattaataaaatatatgtagatttattttatcactttatgtttcaagtatattttttaaatgacattataaaacatactcttgattaaattatacttcatttgtttagatattacaacaagcctattaaataaaataaaaaagataccttattttttccacaagaataactaagtttctctaaaaatgaattttctttaaaaaaatattttttaaattaaaagttatttttagcttaaagaaataaaaaaccacttaatttataaaagaaacaacttgctgaagtatttttattctgtattatataagcaaagatttataaaattaggaatataaaaatatgaataaaagagttttagggttagaccctggtattacaagtattggttgggtattaatagaagaaaatgaaaaaggtgaggcagtaaaacttattgatggtggttcaagaatatttaaaccaatttatgaacctcaatttttaaaattaaaaaacaaatctagaacagaaaaaagacaaacaagacgccaaagagatagacgtaaaagaagaatgtcaaaagtagaaaatttcttgttcaaacatggtctattatcaaagaaaaatgatcaatatcacgaagaaaataaatcaattcaagcagaattaggaaatccttataaattaagaagagatgctctttatcaattattagaaaacgatcaactatcttatattattcttcatttatttagaagaagaggtttttattcagcattaaaagctaaatcagcgtcagaaaagaaaaaagacgcagaagcacaagctataatggagaaagtaagagaatctaactgtgcaactcttggtgaatacttttggaaagaattgagatcaaatccaaaagcaagagttcgtggtggagagtctgaattttcaatattaggttcagaaaaaatgctacgtgataacttatatgacgaattagaattgatactaaataagcaaatcgagtttggtaatacttctttattaattagagatgataagacaaataatgaaataagagaagagttattacgtttgtttagattccaaagacctttaaaaccacaaaagagaaaaagtttttgtttattggagacaaagaaagcaaaatttaaagataaaaaatcaaataaagaaaacaataaagaaaataataaaaacattattaaaaacattgggctaaaaacagcacataaattaacagtttactctcaggaatttatcataagacaatctattaataacttaatagtagaagaaatgaatcacgatacaggtgaagtattcttggtagatatagacttagaaacaaaagaaaagttatttcaaaaagcatgggtgcaaaaagaactttctttttctgcaataagaaaagaattgaaggtttctcctgaatctaaaataaatctagagtttggtaataagaaaggtattgctggaaatcaattatatacaattttcaaagataaggaattaaagaaatggttcaattccttaacatatgatgaaaagtctgacttaatgactgatattcatatgatcaaaggagcggaatatttgggtttaagaaaagttttaattaaaaaatggaaactttctgatgaaatgatagacgttctggttattgaattagataaagctttaaaaccagaatacacttctgtttcaaagaaagctattgataaattacttcctgaactaagaaaaggcaaaaaatacagtgaagcagttgattcaatatatcaaaagacaaactctataaatcaaaaaggagaggtttcacctctattggaaccatttaatccgataacaaatccgatagtaaataaatcagtcgcagaagtaagaaaattggttaatggtataataaaaaaacatggaaaaattacagaaataagaatcgaactagcaagagatttaggtctttcagcaaaaggtttatctgacttacgagcattgcaaagcaagcaagaaagaaaaaatacagaagctaagaattatttagccgaaagaaatttaaaaataaataaagaaaacattgaaaaatataagctttggaaagaattaggtgaaaaaacaatattccctgaaaaaataaatggtcattggaagtatagcaacatttcttttgatgatgtatttggctcaacggcaaaatatgaaatagaacatattcttccaaagtctgaaacaggtgatgattcatacatgaataaaacactttgtttatcaggtgtaaatggagcaaaaggtcaaagaacaccttatgaatattatcaaaaagtaatgacaaaagaagaattggagacttggattaaacatgtgtattcaattttcaatgacaagcatgattctaaaaacaaaagaagtaagatattactaaccagaaaagaaatgctatctaaaatatcaaacaatacatccttgaatgatacaagatacattgcaagagtattaaaagattatttagagccaatagttgtagataaagtagaaacaactaaaggtggttattctgctatgcttcgtaaagaattagatttaaacaaattgttaggtgattcaaataagaaatcaagaattgattatagacaccatatgattgatggattagttattgctctatcaacaaaatcaacaatagatgcactaaataagattaggaaattaccttcttatgaagtgtatggcaataaaaagtctaaaagatataatgatcttcattcaaaaataaattcaagatttaaaataagacaagattttgaatatcactttgaaaaaacattaacttctcatgaagtagaaaataaaccttcaggtggttttgacgaagaaacaatttactcattaatgagaaagaaaatggttaaatcagaatgtggtgagtttgaatatcctatattatcaaaagtagatttatcaaaatttgaagatataaaggaactggattcaaaagaatatgacgactgtgtgtttgtaacgtctaaaaaagccagcagtgagttggttggcaaaaagataagtgaaataataaatggtaaatatgctctgcctaaagaattatttgaagtgttgattaaaatgccaaaagataagaaattagaacaaataccaatattgaaatctggaaatgttttgaaaaaagtaaaagaaatatattccaaatttaaatctacaaactgtcattttattaaaaacaaggagaatgaagttattggttttaaaaaattaggtagtaatttctgtgtcgttggttataatactgatacaccaagagttatttcattgtttgaatatttaaataacaaaggaataagcaaagaaaatgtcttgtttaaaggaacaataatgaaagataatgttggaaattattggaaggtatataaattttcgggcaaagagatttgtctacatcctataaataaggtaaaaatagaagacagagatgttgtaaaacataaaatccctaaaaacaacataagaaaaacacttaaatctctgaaagataataattttaaaagtgtataatttaagtcgtatctcttttaggatctcttttgtgtaagttgtaacaagtagacaaattatatataatttaagtatacgttattgaaaggtaagtgttcaagataattgtagcaagtaaaaaaataatatataatttaagttgaggaaatgattgaaacgatatcgtttagttgtaacaaataatatataatttaagtcgaagtagacgaagataaattgaagcgtgtgttgtaacaagtaaacaaataatatataatttaagtacaatctcttgcaaccaaaagcaaagattgttgtaacaagtaaacaaataatatataatttaagttaaggtaaatctccaaaaccagtcatagttgtaacaagtaaacaaataatatataatttaagttctgacttattttgtactattcaagatagttgtaacaagtaaacaaataatatataatttaagtaatgtctttttcgccatcggtaagaatgtaagttgtaacaagtaaacaaataatatataatttaagtgtgcatattccgcaccaatccaacaattttgttgtaacaagtaaacaaataatatataatttaagtcgtggtatacaagtaaacaataactctttagttgtaacaagtaaacaaataatatataatttaagtgtcacggctttatagacatcatcgtatactgttgtaacaagtaaacaaataatatataatttaagtccagattattactaccacctaatgaccttgttgtaacaagtaaacaaataatatataatttaagtatatactcttaatattttcaataaatactaaaaatatatacataaatttcacaaaaaaaagaatcttaaattataagaaataacacaatattcgaaaatattgtgttattttttttctaaaaatcaaatgataataaactgtggtggtgctttcatttctttcttatctgctgcttcttttccatagtaagtgcatattgcaccaaattgtttatccgtcattgaaaatgtttgtatttttccatactttggtaaatttttaataactctgtcttcatgtgtttttaatacagcatgattgccacaatgtcttttataaacactgtattgcaacatagtaaaaccatcgtttaaaagaaactctctaaactttctatatctttttctgtcggctggtgtttctgttggtaaatcaaacattgctataatccacatacttctttcctctttcatatattcttccttacagtattattttaggtaactttaaaaatggtttttcttcttcgcaaataatgcttttaacactacttatataaatagggattgctctatcaacgatagttgctttatctacgacaagacaagtctcatttatgattttaataaagtgtgctctgtctgatttttcaaatcttaattttttaacatctttcttttttatgtattctttaatatagttatcaacaattggtcttatcggttccattaaatcacttgctaatggcatagggtcatattggttagaatgccaaattccaaaactagggtgtaaaccagtagcagcaatgcttctcccgatcattgccctaacaatggaataattgtaattcaaataaacatttatggcgtcttcaccatcttgttgtcttgcaaagtcattgccaaataaaagtttgaaatacatttttgcagcttgtgcttcaatatttgttttatctcctaattctacttgttttataaaacctttgaatttgtttgagacaataccttgtctttctaaaacaagatactgatttgttattttggctttgacaatagttcgccataatttatttttaaatgtgtttgtcattcttgattgaaaaggtaatgttttggtttgtaaagtgtttccgtgaaagggcaggagactgcagtggggattgtgtcggtagtcagtaaacacaaggcaaatattatatcgagtagaccaagaaaagacttcttttgtgatcgttatttctcggtgatctaataaaataacagtaatatcttcaacaggaacactgatttcatcttcttcataatgaatgatgagttgtgaattagagatagacagatgtgcttttttttctatcataataaaagtatgtttcataaaacctccttatatatattacattgtattaaatcatattttgatttttttaaaaacataaagatttgattcatttatttttctttttatatataaaataaaattatttcatttgataaaaatatcgttttgtttttcttgacttaaagaaaaaaagcacatataatataaatatgtttacttgttacaacaaaggggcatctgcctcgtagttgtaaaaaactttacgataatcgtgtattatcgtctcatttaaagaaaccgccctagttggcggttttttgttatttgaaataaattgaacatttcttgttattgtgttaatatagagttattaatgtttaaggagtaaaatatggattacgaaaattacatgaacagtcctgagtttaaagcgatgcaagaaaaaagagaaaaagaaaaatgtccaaagtgtggaggaacaaatcattttttgcaaaaacataaagaaacttgtccagattacgaacatattatggatgatcactatgactcagcgtgtatgagagggacttgcaagcattgcaactcaaaaaaataacaataaaacaaaaacctttcagaaggttttttttatttttgaaagattttcttcatatgtaagaactatatatatagtatcaaattatatatttggagattattatgaaaaacatattaataataaacgcctatgaaacaaatcaagaattacaagaatctataaaaaatacatttataaagacaagtgttaatcattttatgaaaataaatacaaatgttattgttctaaatatggaagatgatttaaccttagaaaatcaagtaagtctttttaattgggcagatacagtaatgtttcaattaccagtaaactggatgagtgttcccgaaaaatttaaaaagttcttaggaataacattaaatacaggagcaaaaagagaattaaaaactcataatagacaaaaagaaataaattatatgctttcattgtcatttacttcacaaagtgaagcttttggaaacaagaaaaagaattatttaattgaaaaaatgattgataatatcatttcaaatgtgcattttaattttaatggtttaaaaatgaaaaaaataaaaacatttgtatcacttaattcacttaaatcaaaaaaaataaaaaatgataaaagtagatttgttgatcatctaaatgaagtttttccgattaataaagaagaaaatgtatctgtgaataaaaaatatttaaatcatgaattaatctaattcataatgtatttcagataatcttcggattttttttctgtttttaaaataattttcaaaaacattgttttttaaatcattaatttcctgaactaagtttaagaaatcgttggagtcgcctttccaaccatttttattcaattctttaagaatatctttaattgattcatttttaatcgtgtacatattttttccaaattgatttaactaagagcaaaacacattactatatattttatttaagaaaaaaggtagaagcgactctaccttttaaacttattccttctttttggttttaaatcatttctttctatttgcattttttttgtaaaagctaatagtttaaccatatcttcatcttctggtggattgttatcaaagtattcaataattctttttctttcttcttttaagtttaataatttatcaaatattttgtcataaccttttgttgccattaagatatcacctgactctagaaaaacacttttaaagccatttcttttgtaaaattcttctaaattaaaaccttctttttgtttgttattatttctagcaaataataaatcaatatctgttatttttgcaacttgttcattaaagagatctattaattctcgtccagcaccttgtccacgatattcttctgaaatctcaaaagagcttataaaaccgacttttaagttgtgttctcttaaataatcaaagataagatcaagtttagattcagatatgtcagagttcatagagaaactatcagagatttcgtctattgcataatcttcaattgcgataatagcattaagttcgcctttttcagatttaattttttttaaatgttccattttaatcatatccaagttccagatcttgaattaagtctataacccaatctggtcttttatcccaagatcttgttgctgcttcttttattatatcgtcttctttggattcttccaaattaagataatcaacatcaggcataacaccaactcggtataaatctaatcgatctgaatcccaacaagcagcaatttgtgggtctttatgatgtcttgtatgtgtatgatcaacacaagcttcataacatttatcaatttcttcttttgttaaatttattttatatttgtattttaaaagcattcttccaccattgtagccatgaataggttcatcgtcttctcttgttcttccgacatcatgaaaaaatgaaaatgcgataatgatatttttgtttaagttaggatttttgtcgcaaagaatgattccattttgtagtacacgagtccaatggtcaatgccatgcacaccattaaataattgaagatagaaggattctataacttcaattaatattttttttggtataactttatatatttcttcttttgttatcattttatattcacttatttttgttttattatacgaagacttgtttgtttaatcaagttttgataaaaataaaattatgatataatgagtttataacaaggagtattataatggataaagataaagttgttttagaattggaactttcagaaatggggttcatgaaaatggaattaaatgattttcaactaaaatcttgcccagaagatagattagttgctttatcaggtaaaggtgacgatatttctatttatgtaatgggtgaagaaaaaatgggaaaaataggtcttaattataaagattgtgtagacgaattaccagatatgaaaatatatcaccaaagagttaaggcagaaaaaatagaaatagattcagaagataacatggatttattagaaaaatatgaatcatttttaacaagaaaaaatatgactgaaaataaaaatacttctaaaacgagaagaagtgtaaaaggattaaagaatttataaaaatgtccttaaaacaatttccgatacaaaaattagatttcagtgactctgagatctatttttgtaataatgatatctttaagaagattgaaatcttaattaaactggagccttttcaattaaacttaggttatgaagtagaagaaatagatcaggttttggaaatagattttgatattgaagaaaatgaaacgataaatgattttgaaaacaaagtaatggaatttcctgttaatcctgactatggatatgtagaatgttcaatatacataggaaatgtttataacccaattgatataacaaaaatagaatttggaaaaagaatagagaataaaattccagttaaaatacattctcattggttgtttgaacatgaaaaaacaggttttaaaaatgaaaaaatcattatagaaacgatattaaaaattgaggattatttttaaaattaataaatataaaacaaaccgtctaatcgatttaggcggtatttttttgtttgagaaaacgataaaaaatgatataataaagaatataaatggagattaaagtatcgtgagtaaaaatttagaaagatttgtgtttgattatattgaaaaaattgaagatattgtcgttttttcaaaatcggaagtatttgaagacattttaatagcagtcgaaaaagaaagaaaaagaataaatgaattgttgtttgaaaatggtattgataaaaaaatacatgaaatagaacaagataaaattataaacattttaaaaaaggataaaattaataaaatattaccaaaagatctggggtcttttgtaagcacaatgttttactcagaatcaaccttaacaaataaagaattaatatcttaccaaaaaacaatagaaaattttgaactaacaaaagatgtctctcacatttatcaattagcatttattgaaaaagaaaacattaccgaaaatgaaataacaaatgattttaaaacgacactaaattctatatttaaaaatttaaaagtaaaagataaagcagagtttgtatctaatattaatatttttttagaaaattacatggaaacagactttggaagtaaaaaaatagagattattaataaaaaatataaagaagcgataaatagtggtaaagattcaaaagaaatctgtaaagactggttccaagatttaatagatgtagtaaacagcaacacacctaaaaatataaacctagtttatgacaaagaaacaaatgatttaaaagcaagcacagaaacaggtgggctttttgatggttggtatataataaatcaaacaaaatatgcggaattatcattagaggaaaagaaaaaatttgataatgcaaaaacagaggcagaattaaatgatctggaagattctcgttcaataaaaaaacaattgcaaataagtacaacaacagatcgaggtttagcaatagaaggtgattcaattgtgcgacattcattagctaatgcggttatatcaacggttttaaatgaatatttagaaatacaaaatgattcttcttttattgattcattttcaaaacaagttttaggatttgaaggaaactcaacaatgagaggtgctataatagcttcatttaaatccgttttaggaaatgacttttttgaaggtttagacttagaagataataatggtgttggttcaaaaaaagcaattgaaatgattcaaaagaaaacaacaaaacaccctgtttattatattaaaaaacttttaaaaagaaaaaaagatttgttaccagaacatgttgaagaattattaaaaaaagaagaattatcaacgacactatcagaagaagaaatggattcctttttaaatctaaaaaatttaaactcaatgaatggtgaggataatggcaattgggtttttgagccattaagcaatgtatctttattttacaataacagagtgacttctgatataaaagacgctatgtttgaagaaaaagacttaaccgcttctgagcaagcaatgttgattcaatattctgctttacttaaaatgaaagtgactagagatattgaaatgatagatttatctgctcttaataaattcacaaaaggtcatataagattaaaagcgtcctcaccgtcagaaaaatataacaacgattttatttcaagtttaacaatagaagaaattgatgaaaatatattaaatacatttgttttttcagaacatgcagaagaaaattcacgtaatttaaatcaatcaacaaaagacgttttatcaaagataatatcttcaacattaaaaaatgaaaaatatttagaagaaattaatgtaaataaaatatcattttctaaaaaaataggagaaatgataaaaataacaaaaccaagttgtttttccaacaaatttatagaagatataatgacaacacaagaaaacatagcttataaaaatgaaaaaacatggaacgacttcacaaaaaaagtaagaagaaatcaagaattaaatgattttgaaaaagatatattgcttgaaacaagaaattatttagagcttaataatcttaaaatagcagaagaatattatgaagatatagaagaaaaagattttattaatatattagagaatgctatttctatcaaaaatgaaagaatacaagaatttaagaaagggtacaatattgaaaaccctttattagaagaagatttcgattatagtcaagaccaagaaggaaatccttttttgttgaaaacagatcaacaaaagaaaaaaaagaagccaaaatatagataaaaaaaagattttactctcttttttgttgattttaaattcaaattgttttaatgttagaaaaacattggaggaaaaaatgtataattacgaaaaaagaggcgaagattattttctttgtggtcacaataaagaaataaatgtaggtaaagaagtaggtttaagttatacatattggagagatgaaaacggaaaagcaagaggctttctttataagcatggaaaccgagaagagacattaacagtacacaatataacaatagagcaatataaaaaagtttcagaagacgaaacaattggagaaacagctctgaaaatgcttcaagagtcttattttgtttctggtgcgtttgacatagaagaattaaataagtgtttaagcatttcagattatgtagtgcaaatgcatgaaaaaagatttgcaatcgcttaatatagaaaaagaagaaacgaacgtttcttctttatttttgaattttaaaagcaaaagaaactttatctttgttattttttagggcattgataaaagttttcttatcagtcaatttgctttcaaaataatatactggtttaaagagatttgtcacactgttgcatagaaaataagcaaattccattccttcttttgaagaaagattgcagatattacaaatatcagtcaatgaataaatttcttttttttcatcaatttgtcctctagatttacgtttggataccctgtcc

SEQ ID NO: 2989 - DNA, 23426 bp, synthetic construct
  source 1..23426: mol_type = other DNA
  misc_feature 1..23426: note = Synthetic
gtgcagcagagggaagcgtgccgaccagcagcgccaaggcggcggcgctggccacagtggtggagagtgcgctggccacaggggcggccagacgggtggagttcagtggtgtacgcatgtgttcagtgtaggtgacggggcaggggacggatggggtttacagtgcgggcgtcgcatcacctcaaaaaactcccccttgcagcacttgccagcatggtgctagccgccagcctcctcatcggcactgggtatttgccactgctagttcttccacgaggtcaaggaagaagggagactttgacaaaacccacaacgcacccccagaagagttcctggatcctgattcgtcaaagtgaatcgaggagagagcactatctggagaatggtgaaactgttcatggctgggggcagcgttgtagtaaaccgacagcgagcttctgggcagcgagcaacggggcggtgtgtggtgggggacggcgtgctggttgtggggtcagcgggcgcgagagttagggggtgttggcgctttcttccgcagctacttcagccgaggccgtcttatcggcggcagcgtcgccgggcatggcgtcaccgggtgcgtcggcaacaccatcagtgtcgtcaccgtgccagcggtcggagtcgcggatgccccacttggccaagaagaccgtcagcagggtggccacaccgcacgctacgaagataatggcggttccttggctggagagcttgatggccaggtcgttaagggcggtggcctggtcggcagtcagcaacccggctactttggcgcccaccttgtcggcggcaccggtactcaccatgtcccggacggtactggcggtgtctgcaggcagagaggtgaagatagagttcttgtccaggccgttgttgatgtgactggctaggatagcgccgttgatggcgacacctgcggcggtacccagcggcatggcggcgttggccatgccggtggcgacaccagctttctgcggaggtacgacggagacggcaatatccatcatgaacggggtgacgaaaccgccgccaatgcccataaggaggaaaacggggacgatcgctacccagttggtggtgtagttgatggaaaggccggtgaggaggccgatggcgttgatggccatgccgatggcgacgacgttattggcaccgatctttttcccgagggggccgaccatgccggcaacggcgatcatgggaacggcaacgagcatgatgatagcgccgatttggataggcgtgcgctgtccgacgccgaacatccagtagatgcagtagctgaacagtccgaagctcatgagtttggagacgaagccgagcacaatgacggtgctgtagctgggaatcttgaacatgttgaggttcagcagggcgtcgtcacccttgcgcgattgccgccagatcatgatacccatgacgataataccgaggatgaaggggaggatggtccgccagctgccccagccacgttgcggtccgtagaggatggcgtagttgatggcaaagaggctgatgacagtgtagacgatggtgaggtagtcggctttgccttgggcagtggtgccctcggcgcggagcgtcttgtaggtgttgggtacggcggcgagggtaccaaggatgcagatgaggccgaggggcacattgataaggaagagccagggccaggcgccgcgaccaaggaagtccccggcggtttggaggatgataccgccaaccagggggccgaaggccatggcggcaacggagacggtcatggagagaccaatagcacggttgcggcgggcagagtcttctttagcgtaggcgtctgcgatgagagggatgcaggtgccgaaaaccatggcggcgccgaagccttggatgccacggaagacgacgagactgtctgcggtgggggcgaaggcgcaggcgaggctggagagcataaagaaggcgtggccaatgaggaagagcggccgtcggccccagaagtcggaaatggcaccgacgccgaggaggagggaggcgaaggcgagggtgtaggcgttaattacccattgggcgctggagaggggagcattgaagtagttggcgatagaggatagcgcgacgttcacaatggtgttgtcgagcgtcatgatgatggtggagaggccaacgaagacggccgcccagaccggtttcggggtgctctttggggtgtttgtggtggtcacgggcatccttaaacgaagtttctcaaagtgaaaaagttaggcatggctaactttactcgtattgtctttaggggcaacccggccgcctgaatattcaccagtcttcatgcatcccttgagttttaactgagggtggtggcggtgtgtgtactggccgggtggtggcggtgtgtgtactggccgggtgacggctgggtaatggctgggtgatggcacgcggctggcggcagcggggtgtgacaagatggagacatgactattatcgcggccgcagacggctcctctttgggtaaccccggtcccgccggctgggcatggttcatcgacgagacctgctggcatgcgggtggctggccgcagggcaccaataaccagggcgagctgatggccgtgctggatctgctactgtccaccaggcaccgcgctgaggaggagttgcacattctgtgcgattcccagtacgtcatcaattcgttgacgaagtggatgccgggatggaagaagcgcggctggaagaagggggacggcaagccggtactgaacacggatctgatgcgccagttggatacggagttgcgaggacggcctgtgcgcttcacctgggtgaaggggcatgcggggcacccgttgaacgaagcggcagattcagcggcccgcgcggtagctaccgcctaccagcaccaccagccgattccggaggggccgggcttccccggcgcgggcagcaccagcgcgggcaatggcagcggcagtggtgccggtagtagtgcagtcagaggtggcgctgccgtcactaccccacagagcagcccgcgccatggcgcgcctagccctacgcccaacgctgctcagaattccgcacccacgtccacccccagttctgccgctggaacgcaggacacgctgttctaaccgcgccttccccggcgtttttcctggcgttttccccggcagcgccttcttggctttttccggcgtctcgttgtacgccttcaccttgcccattcggcagcccaccacatcgggcagccttgagcctgtggccacacttagtgcctcacgcgcaccggggcgctaggcggtgatgagggtgagggtccagcagccgtcgccaccctccaaacgggcaccgctcaggtggtcactgcccaagctgccgcggatggtggcaaagagctgcggctgtgcctccacgagttcacccgggtcgttgatggtgagcccgtcaccccccgctttcaccagcgcctgcgtcaacaacccacgccagtgtttcgcgttgtgggacaccactttttcgcggccgttagtgagccgcacaacctttacctgcaccacgtcgatggcgtactcctggcacacccgcgcgttcggcatccacgctttctggtaggcgccagagcggcagtcgacaaccagttccccttccatctgctgagtgaaggtgtttttgagagcgcgccgccagtaggggccgagggggccgatgccggggagatcgacgttcatggcgcagcggtaggcggggatgcggtcgccggggcgaacccacccccacaacccggaggcgataaggatgtgcttgtcggcccaagccaggtggcgggggcggccaccgctcagttgcgcgccggcgtagaggacaccggtgtaaatatcgcgggcgggggcagcgggttgctgccagagggtgcggttgcggtagacgtctccggcaacgcgttggccggcacccaggatggtgagggcgtcggggtggttgctggcggcttggagagcgtcaccgacggccaggcgttggtcggccaggtgggggtagaccaggctgtcgaggcggatgggggcgcggtctgggctggcgggggttttcccttcggagggtggtagcagaatgcgcatgggtgctggtgccggttgctcgatggcggaggctagccgccggccggggctagccgctgggggtaagtcgatgggcctagtcgacggggttagtcaatgacggtgaggacttcgctggtggggcggcgggtcttcatgcggtgctcggcgtcggaatagccgaagcacacgaacacagtgaggtggaactcctccggatcgtagacgccacggtcggtgaggagctcctccagagggcgcttctggaacccttcgatgggggtggagtcgatgcccatggcggcggacatggtaagcatgttgcccagcgccatgtacacctgcttatcaacccagaggttcttttcgcgatctgtctggaagtcttggtcctcgttgatgaaggtgacgtagcggtccatgcgggcgtcaagtccctcatgcggatacttttggacgtcctcgtgtatgtgggtgagatagctactgtagggcttcatctggtcgacgttgcggccgaggagagcaacgaagtggctggcgtcttcgagtttaccgacggctccccacatgtgggggagcatgtcgttgatgaggttgcggttgttgatgcggacgaaatgccagggttcgaagcccatactgctggggctcatgcggccagcttcgatgatggcggcgaagtcctcttcgctgacccgcatggtggggttgtattttttggcggtgtagcggttgtggagaagctggacaacctgctcggcggtcatgcagggggtgaggttggggactcctggctggttggggaggtgctgggtggggtcggtgctcattgcgggtgcggtctccttctacggcttctcggtgtggttacagcttagcgcgggagcggcgggtcgatgcgccctccgctgtcagggctgctgctgttgtggctggagctgccgcctttactgtggtggtgactgccgcgttcagcgagagtggtagaggactgatcacctttccggctggacccgtcacccctaccgctaccacttccattgctggcggcgttcccgttggcggtgtcggcgcgggcctgggtttcctgccgttcacggctacgggtcgccatggtttgctcggtcagcttggcgcggcgatccatctcggcctgccggcggcgggactgctggcgctgctcatcggggctacccaggcggttgcccagccgggtgaagcgggcagtgatgcggttgcccaagtcctgccaagggccgtcgggcacggtttcaccggaggtttcttctagttccttttggagttcttcccgcaggtcgtggccggagatgaggaggccgcgggcatcgttggccagctcgtccccgttatgcatttcgagggcgacgcggatacgttccatgcgaacacggtcgcgagcttggagggcacggggcatggcgacgcaaacaataccgccgaacatgttgagggggatgatccaccagaggaagccaaggatgtccaggggggtgacgctggagccggcacaccaggcacccagcatgatgagcgtgtcgaggacactgtggagcataccgaagccgaagaggaggatgccgccgaagagggcggccacgattttgccgacgacttcgctggtgcccatctgcatacgggtcatgagggtaatggcggtgccggcaatgatggccatgagcacggttttgaggtctggggtgagggaggcgaagtgttccccgtggtggatgaggacatggttggagtcagggaaggcggtggtggtggcccacatgacaacgaggccgccgacgaggttgccgaggaaggtgtagaaccagaacctgatgagttggcggatgcgggcgcggcgggcgacgacggcaaaggtggggacgaggaagccttcggtgaagagttcggaatgggcgaggaggagggtgatgaaaccgaggctgaaggcgacgccgccgaggagttggctgctggtgagatcagtgacacgcatgccgatgaggatgccgaggctgatttccatgccgcccatgacaccggtgatgaattgttgggggcgggggcgggcaaggcgttggcggccttcgctgacctgccggtcgaaggcatcgtcgagggctttttcgcggtggaaggtggtgttgtcgtcgttgagagtggcgatgcgttcttcttggacgcgttcacggtttttggtgaggcgttcttcgatttgggcgcgttggtggttggctcggctgttttttccgccgtcgatgattcccatgggttgtccaccttccttgggcggggagagttcacaaggacattacaagcaggataccgggggataggtgatctgtgccgtgggatggtgggttttctcgccgccagggtgacgggtctcggtggtgggctgcgctaccggtgggctctagtggccggcgctctaacggctgctgctctaacgtcctgtgttagcgatttttctaccgtccggtgccgtagagggggtcgtcggggtggcggatggggccgcgaatgccgccgggtttgggaaggatgcggttgctgctgggttcgcggcggcggaaggtggggacgtcttcggggttgcggcggcggaaggcgcagttgcggccgtcggtggcgagggggtccggggcgcgtttttcggagaagaggttgtggtaggcttcccggattttggggtcgtagacggggttgtggaggtccggcgagtaggggtctctgctttgtgtgcggggggtgggccaggcggctggggtggcagccgggttggcagccgggttggtgttgggttggtagccgtagtcatggggggtgaggccgggcttcactttgcggtgggttgcttgtggtagcgggaagctgatgccggccagggtggcctgctggatgccggggttgtaggtgccgcggaggagttggttgacgcggctggtgaaggcggcttcggggaaggtgtaggtctggaaggcaggctgttcgagggcttcttgccggcggtcggcaatgtcggctagttgggtgcgggtggtggcgtaggtggctccgaagctgtcgatgcgttgggcgattgtttcgctgcggcgggcgaattcttctagtccgtcggcccattcgtggatggcgaggctggtggcaaaggtgtcggcgctgtgggtgcgggcgtgggcgccggcgtgggtgccggcgtgggcgacggagctggcagcattgtggaggcgggcggcgtagtcgtgaagagcggctgcggcgttgcaccaggtggtggcagtagcagcgatggcagcatcgtcgagttctgcgaagtggctagccagagtgggggtgtctttgccgatgggttcgtcgtggagtgggaggagggtgagggtgctggcggagtggtggcgtagggggacgagctggtggtaggttgctgccagcccttggctggtgtcgaagttggggtcgtgtatggccccgcagaggtttccgaggaagcgggcaaggcaggcggttgcggtgaagtaccaactcattatggcttgggcgccgtacggatgttccaccagggtgctgagttgtgcggcaaaggactgtgcggaggtaaggctgctggcgggcagggtgtaggaggtggggtcggtgaagagctgcggcgcctgctcgatggcatcgttgagctgctggtatgcgctgcggagttgctcgtcgtcggtgtgcatgggggtgctcttcgccgccgtttcttggtgtatggggaaggttctgcgccattagaccacgctttgggtgtccgtggaggcgctactttcggttgtccgtgggggcgctacttttgggtgatgggttccggcgtagggttctgcggggcccgtcaccgttccacaatctttcataactggttcgcgttgctttgggagagtccctgcttgttaccactacgccctatggtgagggccatccgatcacccgctgtatcggccctgtgcaggcatcgttgctgctgcggatagacagtgtggaggtgtgtggcgcatttttctcatgatgagttgggggggggggaggaaatacgactgaaccaggagttgtatgtggtgagcagccgggcaccggctatgcgcggccccgctacgcttcggcgggggtgcgcgtcagctggtcatccacgtagccgggagcggccgacatgtagccggcaatggcgaaggggatgacgaggaccagacagaagatgagggggacggtccagccggtggtggcttgcaggaggatgccgaccagcagtgggcccaggctggcgatgaggaagccgaaggattggacgaaggaggagaggagagcggtggtgtcgccgctgcgtccgctccagccaatcagagtgagggccatggggaaggtggtattggccagggcgaagaggatgacccatagccagggcacactggcgggggcgaggagcatgcccaggtaggctggggcggcgatggcggcggtgccggcgacaaggagccgcgggtttttcactttgcctagtagcgcgggagcgagcatggcgccggggatggagaggagctgcatgaggccggcgagcatgccggcgtagttttgggagacgccgtagtcgcggaagatttgggcgagccaacccatttggacgaaggcttggagggattggaggccgaagaagagagcaagggcgcaggctttcttggagcggaacatcacccacagtttggcgggttcggccccggctgccgcatctgccgcgtttgctgcgtccgcgtcgacggctgcgctggctgccgccgtgttgcccgctgcgcctgctcgggtgtgcgctgccgcgttcgcgtcggcagtaatgtccgcgttggcagcaccactcgcgccggcaccgtaactaacaccgtcaccagccgcagcaccggtaccgtcaccagccgcagcaccgtcacccaccgcaagccggtgcttcttctgcagggcaacgaggatcccagcggggaccaccgcaagcacagccaacaccccccaaaagccgagagcgccacgccagccggtgctcatactgtggctcatgggcgcaaccaccacagaggagaggaacgccatggcggtgagtgccgtggagtacacggcagtgtaggtggggatttgggcagggaaatgcgttttgatgaacgccggcatgaggacgttggtgatggcgatgccagccagggcgacgatagagaagacgaggaaccccgcactgccccccataaagacgcggacgataagccccaggctgagcgcgaccatggcgaccagcatggtggagtggaggccgatagtgcgggaggccagaggggtgatgagtccgacgagggcaaagatgagggtggggaggctggtgaggaggccggccagcgagtccgacatgtgcaagccgccctggatttcttggaggacgggggcgatgctggtgacgccggcgcgcatgttgagcgcgaagaggactacggcgaccacgaggagtacgtgcaggtgcgtctttttcaccccttcaccctacggtatgcgcaggtctcccccgttatttcggtgccaccttatttctatggataacggggtgcgcgcgtcacaatgccgggcctccaagctatttgtaagctgacgacaacaatgtggcaatcggagctttgtttgggtggtggctgctacactttaggtagagaagaaaacaataagccggaaactcgttagttccggttgaattctcaccagtttctggtaattaaaaccgcccttcgtgggcggttttccttatttctcacaaaaatgtgacacccatatgttttagttaatgtgtcaccgattcaaaacccttttttatcttctctggagtccttgtgcgcaccacccttgaccctattcccacgcttcctgttgaaggttcctacgtcgtcggtattgatgccggccaaaactccgtgggtctgttcgccctcgcgctcaccgcggaaggcgtcccgcacgagatcctcgccatgcaatccgtcatccatgatggtggcctggaccccgacaaagctaaaagcaaccagactcgcaaagcctctgctggtttcgcccgccgtgcccgccgccggctacgcgtagaaaagaagcgtctcaacaagctggacaaactactcgatgcacagggctggcatggccgccaggaagcagaatttcccacccaaatctgggaggatcgttaccgcgctacaagctcttatattgaagatgacgaagaacgcgcccaggttctgggggaagtttttcggcacattgcccgccaccgtggttggcggaacccttaccagcctttagcagatcttttcgacgatgagagccaatcggatgctttcacacgcctggtctccaatgcgcaacgggtgggtgcccgtgtggatgactctgacacagttggggcaatcgtttggtccgctttacagtgcccccaccccgttggactcgacccggaggatgaggcacggtgggcgaactcaaaccagctgcgtatacgtacccttggtaccgagtccaagaagcggcctggtcttattgatggccgcctattccaggtagataacgtccacgaaatccagcggatttgtgccacccaaaacattcccgccgaactggaagagcagctgctgggaactatcttcgaccagaataaagcatcggcaggcgtcatgcagaccgttgggcgatgcgggctccagcctcagttgctgcgctgctcgaaagcccacccggaatttcagcgctaccgcattgccgctaccctggcgacactcaagattaaggagggccactcggcacgtttcctcaccgctgaagagcgccaaaaagtggcagcggaactacacaatccccacaccacaatcgctacgtggggtgatgttgcggacctcctcggtattgaggcgccacagttgacgggcatcgcctccacaacacccgatgctgaactcattgttgcagcccgcccaccagtcgacaccacggccatcaagatggcgacgaaagcaaaacccttcctaaagaaatggtggaacgatgccgctcccgaacaacagcaagatttcatcgagctgcaagtcaactacgacacggatagcccggacgtcaacaactacttgttgacgctcacccccaccgaattggcggagatcgaaacgttctctacaaaggagcttcccaagggtcgtgcttccttcgctgcggagacttgtcgtattctcgcggatcatctcctgaacagtgacgactctctcgccgatgcgatcgagatgaatttccaccgtaagccgacagtggcacaacttacggagagtaccggcattgcttcggtggaccggtcattgaagattgtgtcgcgcttcctacaaatggcccgcaattattggggagagccacaggctatcaccgtggagctcgcccgcgaaggtctgatgagcgcaaaagcaaaggccgacatggaattccagcaacgtcgtgcccggaaagcacgccaaacactgcaagaaaagcgcggcattcgggaagacaaccgccgggatacgctacgcgctgaagccctccacaggcagaacaaccgttgcctttactgcggtgcgcccattgatatgcacagtgtggagatggatcacattgtcccgcgctccggtcccggtgctaccaaccgggtgaccaacctagcagggtcatgccaccgctgcaaccaagctaaaggcggcagaacttatgccgaatgggtgaaacaagaccatcccacctacaccaatcgcaagatggtggatgactttgttaaccacagtatgaatttagagaatcaggccctccccaagaagtccatgcagaaggaatacctgcgtgcgctacacaccgtgggcaaggaagacgccctagattctcgctcgctcgcaccaacagcgaccatgggcactattctgcgaggaagactagaagcagaattccccgagacgaaagtcaacgtgctcgctggttttatcactgcagaagcacgtcatgctgccggatattggggccttcctacactccatattgagggcgatccgcatgacaataacaaacgtattgaccggcggcaccacgccattgacgctgcaatcatgtctattacacgcccctatacggcacaagtactagcgcaacgcaaggcacttcgcgaccaagagaagacactgggaagttcctaccgcagtgcaaccgtcagcaacttttatggttcatggaaagacttccaaggcacagacattgcccacaaaactgcctaccaaaggtggctcagcaactctcaggtgcttattggcctagttgccgagaaacttctcaacgacgacattccggtatggaccccacttcggctttcccgaacaagcggacgcgcccacgaagacgaaatccgtcctttggcccaccggcctgtgaaagcagccttaaccgcaaaagaaattgacgcttccgcaacagaggcgcagtggtgcgcgctgacgcgttgtgaagactatgacgagaatacgggacttccagaaaacccagaacggcgcatcgttattaacggtacgcacctcgggccgaatgatgaccttgagttcttcactcccaaagacaacaaaaaaccagacgccatttgcgatcaggcagctctaaaagtccgcgacggttgggcagcggccggcgacttccaccacctacgtctctaccgtatcccgcagaaaaagggctttgcctactactttatgcgtgtactgccctttgatcttcccaccgagggtgacctctttagctatgagttacccccgcaaagcatttccatccgccaagcacatccaaaactcaaagctgcactaaagaagggcgaggcggtctatctgacctggttggtgaagaatgatgtccttgaagtcgatgacaaagcactaggcggtatcggtaagactcttgaagaggtcattccgaatgccactcgtcggtggagagtgattggttttgacaatagtactaccaccatcaagcttgctcctgttctcaccagcccggaaggagtgatgagcaagcaaggcgggtcttccgttgactctcgttttgatgaggctactagccgcaagctgaagcaaactgtcctggcgcctaacggatggcgcccctcggcacaagtgcttatgcgaggcccgcttcgtgttattcgatacgatgccttgggcagagagcgactcagtgcacggtcaccccttccctttaccctcattattgagccatgacaacgaaccgttggcggatagtggacttctccagttttgagggagaggtctactattcaggcggccagttgactgttgttaaggaggggaagcggaaggttaaggttccgctggtcgacgtagctgttatcctcattggtccaaaaacaatggtgaccggtgggaccatcgacggtgttgctcgtaatggttgttcgctgctggtgtgcgactggaagcgagagcctgctgcggcactgcacccgtggtcgtttcacactagggttgctgcacgacaaagagcgcaggcttcactttctgtgccacgccagaaaaatgcttggaagatgctggttcaagcgaagatccgaggacaggcacataacctcaaagctatcgacatcaaagcggcgcaacatctagaagaacttgcgaaaagcgttcattctggcgatccggaaaatgttgaaggcaccgctgcaagctactactggcgccgactgtttggcccggattaccgccgcgatgctaatagtcgagacaacattaatggtgctctcaattacgcctacactatccttcgcggccatgtgatgaggagtctcactgcagctggtctagcccctgcgttggggattcaccataagcatcgtggtaataactttgctttagcagatgaccttattgagcccttccgaccctttgtggactaccacgtccacaccatggtggagggctgcacactcactgatctttctattcctgaaacgaaacgcgaactcgtggctctcacccagggccaatttgcaccggggggcgacacgctcccaacggtaattcaagacctctgtacagcttttggacagtacgtagagggcgatattcaaaccttgccagtgctgtattgggaaggcccttttgtggagtaagtgatgagtgagcaaaaagtgtggtcactagtcatgtttgacgtcccaacgaaaactaaaacccaggttcgtgcctacactcagcttcacaaggagctactttatctgggctttactcaccttcaacatagtgtgtacgcccgctacgttccctttgtggaacctattgccggtatttacaaatgtattaaggcgatgtgtccacccggtggagatattcggatgattcttatatccgacagccagtggggaaagcaggtcagaatttttaatgaggaggaagaaaagcccgaagatccccccgaacaactcgaaattttctgaccctaaatgcagtaaacatgcagataaacccctgaaaatccgtagttcagaagtctatctgcaggttctagagaagagaaacaacggtgacgggtgaacacctccccgaggtcgaagtctatctgcaggttctagagaagagaaacaactggggatgagtataagcaagtagcatcggaagtctatctgcaggttctagagaagagaaacaacggtcaagtttggaactgcagtccggctcgaagtctatctgcaggttctagagaagagaaacaacgtgacctcccggaagtggcggatcatcagaagtctatctgcaggttctagagaagagaaacaaccgcccgtgattgttccgctcgaccccacgaagtctatctgcaggttctagagaagagaaacaactgccgaacgttcaggtctgagtgatcttgaagtctatctgcaggttctagagaagagaaacaacgtgggatcgtgaggggcggaaagttcctgaagtctatctgcaggttctagagaagagaaacaactgatgtggatgagtgtcttttcgcgtgggaagtctatctgcaggttctagagaagagaaacaaccgtattggtgcagaggtgccgtaccggggaagtctatctgcaggttctagagaagagaaacaactacgtcggatattgtctttgaagtaggtgaagtctatctgcaggttctagagaagagaaacaacggctgatccgctgggcattgacgacttcgaagtctatctgcaggttctagagaagagaaacaacgtgctcgcagttgctgctgtgggcacctgaagtctatctgcaggttctagagaagagaaacaaccgtatcctgttgagtctctagccgcacggaagtctatctgcaggttctagagaagagaaacaacgcgatcgcactggtcagttgaaggcgaggaagtctatctgcaggttctagagaagagaaacaacaatgaagctcgtatgtgctcaaaccggcgaagtctatctgcaggttctagagaagagaaacaactcattgagtagtcgaaggagtagccactgaagtctatctgcaggttctagagaagagaaacaacaacgtctgttgacgtctcttctgccgatgaagtctatctgcaggttctagagaagagaaacaactgcggtttgaggatcgtaggtgttgaaagaagtctatctgcaggttctagagaagagaaacaacaccatcgccggcatgatcaacggagcaggaagtctatctgcaggttctagagaagagaaacaactgccacacgggtttaatgtccgcgtccagaagtctatctgcaggttctagagaagagaaacaaccgccgcactcatgaccgtactggtcagcgaagtctatctgcaggttctagagaagagaaacaactggcgatgagtataagcaagtagcatcggaagtctatctgcaggttctagagaagagaaacaacttttggctcggttgcaggaggagtggggaagtctatctgcaggttctagagaagagaaacaacctcccttgggctatccgaagggcgcgaggaagtctatctgcaggttctagagaagagaaacaacggccttacgggcagccttgataaactccgaagtctatctgcaggttctagagaagagaaacaactcaaccatcacgcttactatcccggatggaagtctatctgcaggttctagagaagagaaacaactaaatgatgaaagagtacacggtgtggagaggtctatctgcaggttctagagaagagaaacaactgtggttttgttcagggttcgagtccctgaagtctgtgcaggttggagagaaaggccgaactgcgtgtacacacgatcagggtcctaatttgtggaacttcaattctaagaatagagccgtgcttccttcgctacgacagcgctgtccatacactttgactcttgttaggcgtggacgctgggtgggagcattttggcagaacagcagagtggtgcgcgcggaaacacgcacacaccactctgccgttttactgggaccggattgtggaggcctccgccgccacattcagtacggattcacgattcacttggtgtacacgctgatgcgttcgcgtgtgtgtgagccgttttcagcttcgtccagcattgcttgggccatatctgcgtagctcaagtacgattcgcctttgtcgttggtggcgagcatttctccagcaaaggcgtagcggtcggtgcgtgctccatcagcttggaaatctgctgctgggctgaggtatgtccagttgacgtcatcgcgttcgtgaagctcagcgaggcccttggccattgcttttgctagcggcttgaagtcgtcggggaattctggggtgtcgtcaagggtggtgcccttgtcgtcaacggtgaggcttccagcgccgcctacaacaaggaggcgcgtgttttttcctgcaaggcagtcggctatgtgcttgagggaagtcgagtgcagcggcagcgtttcgggtgtgaagaacccgagtgcatcaacgacgacgtcgaatcctgccaggtcggaggcgtacagatctaaagcgtctttgacgatggtggcttgcgcgttaactgggtcgttgcggcgaacaatcgcggttacgtcgtggccgcgtcgagtagcttcttcgcagatgagtgatccagacttgccgtgtgcaccaatgacagcgattttcatgcttcctcttttctcttgagtgtgcccatctttcgagggacaagaaacacgatagttactttgagtaactagtaaccaaatagtaacctgtggtgtgagaggagcgccggtgatgcgtgaccaaaagatactcagtgttgctgagttacctgcctgcccagtagagaccacgttgtacctgctgggcaacaagtggaaggtcctgattttgcgggatctttttgatggcccgcagcgcttcagcgatttgaaacgaaccgttggaacagtcagcgcaaaagtcttgacatccaatttgcggtcgatggaagccgaccgcctgcttacgcgaactgtttacgcggaagttccgcctcgcgtcgaatatgagttaacaccactgggttacagccttgaacccgtgatcagcgccatgcgaaattggggagcggcctacaaagctaaccgcttatccgaagatatgtaatccgcacacctgcactccgcctcccccgcactgcactcctaccgcactcccgcgccgcagcacctcgctaccgtcgcaccccgcactgccctccgcccgcaccccgcacctagaccgccccatctaaaacaactgcctcagttcggtccgtgtggtgcatcccccaattagactggggttatgtatgaaaacgtgactcagtacatcgatgaaatcgccgctttggacgaggatcaactcattccgattgtccacgagtacattcagcagaagcgccgcctcatgccgtcgggcattgtgcgcggcacccactacgagtacaacccgctcttgtggaagccccttaacaactggtctaaagaacacttcatgaagacggtggccgaccgtaccaagggcatgcgcccggaggatttctgtaccgaggagtggctgggcaacctcgatgaggatcgcgttaacctcacgctctcctggctggtcactaacgaggattactacatgggtacgctggccgagtgggtgaagaacggtacgttccttacgctgctccgcaaactgaaggaaatcgacgaggcctaacccagcaaccagcacccatgctagaagcgcaaagctgctctaagcaggcccagctgaacagctaactgcttaggcacaattgagccccgcccatgacgcatcagggcggggctcaaagctttccgtgttgggctcagcgagccgctagttgtaggcgacgtcgaagaacccgcgttccaaggccaccgccttctggaagcgcaaagtcaacgcatccgcgagggactcatcatcctccgggaaaacccgctccagctcgttgaccaaaaactggcaccacttttggaactcgcggccgcggtgcaactccacccagcccgcatgcacatagcgctccggcagcggcgctgggtcgttatccgtggagccacgctcgccccaatccaagtagagccactcggccaccaccagcatcaccagcagatcctggtaggactggctattcgccgcgtcatacatcatcgcccggaaagccttcgtcacctccgtcaacggcgggtcctgctggtcggcctccgacacccccaactccgcgaacgccttctggaagtagccatcctcgtcatcagccaacatgcccagttgggcggcgaaggtcagcttcgagtccacccggtccgcatacgccacgcaaccccccaacatggacaagaacgcgtcgaagaactggtaatcctgcaccaggtagccggccagcacgccatcatccaacgagccatcaaacagctcgtcaacaaaacggtggttgacggccgcatcccaatcttcgcgggcactcgccaacaggaactccacatggccgccagggaccagatcgataagtttgcgggacacaataacctctctcggctcaagggcagcaacgaatatgtactcccgaggttaccctggtgtcactccccacacactccctatcaccaagaaactgccgcaagcggacgcacgcgtgctagcaatggaccgcaatggcactggttgtgcgcgagggagcggtgcatggtggctcagcgcctcaggtactaccgctgcaccaccagcacgtcggctgcgggctggcacccgccgtccgcgcacacagtgtgtacagaaaagggggtgtggtaagcacagagccccgtccggcgcgtggtgcgcagcggacggggctcgaatggtgtttggggtgcttttgtcttcatggcacccggactggccgtgttaggcggcttcgttctcggaagcgtcttcagcctgacggattacttcaagaggaaggagggtatcacgaggccagcaaagggatgcacggaccgcattccatgcgcgggatcccgggaaagccattaccttctcttctttcgtgctattcatttgcacacctccttcgagattctgcctggtgttcactttgggctctgttaaacgagcgaccaggtcttttcttggtgcctttacgaccttactcccttaaaacgctaattcaacttctaccagcgaaaagttccatttttgtgatattcggaactagttttattagtgttaactattttgaatctgagtcgaaaagactaactttctcatattatagagggatattttttcatgatctggacacctttaattagcataggtgtcgctttcccgccacctccgcacgtaaagcaccgtcgccccagatctcgtaggacacaacaaggctcataccctacccaaaaaggcttaaatagggcaccgagcaggcattatcacaataattatcttctaatcagttgcataacaacttatttaaagaaacaaagagtaaaaaagggatttaacctctgctatcagcattaaaagtacactcccagagcacaattcactgtagagtacacctcggattaattcgtaaaattcgttcacaaacagcttctcaatccgtcatgacacccacagttgccgttttattctgagagttcagctttgtgccgcgcacaccgcaaacgatgccaacggctacccttcctgccgtcgcccgcgcagggcgctttggcgctggaagtgcgcatggatacgacgcccgcgccactccgccaggcgttactagccatcaatcaccagccgacgctgctggccgccaccgccgagcgggcgctgctgcgcaccttgcacgccggctgcgaactgcccattggggcggaggccaccgcgcaggtacatgcgcagactcgtggggtggagctgacgttgcgggcggagattctttccccggatgggcgggagcggaatgcggcggagcacaccgtcaccatcccgcagctgttgtgggcggaggagtcggcagaaatggctgtggcagaaatagctacagcagaggcggccgcggggctgctggctgtggtagaggtcgctggagtatcgctggctacggctccgctagccaaggaccccggtttagtggatccggcctactatgcagaggcgcatgaggcgcagttggcggctgcctaccagttggggcagatggtggcgcatcgcctgaaggccaacgcccattaagaaaccccacaccccacgcttgcgcgctcgtacttctccccctgcacgctcgcgttcaccttctgtacgccctgcgtgtcgtgctaccccacattgcgcgcgtgctaccccacattgtgccattgtgcgcgggataacccgctgggcattgtgcgtgaactgtgcttccccggcgacaggtgtcgcatcctggcgtggttgcccctcgtcatccccctgttagtgcacacaaataagacgacggggctaggctctacgagcagctagccccgtctgtgtgctggagggattggttttcctagcgcacgggcggtgattcccaggctacccaatccccgcagacagcatacaacatcagtcgacgagtttccaacgctgggagaattcttggtcctcccagaactgtgcataagtgccgccagcagccaaaagctcctcgtgtgtgcctagtgcctcaacgccaccattggccacaaccgcaatctggtctgccgccttgatggtcgaaagacggtgtgcgataacgattacggtggtgttgtgggagaggcggtggagggtttccacgatggcggcttcgttttcgccgtccaaactggaagtaatctcatctagtaggacgatgggcgatttcttcagcagcgcccgcgcaatagcaactcgttgccgttcgccgccagacagccgcgaaccgccctcacccaccatcgcatcccagccctccggcagggactcaatcaccgtgtccaaacacgccgcccgggcagcctccttcacatcctcatcggacgcatccggccggcccacccgcacattctccagaatcgtcccgttaaacaggtacgtctcttggaacacaatggagaggttctgcatcagctcctcagtggacacgtcacgcacatcaatgccaccaatgcgcaccgcgcccttattcacatcccagaagcgggcgatcagccgctgaatagtggacttaccgccacccgacggccccaccagcgccgtcatcgtccgcgctggcatatacaggttcacatcccgcagcaccggcgtatcctcccggtacccgaaggacacgtcatccaactgcacatccacacccggaatacgcatccgctggttcggatccggctccggcaagcccggcgcatccagaatgctcgccaagcccagcaacgcctcccggctgatagtaattgcggccacgttcaataccacctgcatgagcggaatgaacatgcggacgatgagcaccgcaatagccaggaataaggctacatccaccggctgcacccccagcccgtggtagccgctggccagctgccagcccaacaccagcagggacactacgcacgccaggatcagaggcagctggtacaccttcgccacattactggtggccgtcaactcctccagaatcgcctgggagtccgtatcgatggcgtcctccagcggcttccactgctttcggtgcgacgcccgcagcagcggctgggcctgcgcatactccagcgaccgggcagtcagtgcccgctccatgtcactgtggtggttcacttcctcatccacatccgtcaacatatgccggaacgcccacacacagaacggcagcgccagcaggaacggcagtgtagcctgccagttcaccaccagccccgccaacagcatcacccccgccatactgagggtgttgcagatggccggtagcgccaccgacggatagtggctgaggttattcacgtggtagctcagcgcatgggagatacgtccccgcgcccggtcgtcgaaccagcccagcggcagggtgaagatcttgttgcctacccgctccacggactggccacaaatgtcgaaggtggacaggttgtaggagaagatcgtggtgctgatgttggcgatgcacgccagcacaccggccgccaccacaccgcccagccacggccacatgccgttccagtcctgggcgaacaggtggcggagcagcggcaccagcataatgaacgcggccgcctggaacacgccggagaggacaaagccgacgatgatacgtgtcaggcccttctggatccccaagatacgggacatttccttaaacatggtggtctcctaggcgtcttgctgcgcggtccacatgccgcagtaggtgggtgacgtgtccagtagctcactgtgagtgccggtggcctcaatacggccatggttgagcaccacaatctggtccacatcctggatagtgtgcaggcggtgtgcgatgactaccacggttcggttgccacgcaggtccgccagcgcctcctggatggcgcgctcagagtgggggtccgcgtaggcggtcgcctcatccaacagcacaatgggtgcatcctgcaggaatgcgcgggcaatggtgaggcgctgctgttccccgccagacaggtaggcggagtccgagccgacgatggtgtcgtacccctgcgg

SEQ ID NO: 2990 - DNA, 23201 bp, synthetic construct
  source 1..23201: mol_type = other DNA
  misc_feature 1..23201: note = Synthetic
acaggagatgaacagtttcagaaatcttctgagagagtacagagccgcaaacagaatcagaatgttcgtcaggtgccatccccattgcattcgccttccccacacaagattgtccagaccccagctgtaagacataagaggcctgtatcctgaagacatcattgaactgaaggcaagatgagcatcacctgtctctgtctgcgcatccagaaaatcgtcactgagaaaacctgttcgaagagttggaaggtacagcagcaaaacaagaagaaccataacaggcaaacaaaatctgcctttgaaatattttgtcagcattcagtgcaccggcctctcggaatactatcaggcaactgtccataccaataggaacaatcagcagaactcaatataaccggcagccttcacctgaaacactcgtattcccctcagtgataacgaaactgagcaatgaaaacagagggtcccgtatcctgtaaaccagtctgtgttcatcgtatcctgcaaaaccagtaaccggaagaccatgtttcagagctacaggttttccagggtcttcaaaaggcgatctttgtgtatcacgaatcagcctgttgattcttttgagtatctctctgcggtatgcttccggcagagatagtcttcccatgcaagtgcagaaaacgccgacttcattccagaagctcttccccttctcaataaccggcttcaagctgtgctgaccattaatccacagtcattggcagctgttggccagcggaaagggaaatgcaggaagccgttctgaacgctgaataaaactgcggtcatcggcagagcaccatggtagatacacagtttcctccattgcctcaatttgttaacgggatattgttacaacaggctttttactctttcctgtgactgtcaccaaagcataatcagcacaaaccttctttatggcagctgcgaaattcgctctggctgctgtgaagcttacagctgccatttcatctccgatagtgcaggctattctgtacacctcattcacgattgcttatcaagcaagtatgtgtaaggatgtttctgccacggcaattgccatcttcactgatgtgaagataccttaatcagattctcattgttttatttaatatataaattattataatattaagaataagatattatagacaatagatatggcacttttcactgctgtcccaatattgcatggcagctgatttgtagcattaagccatgtaagtattcaggagcacatttgtccacgcacgatggtcaagtccctgtagtggtgtaaaagtgttctgactacgcagacttcctcacctcccttcccagcttgtaatccagcgtaggttccggtgcgagtcctctttctcttctcatggtttccagtctctgtatgtccaacagggtcatcttaaccctcctgaatctctcagcagcccgtatcaggcttccataagccagctttagacagcttttctcatcaaagaatctcggtatgaccttggtgcgccgtttctgctctccaaaggctctctcgatcaggttgccagttctgatcagcttcctgtgtttctctgggaacttcaggtgagtcagacaggcatcaaggtcttctgaaaagcacttcacagcgcgaggatactgagaacggtagtccgcaatgaactctgctgcacgctgctcaccggctcccggtgagtgagcatggtaaatactgttgagatactccttgactgtgattcttgcttcctcagggatcttggacagcacattctgcatcttgtggaatatgcacctctgacggtagctgttcggaaaacaggagcttacagcgttcagcaggcccgggttgccgtcggtgatcaccaggagaggctcacgcagtccacgacggatcagtccgtggatgaactccgtccaggatgcgctactctccctgatccccacatcaagggcaaggagcaccttgctgccatccctgcacacgccccaggctgcaaagatcccctccttgcggctgagatgctggcgcattgattcgtagacagcatcaagccaaaggtattctatgtcgtagtcgctcagatctctctcagagaattcctcgtactccgtccaaaggacctctgcaagcctgctgaccgaactcctgctgagcatcagattaccactctcgtcccgcagtgcagcctcgatgtcacgggtggaaagccctctggcgtacatctctgtaacaagtttctccaactggtctgttcgagtaccaagcttatcgagcacagagctgttgaagggttcggaggtgtttcttacccgagggatcggaacattgatcatcccggaagcagtctggaacttacggtctctgtaaccattccggtatccttcaacctctgagtccggatccctgcgctcgtagtgtcctctgccgccaaggaactcggtcacctcagcttcgaccatctcggtcactatcttgcgcaaaccgtcctggagaatgttctggagcagcttaccgccctgctcgttatgaaagtgttccattatcctctgtgcaatctgatcgctcatgggtatctttgtcattggtgtaggttcctttctgaattgatgggttgtggttgattctcaattctaacgaaagggacttgcacctcaaaccaatttacaccaatctacggacgggacccgcacgatttcaacgcctttataccttatctttccgtttcagcatacggatatgcattcaaggcagttcgtgttctcatgcgaaaacgcctttaccttgagaggttcagcctctacaacattctacaggttttgagcgtgtcacctttttgttatgataatatacagtagctatttacgaatactgagcttcaacctgcgaacaataataattccaaccagttgtctctctttgacttatgatgtgacaccagtagcacttttcacaaatatctacttgaccaggatgaaaaacagtctgcatgacaaatgccgtctggtaaagcttggcttgtgctgcgcagcgctgtatatgttcataacacagacaggagaagagtgggcgacaatatcattcaggtgagaaaccttacaaagagatacggtgaacttgcagctgtggacaatatttcctttgatgctcacagcggtgagattctgggtattctgggccccaacggatcaggaaaaaccaccaccatcaaatccattctgggcatactgaaataccagagcggaacaatcactgtaaaggaaatggatcctgcagcctgtcgcaggaagtttctgcgaataaccggagctgttcttgaaggggcaagaaacatctactggtatctttccccaagggaaaacctgctctacttcgccggtatcaggggattttccgacagggaagtttcacggaacatacctgaactgctggaagcactggaattgtcagatgtggctgacaaggaagtaaggcagttctcatcgggaatgaagcagaaatgctccattgcctgcgcaatggttcatgatccggaaatactgattctggatgagcctacactggggcttgatgtggaaacagggcttaaaataagggaatggctcagatcggtatgcgaaaaaaagggaaagaccattcttataacttcccacgacatggatttcatagaagcggtctgtgacagggtactgataatccgtaaaggaaagaaaatattctgcgactcggttgactcactgaaagaaaagttttccggcaaattcttcaggctcatccttgattctcctcctgacgaagtgtttcttaatgaactggatagaattgcagaggtttccgctgaaggtacactactggacattcgtctctgcagcctttcagtgctgctgcctgttctggagcttattcatgggagcagatacaagctgcttgacctgaaaagcattgaaaaaaacctggaggacatcttccttgagcttgtaaggaaggaagaataatggaaattctcaacattgccggagctgaagcccgaatgatgctctggagcatgaagaggtacatgttcaacaccctctccatgataggagttcttttcctgatattcatgggaatgttctggggaatcaagacaataggaggccagtcggtctcaggggattctctggacagcatgcttgtaggatatgttctttgggtcagtgccatgatggctcttcagggaaccggatcggatgttatgaacgagtcccagagaggaacccttgaacagctttacctctcccctgcaggggcacatgcggtgttcttcgtcagggccctggcaggaatactcttcaaccttgttatgataacagtaatgctctatctgacaatgctcacaacaggcagatggctgtcggtaaatctgcccttcctctactcaatggtgattctctcaacgctgccccttattggaataagtttcatgcttggaggaatcggcctcattcacaaaagaaccggagcagttaacagtatactgtccttcggtctcataggtctcatgctgctgcccacatatcccttaaccccctactcattcctccctttcatagcaggagcctctgtaataaacggtgttacagtcagaggggaatccttcccgttgtggtggtacctcttcatcgcaggcaacggactgttctatctgatggtggggctctcggtgtttaaggttctggagaaaaaggcaaaacagctgaacaagctgggacagtactgatacctctgatactcacagattctctgaccaaacgcaatttgacacttggccgttgttaaatacaatttcatgattgatggtgtattctggcgtctgaaactggaatacgcataaaagaccagacctgtagtccggctctccggagtgcgtcgagcaggaaagcctgttctctcaaaatcgattccggaagctgtttatatgtgaactgcgatctgccctctactcttcgactgctggaaaatcctttcttcggtatgctttccaggggaagcaaggttttatgaagttcaccgacttcctgaccctggttatctgctgaagattgtctcagatgagttcccttcgttgagagtaccggcaacaggttcatctgctcttgcagcaaccggcaaattcaaagattctctgacctagcgacagagcgacttattctcaaagatgtcagtaacttgcagcaaccggttaatacagagattacattccggaagaaaaaaactgtctgcctttgtcctttgttatgggaagagtttcttcacaggttcggaagcagatatctggatcaccgtctcctgggaggaggccttccagagcttcttatcgtggagaaaccaacctgtgaatatcagtctgaatcgctggacagttttttgcatgggatatcgcagaactgttccccgtaaggaactgttcaggtttccttaaacttctgcaaatacttctgctgcaaaacgaagaacagattgattacaatctcatctgaatgcggaataagctgcgctacagtcctatcttgaggaaatgtcaatttttcgtgcagtttccctgctgaaccacttagccggaggcgacagaagggaaaaggcgcgtcgccccggggcatatactttcaataccggatttgtcaccaggagaatgggagaagagaggtctcctccgggagcatcttgttcctgatactctcagggcattcttgcgctcctctgaaattgcctgctggaggaactaatcacgaagcatgacttcgctgtcagcaggaggcaatctgtacatgcaacagaatgcaaaataaatccccacaggtttcacctgaaagaccttgctcaattccgcacaatctgccctgccggaaacaactaccttgtaagaccttgtgtgaattaattttacgacatcacagctcagggacttcggaacagggttgttccggcagggtgcagcagtttcagaaactcagatcacatggactgaacatagatcagcagtacaaacagtacaatgagtactccaactgcgcctaatgcggagaatatacgctttcgtttaactctggcctggaattcatcagggaactcagagagacggatcttaccgcaactggggcacttgtatgcttttaccgcactggctatcatagatcccacaagacctgcagcagctgcagctgaacggcttttctcttttactacagtgttctcattgcatctggggcatatctggtccatttttttcctccaaatagtgaaaacgagctgaaaaataaccggaggcagcaattcagtccacccccggtaagaagaatctgaatcagatcaaaatagtgaattcagttctgcctgcttctgctccaggcacactgctaccggaaaggctgttacgaataatctcttctattcggtcaacaccggtggtgttctcctctatttcaacaccggtaataacacctgaggaattcagagtgagttttaccgtaactgttccaggctccagtatctctgtgttcttgttcagggcatcaacaacttccataacaacagatctgaactctgaaggccttgcaccaaggtaatcatcaatgctcccaagcgaagcactgtatgagggggcataccgaatctccatctcctgacattccaccatttcttcgcagccactggtcacacctgcagtgcccgggctgttgctgtaagcaggtattgctcttcgggtcataccacctgcggcgctcccgaagataccgtcgtagcttaccccttcaggcatgttaaccggaatggcaactctctcaggagaactgccgtcagccctcgcataagaatcaacagcaacaaatgctgtgtactctgaaagaaccgagtaatccagagacaaaccgataatctgttctatcagatttggttccggttttcctgtaaacctgctgttgtaaatcaacctgttcagatgatgtattctgctccttgcccagagcctgtctgacgcttcagtaccgccttcagcaacaagactgacactcatggttcgctcccactctctgccgtcaattgttccggatacagttatctcatcgctcccgggagcatcgtaccttccaactaccacaaggggctcaccggtataaaggtcccttatctccgaaggatagacatctgcaacatccagctcgccccagtctatttcgatgtttaccagatatggattgttgatcttttcgtaaatatcttcaacagcagaacctggatcctgatccagcccaacatatgcagcgtatccgcggccctcttcagccagaccttcgataaggtaacggttgggactggacccgacaccaatactgaagagtctcatgttctcaccgagggtcgtttgcagttcagccagtatttcagtttcgttacctatgtagccgtctgtcaggaagatgatgtacctcattcgcgctttatcctcagggtggttaacacaggctcttacgccttctatcatcatagttccgcccataccgctcatactttcaatgtactcgatacctctctgaacattgcccggtgtgttcttaagtggaactctgctcattgaacttgcactctctgagaacctcatgatctgaaatgtgtcagaagggttcataccctgtacgaactgccttacagtctctttggcaacctccataggctgaccgctcatagaaccggagttgtccacaacaaagaagatttccttaggggcaacatgatcagggttcacttccgcatccggttcaagcataagcatgaagtgaccgcccatatctccgttatgggatattacacttgcgcctatgtcatctccggctgtggtataggtaaagacaaagtcacggttgggaatctcgttattcctggtcagatttaccttcagcaccctgccgtggtcgatctcagcagtgacttcatggttgagcgattcaaattcccgaatttcaaagcctgtgtttacttcaagagagagttctatgtcgtaaccgcttctggttccctctggaacaatatcaggcgttattctgtcagcatccaccacattctcaggattgaacctgggacctgcaaccatgggataaacaacctcccatgtaccattgttgtagtcaacaggcgccgcatattttatttcaatgacaatctcatcccctggaagaatgtttcctacagtctgtgtgaaaatgttggggcgttcctgctcaagcagtgctgctgttcttccatcgcttattgcttcttcgtaaattcgttgagcttccatgcgctctcttatatcgccttcaatgtgcctgtcccctatgtacatattcatgctgtacactgcgccgctctcaggcaggggaaagatatacagtgtttctatagcctcatcatacggatttccgtaaacctgattgacagtaacaagctgtattgatccttcaactgcaattgaagcttccgtgtgctccagaggcagatcaccgatcaccccgtcctcccctgtgacagccattctggcccaatcctgcccggaggcgcccagaagcgccgccgccataagtaacactgttccagtcatcttttgctcccttcatgtttaatctcttcggtgatgttacctcaaaaccggtgatatattcccgcaaattgaaaggacgctgatgataaaggtaaacggagattccatggactggcacagcggaatgactgtaaccgacatactgaacgccaggaaccacaagttccgaatgctggtaacaaagagcaacagcacccttgtgaaaagggctgactacagcacaaccactgttccggataatgcggatgtgcaaattattcatctgatatccagcggctgatatgcccggcaagaactcatcaaggtttctgcttctgataactgcagttatctgggggctggcatttaccgctcagagagcaggaatggaacatctggggcctatggccttcaactcactgcggtttacactgggaacactggttcttacacctctgttcgctaaaagaatcagcaggaaattcatgcttgaaggcatctttgcaggaactgttctgttcacaggcgctgcgcttcagcagtggggtattgtttacaccacagcatcaaaagcaggattcataacagggctttatatcctgttcgtacctctcttcggcctctttaccggccacaaagaaggcaggaaactctgggccggaattgcccttgcccttccgggactctggctgctcagtttctcggaaggttttgagagaatcaatcccggagacatgctggtgctggcaggagctgtgtcgtgggcgattcatgtacgacttacaggaaagtatgcaggagagtttcaccctggaggattcgcagtggttcagttcagcacagttgccctgatcagtggagcggctgcgcttctctccggtgaatcctgggcaggcacacccagggcctggcttcctctggcttacagcggttttctctctgtaggaatcgcattcaccattcaggtatttgcacagagaacagtaaaacctgcctcagcagctctgataatgagccttgaagccgccttcgccgtcctgggaggctggcttgtgcttggcgaatccatgacaggctgtgagttgtcaggagcagcgcttatgttcgccggaataactgtttcccagataagttcatgccataaaccgatcaggaacagaacaatccagcaagacagctgagccaaccgacttcaatactccatctatctgactgcataagacaacaatagccagtatatattaatgctgacatcagagatagtaaaaaaggcccgacactaggtcaagcctaggtcgggccatggacaccccgcagggcgttgccagcagacctaataaatctttactaggacttgcagagcaatcaaataatatgaataatatcttgttatgtcaagagtatgttttgaaatggagatggatatgcgtgaggatttaatacttggacttgatctgggaaccaactcacttggatgggccttgcttaaatgtgatactgaatcaaaaacagagatcaaaggaatagtcgatgccggtgtaagaatattcgaggccggaatgaagggtgacattgcttcaggaaaggcagaatcaagatgtgccagccgaagagaagccagatcaataagaagaggtttggatcgtcgacgccgcagaatgggcaaactcaagaatctgttgcagagaaatgatcttcttcctgagggggaagacatcgcatccattatcgaatctctggacaaagatgtgagagaattcattcgtacaatacctgattctgaaaagcctgaaaaacacatactggcccatactgcaccttactttctcagaactctggcaatacagcaggaactgccgaaacacatgctgggaagagccatctaccatcttgcacagagaaggggattcctgagcaacaggaaatcccaggtagaggaaaaggaacttggccaggtgaaagagggaatcgctgacctgacagcagagatggcacaggcaggggcaagaacacttggtgagtactttgcatacaccgacccgactgaaaaaaggataagacaacggtggacatccagaaagatgtatgaaacagagttcaacctgataatgaaaaggaatggtcaccagattccggaggatcagattgaactgatcagaaaagccatcttctttcagcgcaaattaaagagtcagaagtcacttatcggtaagtgtactcttgaaaagaacaagcgcagatgctcaaagtacagaagagaagcacaggaattcagataccttcagacagtgaacaatctgcgcctgattacccatgacggcgagctgagagtactgaccgacgaggaaagggatgaacttatcaatatgctctccggcgaatcaggtatgcttaataaacatggtaatctaaccgtgcctaaagctaaaatagcactgggacttaacagaaagagcaagttcaccattgaggagggcggcgagaaatccttcaaaggagacagaactacctcagccattgtggagatcatcggttcaaaatggcttgacatgaaccatgaaacacaggaaaaacttatccatgacttaaacagctttgagaaaaccgaaaatcttcaaagaagacttgcagcggcatacggtatttctgaagaaaacgctgcacggctttctcaggttaatcttgaatctgactatgcctccttatccttaacggcaatacagaaactgcttcctcatatgcggaaagggctttcctactctgaagctgtcgcagaggaataccctgaacagttcaaaacaacaggaatagaagaagaactccttcctcagcttattcacttttctgaagacctccgtaatcctgtagttcagagatgccttaccgaactgcggaaggtggtaaacgccgtaatcagagaatatggaaaacccgggcttatcagactggagcttgcaagagagatcaagaacactaaaaaggccaaagaaagaataataaagaataacagggaaagagagaaggaacggaaacaggcccttaaagaaatacacgaagtatttcccggattcaaggaaagcagggatgacatcaccaaaatactccttgcaaaggaatgcggatgggtatgtccttataccggagaaggaattaactttgatactcttttcgaaaacccgaagtttgacattgaacacatcattccgagaagccgttccatggataactcttttgtcaacaagaccctgtgctttcatgacgagaacagaaatgtaaagaggaacagaactccatacgagacctatcatggtacagcaaagtatgatcagatattgaacagagtatcagcattcaaaggtaacctggctaagaaaaagcttgagctgttcatgatgactccggaagaggtaaccgacaggtatgaagacttctccaacagacagttgaatgacacaagatatgcttcgaaggaagcggcagcatatcttggacttctatatggaggagtaaaccagtcggcagacggaacaaaaagggtacaggtgctctctggagggctgactgcccttgtaaggtcttttcacggttttaacggcattctcaatgatggcggttctaaagatcgcaaagaccatcgccaccatgctgtggacgcaatagccataggcataacctcccctggaatggtaaagcggctttctgataacattcgaattcaggagcaatacggcagcgctgagagcatccatacttccaggtttaacagcatggaatgctggccgggtatgctggaggagtgcagggctaaaataaaagacataatcgcctcacatcatgtctccaggaagattcgtggcgctttgcacaaaaaaaccttctattccatagatcatgagcacgaggaaaacggtaacataaagaaatacaagcatgtaccagttgaactggcaagtatggaaacaagtgctattccaaagattgttgatgatggaatcagacgcatagtagaaaacaaacttgaagagcttggagaaaccgaaccaaagaaagctttcagggaagaaagaaatctgccagaactgataagcaaagacgggcaaacaagaattcctgtcagaaaggtaaagatcaggcgttctcaggatactgtaactgtgggcaaaggccctagaaagagaaatgttgtcagcggcagcaaccaccatatgcttatctacgctgaactggacaagaatggaaaagagaagaaatgggcaggcgaagtagtttcccttctggaagccagcaggagacttaaaaataacgaacctgtaattcagagggatgtgggcccagggagaaagttcataatgtccatacagtgcggtgatatctttgagcttgctacttcagcaggaagattatttgtgatagttagagcagtacctaaaacaaaacagttatgctttgctgaaattaacgatgcaagaaaaaaggaggttattaagaaaaatcatatgtggtatacgaaataccccaacacactgcgcacatccaatcctgtaaagtacaccatcgatccccttggcagattgagaagggcgaatgactgacagaatcattgatctttcaagttacggagggaaagtacggctggaaaaccacctgcttgtgcttgagttcaatgagataaacactgtaacagtgccgcttgaagatattgctgttgtcattcttgataaccagcagatggtgattactcaacctgctctgggagccctgggagaaagccgtataccggttgtgataaccgatagaaaacatatgccctcaagcatactttttccgcttgtgggcaacggaaagcagactgagtatttcatggagcagatcaaagcaccggttcctgttagcaaaaaagcatggaaagagattatacaggcaaagattctctcgcaagctgagttgcttgccattactcgtggcaaagacttcggtctgcgagagattgccaagtcagtgaagtcaggtgacaccaccaacagggaaagccttgccgcccaacgctactggtctgagatgcctttcctggacagaagaaatagagatgaagcagacgctaacatctatcttaactacggttacaccattctgcatgcaatggcatcaagggcggtttgtgccgccggtcttcacccgtcaatcggtattcagcaccatcacagaaacaaccccttctgccttgccagtgatgtgatggaaccttttcgggcaattgttgaccgggaagtatggaaaatctggcaggaagaacctgaaaccactgaactgacaagagacagaaaagccaagctgctgtatgctcttcttggaaaagtgatggtcaacgatgaaagaatctcagtattcaaggccctttctggaatatgtgtaggtttgcgaaaacgattctgcggccttaaagatgcatcgctcatgcttccagacggtatttttgtcaactgaatatggatgagaggaatttctcaaatatcaagattatgtgggcaatcgcaatgtttgacttgccggtaaagaaaaaaagcgaaaggaaacttgcagcagctttccgcaaacatcttctttccaagggtttcaccatgcttcaattctctgtttatgccaagttctgctcctccagagattcagcccgtgcagtaatcaataccatcaaacacaccttaccaccccacggaaatgtaagagttgctatgctaactgataagcaatttggtgaaatgtatgtattcagcggaaccaaacagcttaactctgaagagagagaagacaagcctcctgaacagttgatgctgttctgaaaaaacgagaaaagagaactgttaaagctctcttttctccattaagaatcggcaacaatccccataacatgttgacaatcggcccaatacagtcgttgtaatgtaccgatttcaaaaagctccgcaagccccagcccgatcacctcaacgagttgactgcttacaatgtaccgatttcaaaaagctccgcaagccccagctactcctctcctgccactacgatatcatagaatgtaccgatttcaaaaagctccgcaagccccagcgtatgcgcggtaaggccgccaggctcgacaaatgtaccgatttcaaaaagctccgcaagccccagcaatactacgccggcggattcacggaagaacaatgtaccgatttcaaaaagctccgcaagccccagcggagagggaagaggatgttcagtttctccgaatgtaccgatttcaaaaagctccgcaagccccagcagtgtatcagttaaggttgtaagctgtctttacctcctccaccattttgttaatcctgtttgctggagccagaacaaacatgcacttggaatcaccttttgccctgcaggttatctccttggattccaacctcataccagatacttcagaacaccatcctgctgaataacctgcgttcatgaagcatattgatctctcaaaagacttatcattcttcagattcgcttcagcttcgtaagaattttcatactgataaaccacaaggaaatcttcattgaaaacagcgttgctttcaggaagtatttccgcaacagcaaaaccattcatggcacatgctatgctgcctattgcaagctttagttttgcattatcaactttgagttcattacaataatagatagcatctgatttaccgcatgccttaccgaaatggtacattactatgtctgcagcctgtcccataacacgagacagctgctctctaagctcaaaagcaacagcttcagagcggtacatgatatacctttctccgttgaaaagaaccgctcctctttcagagtcccactttcttttctgaaaaagcggaataataagcccttccgctttcttgcagagatgctctaccccctctggacaatgaacatatttcggcatctttcagctctgactttctgctagaggattcttttacgagaaacaaaagccgcaatattgttattctcgttcttaagaaggaatataaatattttcaattacagcttgctcctttcttgaagaatccaaacttaaactacgctacaatacaaaaaaacagagcaagagatatacctgaaaggccgcaacagctactgcagtgaattctcgcagaaaaataccactgcataaacaacagcaacccctttttccttcgagactgccgttaagcaaatgtcttgaacaggtactctggatagaatctgtcatgtgagtctgtcgggttttaaagctctcataggtgaagaggaccggttcagtgaaaagctggcagaactccgcaggaaccgttctgcagttgaatcactgatgttcgttctgaaatagtctgcaactttgcaaaagtgagacaaaagggaatcgaagcagttcgtaataagctgatggagaagtaggttgcttacatcgttatgcaaatggttcaactccgcaaagaacgcagaaaacaaaaataccttgaaccttaaaccggatttgtaaagtaattttactgctcaggaggcgaagtgtatcctgattctggaaaaatgcccttttcctgctgaactgaagcggcaaagccatattgagccttcaattccaggagcaaagacttgactacctgcttgagtatgatacgagaagaatacccctttttgcatagagtccagttaaaattttcgacaagcgcgcacaatttctaaaatatatttcaagatattatacgacatgcacagatattcatttactaattagttttagtaatgttatcagtatggttcattttcagtagagttaaagccgtgcaagtctgataactttgaaagactcgcacggctctgttgaatgtcacagctgcatcagagttttgttagtacagcttgaaattccttctatcagtttcttggatatatcttccttatctcctctacccttttatggattctgttagggggtgccagaacaaacctgcactgagaatcccctgttgctctgcaggtgatctcctttgcttccagattcattccggatgcttcagaacaccacccggcggaatatcctgcattcatgaagcaaatagcctggtcggatttattgcccttatccagatttgactctgcttcataagaattatggtgctgataaaccataagataatcattatttaatacaggcttgctttccggcagcacttcgaccacagcaaatccgttcatagcacaggctacagtacccatagcgtgtttaagctcagagtcatctacttgaagtttattaaaataatattttgcatctgagcggccgcatgcctttccaaactgatacattactatgcctgcaccctgtcccatgacctgagaaagctgctctctgagagccactgctacagcttcactgcgatacatgatgtatctttcgccacttagaagcactgctccgcgctcaggattccacctgcgtttttcaaactggggaacaataagttcttctgctgatttgcagagaggttccagccaatcgggacactggacatacttaagcatcttccaaaccttcctttctgtgaatgaagaatagtattcttctgctaactgtttcagattcaattagttacctaaactcacatagacattcttccaggataaagctcacctcaccaaatcataaaaccctgctttaatgtaccgatttcaaaaagctccgcaagccccagccgcaagcacctcagccggtaatcaattgaagcagaatcactgcaacaatattactatattacagccatagcgcaacggaagcttgccgaaatggtttaacaacatctgcggtgcaaattcagaaaaccattcaggtgaaaatctttgtgcagacgccctcaagcggtctcttttttccaggaggttccagggcaggtcagaagctttttcaactctcctctgttgacctggaatatgttcgaagctcagcactgcttatcactggtgtcccaatgtttgaccacaccagctccgtaacatcttaaagcaatctaagatagaaagagattgggcgggtatcgacttgaatcgcctcatagaagcatcttgtagcttcattgcagaatggagcaagtatgtattcggggcgtctcatcttttctcaactcatggatcattttccacacaaggcatttgcacggattgtcagggagtattccggggattacaaggttcagcatttcacctgcaagagccagttttactgtatgtccttcggacagctgacctacaggaacagtctcagggatatcatcaactgccttagggcgaacgaaaacaagctctatcacatgggtttcagaggaggcaaggtatccctgaacaatctctcaaatgccaatatgaaacgcgactggaggatctactcagatctcggtaaggttcttatcgacacagcgagagagctgtacgccggtgacaaattctgcaatgagatatccgagccggtatacgccctggattcaaccaccatctcaatgtccttgtccctgttcccatgggctgaatttcgagagacaaaggcaggaatcaaacttcacacgctccttgaactctcaagctccattcccacattcatcgatatcacctcagcaaagccacacgatgtcaatgtcctcgaccggatcatcctggagcccggagcaatctacgtcatggatatgggctacatggactttgggcggctttacagagtagctcaaggtggagctttcttcgtcacaagagtcaagaggaatgtcaagctcaagcgacggtattccagaccaagggatcccgaagagaccggtattctctcagatcaggttgtgtttgcggaagaacctgccagttttgaaaagtaccctaccgttctccgcagagttcggtacagagatccagaggaaggcagggtgtacaagttcctgacaaacaacttcaagctgcctgcaaatactattgccgcactgtacaaagggcgttggcagatagagctgttctttaagtggatcaagcaacacctgtagatcaagagattcttcggacataccatgaatgcggtaaagacccagatctggattggagtatgcgtctatgtgctggtagcgatcatccgaaagcggctgaaccttgaagactgcagcctctacaacattctacaggttctcagcgttaatgttatgtgttatgatgaactgcagcaactacttacgaaaagagatcttcaggaggctgataataaaaactgtaaccagttgtccctcttctagttaagatgggacaccagtgaacataaatttccagttagaggcaaaactggaatgaaatattactggatagtgaataaactccctggccgtgctcacctgaaggatagtcttcaaagcacaagagtgatttcaactaagacagacaatggctggcaagaccattatccttcacatttcgagagtaagaaatcagtgtcctgccccgtggatgggtaaaatccctcgccttcaggcgaagccatttcctttatggggtgcttctccttaaatcgctccggttaggtgtaagtgtatcgtcagcagtctcaatgccttggatgggacttgcgtgttcctgagaatttggaatattagtcatgaatcgactttcacttgtggagtgagtttgtggatacttatttgagttttgttattcccaaatataacaataacttaacctcggttcaaggttgggtgcttccccttaaatcgttcagcttaggattcataaatgtgtcgattgcatgtttttcgagctatgccttagtggatgcagaggaattgctgttttgaagaacaggattcctgagagttatgttggtgatatgtattgccgacgaaagaagcagcagattattcagattgctctacagaaagcccggaactggttaagcgctgatggccatgataaaggtagtctttccctgctcacctggagcattggatcatgttatgaatagattctttagaagaatatctcataagggagtattggttaccgtgctggtgctggtgtctgtgcgctgcgcttctgaggagagcgacttacacagctggtacagatgggcaaacgaaggtgaacaaggcctgctttatgatgaagatggctgctttgctgagtattctctcgttgcctcatttgccgaggaagacggaagcgatccggttatctacaacgctaaaagcgttgcatttattggtgacagcatgctcgtaaccgatgcttcccggcagtgtctggtgtgtgttaatcaagaagaagatgtgctatggagttatggtgtgcagggagaaggatctggatcatttctcatgatttctgatgttgtagtttttggtgcttatgttgcggtgagtgacattcagcttggcagagttgatatcatcactcattccggtgagtatgtcgctagtgtagagatgcagtttcttcagtcaacagtggctcatacggatacgagcattatagtgatgtccggttgtcttgatgctgaccagcttcaggagtacgactatcgtggtgacctggtgaagtcagctacgatagatacttggaatgactcattttgcgtataccttacgggtacctctaataatagcggagagattgcggtgtttacgactattggtgaggagttcgtgattgttgacagcgatcttctatcctacagggagtatgagctaaggaactttccaatagattatccaactattcagtatagtagcactgatcagggagagcatgttgccagagtagtgccaataatcggtaacaccttcttggattcccagggaatgataagtgtcaggcttatgccctttactgcagagaaggagttctggaattttgatgacgcattgatggcaccggtaacagtcattgatcggtataactgggatggtgactttctttgtgcgtatgttatactccttgagaagtgcaagtacactacctgcacacaggatggtaagcttgcggccattgaccgggatacatcctgcattcgtgtttacgagagaatttaggtaatgggcaggttattcagattgaatgaagtcttgtttaagtgtaatccagaagaactcattgatgaatttccagatgtttagagtagttttagcgaatgacagagacatctgaagaagccttccctgtgaacaacatggaaccactcagcaatacgaaaaccctgtttcgccgagatgctcctgctttccacatagtgtgaacaggctgcaatttcaattccggtgaagtggccgaagccggttttctcaatggcaatatcaagaattctcctgctgatgattttccgtaccccttttatgaaatccagggtgtacccgaagaccctccagccaggccacctgcctggcattcccttatcctgccgcaggcaataacctttccgccggcactcccacaatgaagaggccgttcctgagccatgctcctgagaccttctcaaggtagtcctcgccgtcccgggttttcctgcttaactccgcaggttcaggaaagtccctctcaatggctgttctgacctccagttccgttatcagcattccttccaggtgttgcctgaatatctgacatttatcctgtttccggcgattttccattcaattgatgtggtatttctcaggaactccctgtcatggctgacaaggagcagtgctccctgaaagtcgctcagggcttcctcaagacagtgaatagagggcaggtccatatggtttgtgggttcatccatcacaacaagccacggacttcgtgacaggccagttgccagtatcagttttctggtttctccggggctgggaactgaagaatcaagaagtctttcaggatcgcttcccagccttcttacaaaggtcatcacagttcccagttcctctcctgacagcttccttgctttctcaagacatcgggaagactcttcggcagtgatctcctgtggtatccagatcagtttttcatcagggcagttcaggagaggctgaagtctgttcagaagggtggtcttgcctgaaccgttggggcctgtgactgctattgtgtcagaaggagagatagtcagttcactgtgagaaatgcattttttccctgcctgaaacgagcccccaggaagatcaagcaggctgtttctttctgacctgtctccgtcaagttcaatgccgcttctgtgcagtttcctgtaggtaattgactccattttttctttggctctttcagcgcgggctgctgcttcgcggcttctccgtccggccttctgtacaattccgtccactctggaagggccatctacgccaagagtacaaatatctttaaaggacattctgttttttgatgcatgggcctgtatggttcttgccctgatcatcttttttctggcatctctcttctttttgagataatctgcacaggcttcccttttctgctttacaagaaggtttcgttcacattcttcttcctttaccgccctggagtagccggccttgtagaagtgtattctgtccgatctgaacagtaccgtgtttttgcatatcgagtccattgcctgtctgtcatggcttaccagaagaccccatcctggaaacgaagccattgctttgagaatagtctcccttccccgggtatccacatggttgaaaggttcatccagtgccagtactgcaggatgttccattaaggcaacggctatctgaagcctcttcctctctccatgcgaaagactgtgccacctttcaggccagttgtcttccagtttgagcgcctcccttatggagatagcttcacggttccagttgaagatgaaatcattcagaccctctggaggagagtctgttcgctgggcgcagtagaccgctttacctggaaggctgattgatccggaatcaggggaaagcaatccgcaggcaagcttcagtgatgtggttttaccgcatccatttgctcccgctaatgctgtccagcccggtctgatcgtaaaagtcagatttgtaactgcgggattgattgaaccggaatatgtgtatgtaacatgggaaaaagagagtttctgcatggcaatcctttcagaaaagagtcagtacggctttttcagaaagaattattcatgcttttccctccgttcttgaagactgattaatataaaatacaagtttaatcgtcaagtctggaaaagtgacacctgcttcatagaaggtttctcagttgtgtgcagctttcactgagaacagataatgtgcatttcagttggcgctcttactaatttcggtggcattgtctgcctgccgattacaggacagtaatccctccattttcttagtagttgcggaggttccgttctctgaagtattatcttctttaagaatactgcaattccacttaacgaaaggggtgtgaggaatgggaaaactgcttgttccactgataattctctctgggttggcctgggctcaatgcagctgcggaggccacgacagccggctctgtgaatgcctggagccctgc

SEQ ID NO: 2991 - DNA, 23159 bp, synthetic construct
  misc_feature 1..23159: note = Synthetic
  source 1..23159: mol_type = other DNA
gatcaagcacgccgttaggcggcactttgagggcgtccccgatgacctcctcgtcaccaattacttcgataagctgattcaggtgccaatccgtgtgcctcccctgggtactcaggaggtgcgcgcctacattatgctcttgttcgtggagaacagcgaccttgcggaggatgtaaaagaaaagatccgcagcggggtcgtcgcccaattgcggcaaacatgggcaggcaagcgcgtcgaccgcgcgtttgtgcaatccttgcacgatcccttaccggcagagctgatcggccgcttcgataccgcggaccgcttagccccgctcatgacgacggcgtcgggcattctgggcaatccacgcctgatcaaacgtttcctcaatgcgctcgccatccgcatgacaatctccaacgcgcagggcgtaggcgtcgatgaggcggtcttggccaagctgctgctgttcgagcggctcggcaatgcgaaggcatttgccgaactgatgacacaggtgagtgccagcgacaccggtaagcctgtcttcctcgccgaatgggaagagaaggcagtcgcggggcaggaacaggctctgccagcacctttcgacgagccctttttcgctgagtggcttacgctgccaccgacactcgctgacacggacctgcgcggagccctgtatgtgagccgtgaacatgcgccgctgatcacgcccgaggaccggctttcctctgaggcggccgagcttttgacggcgctcttgcaacatccggaaatggcatcgagcctgaaagaccgacttttacaggtgcctcggaccgaaaccaacgtgatcatggaccggcttctggatcgtgcgcgacaggagcaggagtggggcgtccctgccgttctggaagcctgcctcgtcgtggccgacgccgacccgccgcagggtgcgaggcttgccgccttcttgggcgagcgtccccccgcgcagattcaagcgaatatcgtaccgaagatcggggaccagccatggtcgaagggggtcttcgacatctgggatcgggggcaggcgtccaggccagttaaggcggcgatcaagaggcagaggggaaatgggaacgtcacaatctagtggaggcccgggtagcggcgtctcgatggtaccaccctggaccccggacccgcccacgggagaggcgtctggcaatggggcggagggcggagacgctccagccggtgacggtgttgcggccccccaagtgccaccgccggcgccgacaccaattgccccaccagcccgcttcctcggtgcacgtcgtgcgcttggcgagttcgcaaaatccggcgatggtggggacatgcggcgcagcatgggtcactacgtccggaccggctatggcggatcggcaacagcgactcggcgcttcggaggtacggcagcgaccgccggtgcgcttggcggagcgctggcgcgggttgcagcgggacagccggcggagccaggcagcccgcttgatccggcgctcctcgccggccgcaatgtgcaggaagtcatgaacgccgttgtggaggcggttcggccggtcgacggaacgcaggatgcagaagctgagcgcgcggcaattcgggatgccttgagcgagcttcttacccggttcccagatgcggatctgctaaatctggaccctgagcagcgcgccttcgccatcgagcgtttcacggcaatcgacgtcttccgtcgctttgaactcgatctcggcaagaccatcgttgagaaggcgccgagtgcggtgacagctctgtctcggctcaaggaagtgcgggactatgtgaagcagagcgtggcagcggcattccgcaagctgcgcgatgccggacgcagccttaagagtggtcgcatcattcaggttgttagggatgctctgagggagacattcgaggtgtttgaaggatacgcggaatgaggctggcctgcggtccagatggcgccgatttgcccggcggtgaaggtatcatgcgcgtggtgctttacggccagccgctggccgaaggacaaggaagcgctggcgatgcggcgagatccgagatacaacgccgacgacttgacccgacaccgcgggcctgggacttgttgtcgatcgcgctgagtgtcgtgactgcagatttcgcggtcttgcgcgataagagcccggacgggtggacacgggagatcgagctcgacattgccgtggcggacccgccgttctggaaggggcaggcccgggctttggcagaagcgctcgcattcctcacgaccgatcgctggaccttgcgatttcacgagggtgggatgctgcccacgccgcctcgtgaaccagtccggccacctgagagctgtgtggtactcctgtccggcgggctagacagtttgatcggagcgattgacttaactgcggcgggccataagccattcgcaatcagccagacagttcgaggcgatgcggacaagcaggtcgactttgccgcaaagatcgggggcggtctcggacacctgcaactaaaccacaatgcacatacgccgggtgtgcaagaagcctcgcaacgggcgaggtcgcttgttttcatcacctttggcgtgatcgctgccacggcccttaacgcttatcgggaggtcccggaggtgccgctcttcgtgtgcgagaacggcttcatcgccattaacccacctctgactggcgggcggcttggaagcctcagcactcgcacggcacatccagagttcctggctcgtctgcaaaaggtgttggatgcggcaggtatccgggtcaaaatcaccaacccttatgccacgaagaccaagggcgaaatgctcaaagaatgcgctgaccagaaattgctttgtgtggaagcagcgcgttcgacgagctgtggtcggttccaaaggttcaactatcgccaatgcgggcgatgcgttccgtgccaagttcgtagggcggcattcattgcgtgggacgccacccaagatacgacagactacgtctacgaacagatcggaaaagatgatgccgatcactcggggttcgacgacgtgcgctcggtcgcgatcgcgcttgcggccatcaaagcggaaggcgttgaggggtggctcggtcatgcattggcgtccccgttcatcgctgatcgaccagctctcattggtatgcttgagcgcggtcttgaagagcttcgcgcgcttcatcgggcctacggcgtcaaatgatcgacttccacgcgcatctggacctttatgccgatccccacaaagtggtgcgcgaatgtgtcgcacgcgatctctatgttctttccgtcacgacaacgccctcggcctggtccggaacggctgcgctgacaaaggatgcgccgcgaattagaaccgcgctcggcctccacccccaaatcgcgcatgagcgtaaaggtgagcttgcgctgtttgagcgcctattacctgaggtgcggtatgttggtgaaatcggccttgatggtagtccggaatatcaacggtactggccggaccaggagcaagttttctcccgtgtgctcagtctctgtgctcgcgcaggaggtcgcatcatgaccattcatagccgtcgcgcggccacccaggtccttgacgctctagcgatggagcctcgcgcaggcattgcaatcatgcattggttttcgggaacgcaaagggagcttgcgcgcgcagtcgatatgggttgctggttcagcgttggcccagccatgttggccggcaacaaggggcgggcactaacagcgaaaatgccacgggatcgagtacttaccgagacggacggccctttcgcacaggttgatgggcgcgcggcatggccctgggatgcgaatctagcattagaagtgctatcgaatgtgtggtcagaatccattgaaacggtgcagtgccagctcaaaagaaacctccgccgtctgatcagccatggaagtgcatgcggcgggccaccgaactttggcggatgactcatgacatgaggtttcgcgaccaacgctcgtctggcacggcacgtattgaggacaccgggttggcccccatccttcctcggctcaggagacggtcgtctcttttgcttccaggggcttaatggccgggccatctttctcgtggtccccccaaatgcctaaccgctcgaaaatgttatcgccaaaaactagaagaagcgccgcaagaacggcaagaacacctgctgcccacagcggcacttggagccattcttcacgcgcggcaagcaggagaataccaaatagcatgaagaagatgatcgcaagcaagccgcttcgctgacatcggtgcagtctgaagagcttttcagtattcggttgaaccgccttccggtactcccaggtcaaccccgcgatttcttcgcgcagggcatcgggcggggcgagcggctgaaagtcgaagacagtgtctatctccagtcggtacattttagagaccccaagaacgcgcacggcattgtaaagtcccttcacgagaaacagcagcgaacctaggaagagtaccagcaaagaccacttgccatcgcccttcgccgcttcaaccgacccaacgagtggcacgatgaagccagccaagatgccaagaatggccagcatcgctgttgcccgcgcttctgcagccctgccgcgctccgcttcctgcgcacaacgcgcgctggcaaagcgcagcgactgttcaagaacgccgatatcctccgataccagttgatctcggatctcgcgaatctcacgcatacgcagcgctccgcatagtcaggcgatctatgatcgcatcgcggatcggatagccggtcttttgctcgatccatgcccactggccattgggatttacttcaaggaagtagaagaggccatcggttccgtgcaccaagtcgattgcagcaaagcccagattgaagtgcttggcaatcgcgcggcaatacgcggcgacctcctgcggaagctcaatctgctcatgcttgaggtcgaaggcgctgacatcccaaagacgccagtcaacttcagtatcctcccgctcctgcgaatggatggcaaccgggaacaactgatctccgatcagtgtcacacggacatcatatgcttttatgatctcgcgctgatagatcatcggcacggtcgcatagctgtcgaaattgtcgatgaatgcgcgttcaacgcgccgcgtcatcgccagcgtgaccgtatcgccctcatggctgaaaccattcttcacggctttgcagacaatgcggccgccatgttcgtcataaaacgcgcgcactctcgcagccgacatggtgacgcaggtttccgggatgcgaaaccccagcttcccggcgatggcaagctgttcaagcttgtttgaggcaagccacagattgcgggggtgatttagccacttcctggcatcgatcagccgccataggccacggagagtttccttgatctcgcgctgaacgaacaggcggtcactgtcggctgtcccattcggcacagcgggcgcgcgcggctgcctgaaatagattcctgtaatctcttcgtctttcagcatttgtccatcatcgaacgcgagtcggcattcggggctgccgttaaacgagatgtctatctggaatgcccggccaaaatcctccgtgttcaggcggacaaatcggatgccgcgctccttgaggcgaagtataagatagtcgctggcaaggtcagacttattcgtgacgactagtagcatccctcgtcctcagggtccggatcgtcatcactgggggcctgcattgtcttcgagccagtgcttgcgaaccagtccagcgtgacgacgggacgcgtttcgtcgtcctgttgcgcaatgttcaactgctccgtggcgcaataagccgaagaaatgtattccatcttgacagttcttgcgccctcaagaagataagatcgctttttaaccattattgtcgccccctttgacggcggaataatcgtgcgcctattcacaaattgttgcgagatttgagcgtttcgtcaatgtggatcgtagataaagtcgcatccttgacgaacgatgaccgctatccttatcaaattacggcgtacaaaggattctccgagcgaaggtagagggcggttctcaccgtccgctcgggggacggacggccttgggtggccgggagatcatgctgcagctttcatgcgcttttttgccaacatggcgcggacgaatttatcccatttggccatgccggcacgcttctccaccatgtagttccagcggtcgtagtgttttgagctgacgtcctgcagggcgtggttttgcaggcgatcgcggatttccttcggcacgcctgccttgccggccagcgtcttgaacgttcggcgcaggtcgcggttggtggcgtaggggatgacgccgcgatcgcgttggcgccagacaaaactgtacagggtgccgtggcttacaggcttcgatgggtctttggccgaagggaagaaccagccccactcattcggcttgatcgactcgatcagttcggcagcaagcaagggtacaggaacagcatggggctggtcgttcttggttttggaccagtcgatgatccgttccttggcatcccattgatcgacatgcaggcgtgcgatctcctcgacgcgctggccggtcagcatgatgagctgcacggcgcgcgggtaggagggatggacgggcgtgtcggggcattcgagccagcgatagagctggacgaattcgtcttcatcgagccagcgagtaccctgaaccttcggctcggttggaatgcctgtcgccggattgaaggggatgcggaagcggcgggaggattgctgccgatagtcgttgtcggacttcatgccccaagagaaagcggcatggagataggagcgtacatggtcggccatcgacttcgcgccacggtcgtagatcgggcgaatgatttcgatgatctcctcagcctcgatctcgcgggcgaggcgattgcgcccgagcgtgtcagcgatcttgttgagacccttttcggtctccttccacgagggctttccggcgtccctgagggcagcgacatagccttcgaacagatcggcgaccgtgccggggcgcgtgtcggtggcgatcttgatgctccggcccttctggatgacgtcggcaaagtcgcgcttgaagatctcacgcgcttgagcgagcgacatcgacggataggcgcctagcttcttcttggtgcgcttaccgtcgcgccattgctgcgccatccagtcggcggtgacgcgcttcggcatgggcttgagaacgaggacgagacggccggtgccgcgtccttctccatcggcgaggttttcctgcttctggctcatctcgacgcgcttgagcgcatgtctaatcgtcgtgtcggtgagtgcggccatggcgtttcctcctttccagaactgggatcggtcgaggaaaaacagggatcgctagctgggagcggaaggccgtttgttaccccgattacagcccccaatttgccaaaaccgcccccagtacgcaagtgccaaaagccgtaaaatccttagtgtttaaacgtgattgagcgtgatctagtgtgatcgaaatgagtaagtggggtggttgtggaccagaatgatggccgtggccgaaagctccagcgcccggcggatcacctcgcgcggatagaccggcgtatggtccaccgtgccgcgctgctgcacctcgtcggcgatgaggccgttcttcttgtcgaggaacaggatgcggaactcttcccggtccgcatggccgctggcggcgcgcacataggtaacgaccttggaccaggaggacagcggttcgcggtcgacgatctcgccccttgcatagcgggtggcgcaggcctgcagcagtttcagcgcatcggccaccttctccccggcgcccttgacctcctgaatgcgggccggtgaggctgccagcacattggtgaaggagccgaaacgctgcagcagcgctttcgccagcggcttggtgtcgccgcgcggaatggcgagaaacaggcacagttccagcagctcgtaatcggcaaagccatccgccccgtgctggcggaaccggtcgcgcagccgctcccggtggccggtataatgcggcgcgggggcgcgctccgaaaagccgccctgcgcctcgtccgtcttgtcgcccgtgtcgtccttcggcatgccgcgttccgtggtcagaagagctgaagaggggtatgcgggaggtgtggctgctccggtcagtctatcctgctcaggcggccttgtcgaagccgggccggtgcaggcccttgggcgagagcgtgaagatctcgcagcccgtgtcggtgatgccgattgcatgctcgaactgggccgagagcgagcggtcgcgggtgacggcggtccagccgtcgctcagcaccttcacctgcggcttgccgaggttcaccatcggctcgatggtgaagatcatgcccggcttcagttcgatgccttcgcccttgcggccatagtgcaggatgttgggcgtgtcatggaacagacggccgacgccatggccgcagaaatcgcgcaccacggagcagcgctccttttccacgaaggtctggatggcatagccgatatcgcccgtggtgttgccggggcgggcggcctcgatgcccagcagcagcgactcgtaggtcacctcgatcagccgctcggccgagcgcttcagttcgcccaccggatacatgcggctgctgtcgccgtaccagccatcgacgacgaaggtcacgtcgatgttgacgatatcgccctcgcgcagcggcttgtcattggggatgccgtggcagaccacatggttgatcgaggtgcagctcgccttggtgtagccccggtaatagagcgttgccggcagcacgcccttgtcgcggccgaagcggtagacgaagtcatccagctcctgcgtggtcacgccgggcttcaccagatccgcaaggccgtcgaggcattcggccgtcacctggccggccttgtgcatggccttgaaatcttccggcgaatagagccgcacctggccggtgttcttgagcggggcggtggctgcgtcgatataggtaaccataggttccgttctgatccgattcgtctccgccctgtgccgcaggtcaaggacccgctgcgcatgggacttggaggacttggcgcgcaaggccgtggtgctctggcgcggggcaccagaccggggcggcatgctgcctgttgtcatggggctcgcctgtctgttctgtcgcctaatatgagcggccccggcttgcaaggaaagatgtgtcagcccccgcagaagaattttcctgccatggggtggagaggcgggggaaaaggagagtggaaggccgtttcaacagccggagatgagccggaaaccacccttggcccggccagcacgcagaaccgcgaccgaccttgctccggcccggcaacggcctgccgccggcccggcaagggcctgcccgtccgcaccaatttgcacttgcagacggacgcggctgccgctacctcatacccgcgccggagacagcctccccggccaccggccaatgcccttttatcggggcctgacccctaccggacaagacccgccaaagggcgcgcctttgctccggcccagacatgcggacgtggtgaaactggtagccacagcggacttaaaatccgccgccctcaaacggcttacgggttcgagtcccgtcgtccgcaccaggctgcatcagcccccataacttccaaatcgtcccccagtactccaccccgatccgtttgcctgcccggcgggccgctgactggggctgactgcatatctgctccgaatgcaccagaaacctacaatgctcaccaaatatatccatgccgcaaaacaaacaggaacaccccgcccggcaagccgagcggggtgtgaaccttcaatggtgattaaaccacttgccgtggctttcctaccgatttccctgagctcacgattaaccgattgatttggcatgtcaaccgaatagcatggctcctacgtgtattttttggagtttcaatcatgcgcattctcggcatcgatggcggtatctccagcattggctgggcagttgtcgaccttgagagccatcgaatagttgccgcaggaacgcggatgttcgattcacccgaggaagcgaccaagagtggccccaaactcaaaaatgccgatcgccgtctcttccggggtcagaggcgaaccatacgcaggcgcgccaagcgcatggcggacatcaggaaactgtttcacgcgtcaggccttctgccgtcaggtgatcgaggtgctttggcggccgaagccggagacaaggacccctggtccctccgggccgaggggcttgatcggaagctgacctcccgggagtgggcgctggcactggggcacatcgcccgtcaccgtggcttccgatccaatcgcaagggagccgagtcgaacaaggccagtgaaaaccagaaggttctggccagcatagaagccacgcgggagaagtcacaaaggtggcggaccgtgggcgaaatgttcgcccgtgatgacacattcatcgaccgcaagcgcaatcgtgacggagactatacccggtcgatcctgcgcgcggaccaggaagcagaggtccgcaaactgtttgcggcacaaaggcggcacggcaatcctcatacgtcagatgaactggaggccaccttttcggagttggccttttctcagaaaccgttgcaaggcagcctcgggatggtgagcgattgcccgttccttcccgatcacaagcgtgcaagcgtctttgcgccgtccttcgaacggtttcgattgctctcccggctgacaaatctgcggctggttacggccgatggccgacgtgctctcacgcccgatgagatcacaaaggcgctttccggctatgcgcgcaccaaaagcctgactttcaaggcattgcggacaaagctcgggttggtggagactgaccgttttgatggcgtgggtccggatatcgaaaaaagggatatcgcccggcgaaccggagcggcgcttgagggcacaaaaacactgctggatgtgttgatcccggcgattggcgagattgaagcttttgggctcttggaaaggggaactccccttgacgaggcaacggcggcgattgccttcaacgaggaccttggcgacatcgagactgggcttcaagcctctggtctgcctgcggaggcggtttccgccttgctcgaggcggcgcgtcagggcgctttcgacaccttcaaaggtactgcagccttgtctgcagccgccgcccgggccctgtgcgagccaatgggacgtggcctggtttattcggacgcctgcgcagagcttggctggagccatagcgaacaaagcgtcatggatctttcggcaattggctcgcctgtcgcccagaaggcggctcgggaaatcctcaagcagattaaggcagtctcccaagcgttcggtccattcgatcgtgttcatgtggagatggcgcgggacgttggaaaaagcagcgaagagcggcgcaagatagagaacggcatcaacaagcggaccgacgagcggcacagggccgcagaagaactggcggaccacctcggcaagaccgcgtcgacacttcgaagcgaagatattctgcgctatgaactttggaaggaacagaatgggcggtgcctttactcgggcaaggcaattccgcttcaagcagtgctcgccaccgacaacgccgttcaaatcgatcacattctgccttggagccggttcggcgacgacagttttgtgaacaagaccctgtgcttcacgaaggcgaacgcagacaaaaagaaccggacgccctacgagtggaaatcggcggaacagtcagacgactgggagcgtttccaggctgaggtcgagagcaacaaggccctgaaaggcctgaaaaagcgcaactacctgatccgtaacgcctcagaccgggaagaagctttcagaagccggaacctgaatgacacgcgtttcgcgttgaaggtggttcttgcacacctgaaagacgcctttccaaaccttgcccgggaaaccgggggcgaacgcagggtctttgccagaccgggtgcactcacggcagcgttgcggcgtgcctggggcttggaaagcctgaagaagggcgcgcatggcgaacgtcttgaagacgaccgtcaccatgcacttgacgccatagtgacggccctgtgcagcgaaagcctgctgcagcgagccaccgcgctggcaaaggcagcggagatcaagggagagaaattcgaactgcgtggtctgcctgcgccttggggaacgcccgccgagttccggaacgaagttgcagccgtcgtccaggcagtgtttgtgtcgcggccggaaagcggccggatacgtggaaaaggccacgatgcgacaattcgacagatccgcgagatcgacggtgaagccaaggtctttgaacgcaaggcgattgaggagctcaagattggcgacctcgaccgtatccctgtcccaaaaccctatggcaagattgtcgatccggggaaactgcgcgatcagttgctcgatagcctcaagagctggattgaggccggtaagcccaaagacgccctgcctttgtccccaaagggagacccggtcagaaagattaggctgatgacgagcaacaagcctgggatttcagttagaggagggactgcgggtagagaagctatcgttcgtcttgatgtcttttgccaaatgacaactagtggaataatccaatatagattcattccaatttatcggttcgattttaaaatacggaaatgcgttcccgatcgatactttaagagaagcgaaaatttcgcgagttggccgaaactgtccgaagacatgcaattcaagttttctgtttacagaaatacattaatgaagatcattgatagtgaaggaaaagcacatatagggtactataaaagcttcgatacacgtgatggtcgtatcagtctaatgcctcctagtggtggggacaattacagaataccgacgacaacagctttgaaattagaaaagtacttcgttgaccgcattggaagccagttcttggtctcaaaggaaaagcggacatggcgtggaaaggcgtgcatctgacaaatccggcgcggctatctttggcggcggcccagcttgtcgtgtcacaggaagacggcgaaacacgtctggccatagaggatatcgcctgggtgatcatcgacaatcaccagaccacactcagcgttgccctgctcgccgcactcgcggaagcgggtgctgtcgttttgacgagcgaccggcagcatatgccaagcgcggtgacgctgccctatcacccgcaccataagcaggcggccatgaccgagcttcaggtcgcggccggagcgccgctcaagaagcgtctctggcagcggatcatttaccgcaagatcatcaatcaggccgtggtccttgagagcctcgaacgcgtggggccgcccctgaccgaaatggcgaaccgtgtccggtccggcgatccggacaacattgaggcacaggctgcacgcgcttactggcagcgcctgtttctcaacttttcgcgcggggacgaaacggatctgcgcaacaagaccttgaactatggctatgcggtggtgcgcggatgtctggctcgtgcgattgccgcaactggacttatccccgcccttggcctgcaccacgcaagtcaggcaaatgcgttcaatctggttgatgacctgattgagcctttccgcccactcgtcgatttgactgttgcgggcatctgccaggatcgggacacaagcgacgagttgacacggcaagaccggcaaaagcttggtggcctgccgctgattgatgtcgtgatgaggggtggtaaaatgagcctcctgaatgccactgagatcgccgcgcaaagcctagtgcaggcactggaacatggctccgcagacttgctggacctgcccaaactctcggtctgctctcgccaatgaacaaggacatccggttcatgtggcttatggtgttcttcgatctgccggtcacgacaaaaaaggagcgcggcaatgcgacacgcttccggaattttctgaaacgggatggctttctgatgatccaattctcggtttacgcgcggatttgccgcgcggaagaaggtgtggaaaagcacctcaagcgcatcaaatccaacctgcctccgaagggcagtgtgcgtacgctgcagatcacggacaagcaatatgcccgaatgaaactgcttgttggcgaatcaaccaaaaccgagcgcaaggcgagtgaacagcttgttctcctctgatttcctctccgccctgggagccttttatctcaacaaaacaacaccttgtgccaaaggcagcctaccacagggaaatcggtagggaagccacggcacattttcacaggtcaaagaacagacaggtagcctaccacagggaaatcggtagggaagccacggcgcctgccgctgcgcagcgtgaagcatatcaagcctaccacagggaaatcggtagggaagccacggctggaggcggcgctgaccgctgaccggctggagcctaccacagggaaatcggtagggaagccacggcgccaagtgcggcggggttgcgcttggcctcagcctaccacagggaaatcggtagggaagccacggctgttccacctcgggccggtctggggtgacgagcctaccacagggaaatcggtagggaagccacggcggccgctgttctgcattgccccaagtgcgaagcctaccacagggaaatcggtagggaagccacggcctatccgtgtccgccatatcagcgaggatgtagcctaccacagggaaatcggtagggaagccacggcgtagagggctctatcaggcgagccagtcggagcctaccacagggaaatcggtagggaagccacggctgtcatcaacggcaatggcccagacggcatagcctaccacagggaaatcggtagggaagccacggcgaagtgctgcaattccagaatgcagagctgagcctaccacagggaaatcggtagggaagccacggcaggccgtggagccgggctatcaggagggggagcctaccacagggaaatcggtagggaagccacggccgcagcgggcaacggcggccggtgtcgcgcagcctaccacagggaaatcggtagggaagccacggcatgagacctcgccgatgcggcaggtttcgtagcctaccacagggaaatcggtagggaagccacggcttgcagtgtcactggggctaggtctcgtggagcctaccacagggaaatcggtagggaagccacggcgaaacccctttcctggagcttcgacccaagagcctaccacagggaaatcggtagggaagccacggcagtcggcggagcgacggaagatcgacagggagcctaccacagggaaatcggtagggaagccacggcagtacgcttggccaccctcgaggaataccaaagcctaccacagggaaatcggtagggaagccacggcggccggtcggaaccgtctttcaggagcctgcagcctaccacagggaaatcggtagggaagccacggcaatcctacggcgcactgtactgttgccggaagcctaccacaggtaaatcggtagggaagccacggcgcggcgtccagtaccacgcgatgcggccatagcctaccacagggaaatcggtagggaagccacggctcaagggctggccggggttcgaggggatgcagcctaccacagggaaatcggtagggaagccacggcacgctatcgtgtcgccagccataggcccggagcctaccacagggaaatcggtagggaagccacggctgattgccagattgtccatgcgatcctctaaagcctaccacagggaaatcggtagggaagccacggcgacgtgcgatgcccatggcatcattgacatagcctaccacagggaaatcggtagggaagccacggccgaagcctgcgccaggctggaccacagcgaagcctaccacagggaaatcggtagggaagccacggcaaataaacgacaccgccgaccgcgccgacaagcctaccacagggaaatcggtagggaagccacggcgccggaggcggcggagtgcatgcggcgcatagcctaccacagggaaatcggtagggacgccacggccgtcgagcgtgccgccgacgaaggacaagtagcctaccacagggaaatcggtagggaagccaatcttggcaaccttgggcatcccttaaaggcagcttgtccggtttgatgacaagacgtgacttcccagcaccctgaccagactgcatcagccaccatcctctgaataccgccgccagttctccgccccgatccgtatgccctcccggccggttattggccgcgggcgtcggcatatctgctgcaaggggacctgaaaccgcggatgccggttaaggcgttgtggcgcttgggcctttgggggctggaggcgccggccgtccggagccctggcctgaacgccccttgacaaacttccatgcagccgttttggtaagatgtcagaccaatttggatctatggaacgggggcggcatgaggggcagcggggagagcagcagaccggtgatcgcgccgctggcgcccatggaccgggtgcgccaggtgacggaagcgctggcagcttatgtctcgcaggccggactgaaggccggtgaccggctgccggccgagcgggagctgatggatgcgctggcggtcggccgctcgaccatccgcgaggtcatccgtcactttcaggcgctcggggtgctggaaacccgcaagggcagcggcacctatctgatcaagccggtgacttccgccacgatccatatgccgctgtcgctggacacggcgaacctgcgcgatgtgctgctgaagacgctggaggtccggcgcggcctcgaagcggaagccagcattgtcgcggcgcggcagcggaccagcgaagaccttgccatcatcgagctgaagctcatggagatggagcgggtgcatctggagcagggcacctccggtccggaggatctggcctttcacctgtccatctatgatgccacgcacaatccgctgttccggcagcttctggagcagatgcgcgaggctttcgagcgcttctgggagcggcctttcaaccgggcggattttgcccgccgctcctttccctatcaccgcaccctgttcaacgccattgccgcacaggacacggaagcggcgcggcgcgaaaccttgaaaattctcgatgtggtcgaggaagatattaaggaaatgtccaaatgaatgacggttccagcccgttggatcccttttccctgatcgcggctcacgatgaggcccatgcttatggtgccgtggtgccgcccatcgtgcagacgtcgctttttacattctcatgctatgaggaaatgctggagacctaccgcggcgagaaagtccgcccggtttattcgcgcggcctcaaccccaccgtccgccacttcgaggaaatgctggcaaagcttgagggtggcgaggatgcgctcgggttcgcgagcggcatggccgccattgcctcttccatcctgactttcgttgaaccgggagaccggatcgtcgccgtgcggcatgtctatcccgatgccttccgcctgttcggcacgatcctgaagcgcatgcgtgtcgaggtgacctatgtggacggccacgatgaggatgcggtcgccagggctcttcccggtgccaggatcctttatctcgaaagcccggtgagctgggtcatggaagcccatgatgtcggggcgctggcggcactggcgcgcaaggaaggcgtcatctcgatcatcgacaacagctgggcgacaccggtctttcagcgtcccctggcactgggcaccgatctggtgctgcattcggcctccaaatatctgggcgggcacagcgatgttgtggccggggttgttgcaggctccgcagagctgatcggccgcatccgcagcgaggctctgccttatctcggcgccaagctgtcgcccttcgatgcctggctgctcatccgcggcctgcgcacgcttccggtccgcatgaaggcgcatgaggcttcggcgctggaaatcgcgcggcgtctgcaagcccatgaaagggtcggcgaggtgttccatcccgcgcttgcgaaccggctgccgccgggccttgagggaacctccggactgttctccttcactttgcgcgaggacacggacatcgccggtttctgcaatcacctgaagctgtttcagctcggggtcagctggggcggccacgaaagcctgatcgtccccggcgaggtcgtcctgcagcagaaggcgcagcccaattcggcacaggccttcggcatcgacccccgatccgtgcgcatccatgtgggcctggagggaaccacggccctgtggcgcgatctggaggctgcgttcgctgcctcccaaaaccaataaaaaatcaatgtcttcaaaaagaggggaagtacaatgatgaaaagaatgctgacagcgggcctgctggcctcgatgatgtccggtacggcactggccgatacgacgctgaagctggttgaagtcattaccagcccggcccggacggagaccttgaaatccatcgtcgcgcaattcgagcaggcaaacccgggaacgaaggtcgagatcatctccctgccgtggggcgaggcgttccagaagttcgccacaatggtctccgccggtgagattcccgatgtgatggaaatgccggacacctggctctcgctctatgccaacaacggcatgctggagagcctggagccttatctgagcgactgggaagtcaccgcagatctgtccgaccgggctctggagcttggccgcgacatcgacaacacggcctatatgctgccctatggtttctatctgcgggccatgttctacaacaagaagctgctggccgaagccggcgtttccgaaccgcccgtgaccatggacgagtttgccgaagccgcccgcaaggtctccgccctgccgggcaaatacggctactgcctgcgcggcggtccgggtggcctgaacggctgggtgatgttcggcgcgacaatggccgggtccaataccttcttcaatgaagacggcacgtcgacattcgacagcgagggctggcagaagggcatcagctggctgatcgacctctacaagaatggctatgcgccgaaggattccatcaactggggcttcaacgagatcgtcgccggcttctacagcggcacctgcgcgttcctggaccaggaccccgatgcgctgattgccattgccgagcgcatgaagccggaggatttcggcgtcacgaccatgccgaagggaccgtcgggcaagaccttcccgaccatcggctatgccggctggtcgatgatggccaagagccagaacaaggatctcgcctggaagctgatcgcgacgcttgaaggaccggaaggcaacctgacctggaacaagcgcaccggggcgctgcctgccctgaaatctgcgtccgatgatccgttctatgccagcgagcagttcaagggctggttcaaggttctggaggatccggacgcgatcccgaccaccatgccgacctatctggaagaattcgcctatttcaaggattccctggcgatccagacatcgcaggaagccctgctcggcgacatcacgccggaagagctggccgccaagtgggccgactacatgaccaaggcgcagcagaaatttctcgccaagaaataactgccctttcccgtgcagccttaccctggcggcgttctgcgccgccagggcctcacgccatcccgacgcgagagaagcggaagacgatgacacgccttgttcagtcccggggcaggccgcccttgctgcggcgcattgcccttgatgcggaaccctatctgtacagcgccccggcgctgttcctgatcgccgcggtcatgctggtgccgctggttctcggcatctcctatgccttccgtgatattcagctgctcaaccccttttccggcggcttcgtcgggctggagcatttccagactctcgcccgcgacagggccttctaccgggcgctttcgaacacgctgtggtggacgggtgcttccgtctttctgcagttcggcctcgggctgatcctggcattgctgctcaacaagcctttccgcgggcgcggtctcgtgcaggcgctcgtctttctgccctgggcggtgccgacattccttgccggcctgaactgggcctggctgttcaacccggtcatcggccccttgccgcactggcttttcgccctcggcctgcgcagtgaggcgaacaatatcctgtccgatccgcacctggccatgtgggggccgatcaccgccaatgtctggtggggcattccgttctttgccatcaccctgcttgccgcgcttcagtccattccgcgtgatctctatgaggctgcggccatcgacggcgccggtcccatcaagcggttcctctccatcacactgcctttcctcgccccgaccatcgccattaccgtgctgctgcgcactgtatggatcgccaattttgctgatcttatcgtggtgatgaccaatggcgggccggcggaccggacccagatcgtcgccagctatattttcacccaggccttcaagcgccttgattttggctatgcctcggccatcgcgctggtgctgctgatcctgttgctggtctattcgatgctgatcgtcttcctccgccagacgcttctgaaggaggattgaaacatgcatgtccgcaaattctctctcgtcgcggcccatcgcctggccattctctgctacgtggtcttcgccctgtttccgctgtactggctgctcaaggtcgccgttacacccaacgatctgctctacagcgaaggggggcggatgtggccgtcgaggacgacctacgagcatttcgacttcgtgctccggcacagcgccttcccgaccttcttccgcaactcggtgattgtcgccggttcgaccgcgctggtggtaacgctgatcgcctcgctgtccggctatgccctgtcgcggttctcgttccgggcgaaatactggctgatcgccctgatgctgatcacacagatgtttccgctggtgatgctggtcgccccgatcttcaagatcctctcgccgctcggcctgaccaacagcctgaccgggctggtgatcgtttactccgccttcaacgtgcccttcgcgaccttcctgatgcagtcgttcttcgatggtattccgaaggatctggaggaggcggcgatgatcgacggtgcgacccagttcaaggcgttccgccagatcatcctgccgctcaccctgccggggatcgcggcgacccttggcttcgtcttcactgcggcctggagtgaactcctgttcgccctgatgctgatctccggcacggacgcagcgacattcccggtcggactgctgaccttcgtttccaaattctccgttgatttcggacagatgatggctgccggcgtgcttgcgctgatcccggcctgcctcttcttcctgatgatccagcgctatctcgtgcagggtctgacggccggcgcggtcaaaggctgaaaggttttctcatggcctcaatcgaaattcaggacgtccggaaaaactacggcgtggtcgaggttctgcacggtgtcgatctcgacatccaggacggtgaattcatcgttctcgtcggtccgtccggctgcggcaagtccacgcttctgcgcatgattgccgggctggaggacgtcagttcgggcggcattcatatcgccggaaagcgggtcaacgatctgccgccgaaggaccgggacatcgccatggtgttccagtcctatgcgctttacccgcatatgaccgtcgccggaaacatgagctacagcctgcgcctgcgcaaaacgccgaaggaactgatcgctgaaatgatcggggaggctgccggcaaacttggcctcgagcctctgatggaacggcggccgaaggccctttccggtggccagcgccagcgggttgccatgggccgggccattgtccgcaagccgaaagcctttctgttcgatgaacccttgtccaatctggatgcccgcctgcgcgaacagatgcgcgccgaaatcaagaaaatgcacgcggacctgggcgccacctcgatctatgtcacccacgaccagatcgaggccatgaccctggccgaccggatcgttgccatgcatggcggcgttgtgcagcaggtcgggacaccgctcgatctttatgaccggccggccaacctcttcgtcgccggcttcatcgggtcgccgggcatgaattttcttgaaggccggtaccataccggcagtggcagtgcggagttccgccttgccgatggaacagccattcccctgtccccgcgcggcggtctggcggatggcgccccggcgacgcttggcatccggcccgagcatgtcagcctctctgacgaggggcgctgggaggccggtgtcgatctggtggaacccacgggcttcggcatcatcctgcatctggccttgcatggccaggcgttcaaggccttcacccttgaccgctccgtcctcacacctgcagaaggcctgcgggtcagctttccggccgaacatctgcatctgttcgacgaagacggcaaccgcgtctgaaggcgccaggggcgtcatcacgctgttgccgtctgccgccagcgccgccacggactgcgctgcagagaggttggtgtccgggcgggctgaaggaaagggcttcgtcctcctttacgccatcacccgaaaatcgccgccaggatctgcgcctcgatgcgggcggcttcggtgccggccttggggcgcgggtgggggagggggacggggaattcggccttgatgcggccttcgtcgagcacgatcacccggtcggcgagggccacggcttcggccacgtcatgggtgacgaggatggcggtgaagccggtctgctgtttcaccttgaggatcagctcctgcatcaccagccgtgtcagcgcgtcgagggcgcccaggggctcgtcgaaggcgagca

SEQ ID NO: 2992 - DNA, 16165 bp, synthetic construct
  misc_feature 1..16165: note = Synthetic
  source 1..16165: mol_type = other DNA
  variation 14413..15647: note = note, n is a, c, g, or t
ccactgaggtctgcacctggtattacgacaagggcaaaacctatccggacgatctggcccagcaggtggagctggcccttgccgcagccggggaactgaccggccgccgtttcggcgatgcgcagaacccgctgctcgtgtctgtccgctccggtgcaagagtgtccatgcccggcatgatggacacggtgctcaacctcggtctcaatgacgtgacggttgaagccatcggacgggccgcaggtgaccgccgctttgcctatgacagctaccgccgcttcatccagatgtatggcgatgtggtgatgggccttgatcaccacgccttcgaggaaatcctcgatgaggtgaaggatgaggccgggcactcgctggatacggatctctccaccgaagagctgatcggcattgtcgagcgctacaagacgctggtggaagaagagctggagcggccgttcccgcaggatccgatggatcagctgtggggagctatcagcgcagtgttcgagtcctggatgaccgcccgcgcccagacctaccgccgcctccatgacattccggccgactggggcacggcggtgaatgtgcaggccatggtcttcggcaacatgggcgagacttccgccacgggcgttgccttcacccgcaacccgtccacgggcgagaaggcgctctatggcgagtttctggtcaatgcacagggcgaggacgtggtggcgggcatccgcacgccccaggacatcaccgagaaggcaaggcttgaagcagggtccgaacggccttctctggaggtgctgatgccggaggcctttgccgagttccagaccatctgcgaccggctggaagcccattaccgcgacatgcaggatctcgagttcaccatcgagcgcggcaagctgtggatgctgcagacccgctcgggcaagcgcacggccaaggcggcgctgaagatcgccgtcgacatggcggacgaagggctgctcagccgcgaggaggcggtgctgcgggtcgagccgcaggcgctcgatcagctgctgcatccggcgatcgatccggcggcaaagcgcgatatcctcgttaccggtcttccggcttcacccggagctgcctgcggggccattgtctttacctcggaagaggcagaagaggccaaggcagccggccgcaaggtcattctggtgcgcgtcgagaccagcccggaagacatccacggcatgcatgctgcggaaggcattctgaccagccgtggcggcatgacgagccatgccgccgtggtggcgcgcggcatgggcaagccctgcgtctccggcgccggtgcgctccgcatcgattaccgcaatggcacccttacggcgggcgggcgttcgcttgccaagggcgacgtgatcaccatcgacggggcaaccggtcaggttctggtgggcgaggtggcgatgctgcagcccgcgctttccggcgactttgccacgctgatgggctgggccgacgaggtgcggcgcatgaaggtgcgcaccaatgccgaaacgccggcggatgcacgggccgcccggcagttcggggcggaaggcatcggcctttgccgcaccgaacacatgttcttcgacggggaccgcatcattgccgtgcgagagatgatccttgcttcggcggaagaaggccgccgcgcggcgctgggcaaactgctgccgatgcagcgggatgacttcgtgcagctgttcgagatcatgcatggcctgccggtgacgatccgcctgctggatccgccgctgcacgagttcctgccgaagtccgatgaggagattgctgaagtcgccgctgccatggggattgacgcggagaagctgcgcgaacgggcgctggacctcgaagagttcaacccaatgctcggccatcgcggctgccgcctgctggtctcctatccggagatcgcggagatgcaggcccgcgccatcttcgaggcggcggtcgaggcaggcaagcgtaccggcgcaccggtggtgccggagatcatggtgccgctcgtgggcctgaaggcggagctggacctcgtgcgcgggcgcatcgacgccatggcggaggccgtggcgaaggaaaccggcgttgccgtgtcctatcaggtcggcaccatggtggaactgccgcgagccgccctgcgcgctggcgacattgccgccacggcggagtttttctccttcggcaccaatgacctgacgcagaccaccttcggcatttcccgtgatgatgcggcgtccttcctcggcacctatcagctcaagggcatcatcgagcaggatccgttcgtttccattgacagggatggcgtcggcgagctgatctccatcgccgccgaacggggcagggcggtgcgtccggacatcaagctcggcatctgcggcgaacatggcggtgacccggcctcgattgccttctgcgaaagcgtcggcctcgactatgtgtcctgctcgcccttccgcgtgcccattgcccggcttgcggcagcgcagtcctatctgcgccggacatgaggcatggcgggcagtgaggccatcgctgcgctcagggcagggggcaagctcgcccttgcccgggcgctgacccggatcgagaccggccacgggcaggcggaggtggatgcctttctggatgcggcctgccgggagggggcgggccatgtgctgggtctgaccgggccgccgggggcgggcaaatccacgctcaccaacagcctgctgaaggcgctgcggggcgcgggaaagaccaccggcgtgattgccgtggacccgtcctcccgccgctcgggcggggcgctgctgggcgaccggacacggctgacggcagaccctgaggatgcgggcatcttcatccgctccatggcagcgcgcgaccggctgggcggtctttcggatcatgcgctggcggccattgccgtcatgcgggcggcacgcgaggcggtgatcgttgaatccgtcggcatcggccagtcggaagcggatgtggcgattgcggttgatacgctggtcctctgcattcagccgggctccggcgacagcctgcagttcatgaaggccggcgtcatggagctgcccgacatcatcgtcgtgaccaaggccgacatgggcgcctatgcggcccgtgccgtggcggatgtgaagggcgccctgtccctgagcgagagggaccgcgagggctggcaggtgccggttctggctgtcagcgcgcaggacagcagcggtcttgaggcgctgcatcaggccattgccgcccatcgggcctttctgcacgcaggcgggcttgcggcgcaacgctttgcccagcgtcaggaggcctgggtggcggactatctgaagacccgctatggtcaggccggaagccatcttctcgccccggctgcgctgatccgcgcagcgggtggccccttcgccgccatgcggctggcggaccgccgtctggtggtcaaggtggtgccggacgaggctgcaacggagacctgacatgacagaggccggcagcagcattggtgaagtctcggaactgacgggatttccggccaagacgctgcgctattacgaggacatcgggctggtgcgcccgctgcggcaggacaatggctaccgtgcctattcgcctgcggatgtggagcggctgcagtttctcaagcgggcccgcagcctcggcttttccatcgaggattgccgcagcctgctggagctgcgccagaacccgcaccggagcagcgcccgtgtgaaggctgtggccgaggcgcatctggcggaactggaaaccaagatccgtcagctcatggatctgcgcgacgatctcaccgccatggtcgaggcctgccggggcgacagctgcccggactgcgccatcatcgaagggctgtcaggacattgagccacgccatcttcaaccggcgagacggctcgctgtgcgcaggatcatcgggtcaaggctgatgctctggatgagggcagagacggtttccaccggggcagggcggccgatgtaatagccctgcattcgctcgcagccggcgctggtgagaaactgcacctgcggtgccgtttcgatgccttcggccaccacggtcatgccgagggcggcgcccagatcgatgatggttcgcacgatcgcctgagcctgcgggctctcgtccaccggggagatgaagtcccggtcgatcttcagaatgtcgaaggggaagcggcgcaggtagctgaggctggaatagcccgagccgaagtcatccagcgcgatcttgaggcccagttccttcagccgtttcatggcggtcagcacggtgtcgtccttgccggcgaagacggattccgtcacctcgatctccaggcgcgcgggcgccatgtcataggcggtgagcgtctcgatgacctggtcgatgaagcgcggatggcggaactgggttggcgagatattgaccgaaacagtgatgtccggccagtgatgggcatcctgacatgcccggcgcagcacccagagccccagatcgttgatcaggcctgtctcttcggcgataggcacgaaaatggccgggctgacaggtccgtgttccggatgcgtccagcgcacgagtgtttccacggcggcgaccctgccggtgcggctgtccaactgcggctgataggcgaccgaaagcaggtcattgtcgatggcccggcgcagatcgcgggcgatcttgtcgcgggtgtggacgtgctcttccatggacggatcgaagaaagaccagcggcgccgcccattggccttggcatcgtaaagcgcgatgtccgccttgcgcagcagctctcctgcggtggtgccgtcctgcggggcaatggctgctcccatggacaggctgacatagagctcgtttccggcgacccgcagcgggcggctcagctcgtcctgaatatggctcagctgatattcgatgagggagcgcgagcggcagcccgacaggatcatcgcgaattcatcgcctgaaatacgtgccagcatgcccgtgggcggcacgatggtgcggaggcgcgctgtcacggccttgatgacttcatcgccggccgcatggcccagcgtgtcgttgatgtccttgaagtgatcgagatcgatgtagatgacagccgtcagatctttgccattgcgctcgtcctgagcatttgcgagcgcttccaccagcatacggttgaaatagtcgcggttcggcaagccggacaggctgtcatgttgagctgcataaatggcccgcgcttcgctgttggcgagcttgcgtgtcgactgccttgcgtagttcagcagaagggcggtcatggcggcaatggccaggacgaggaggaccagcaccggcagaatgcgcatgagcatcagcgatcccgggcgggacgagcgccagttgaggcgcgtcaccggctcgcccgaagggtccagcacgaggatggaggcgaggtctcttcggcccttttgaacaggtcctgcttcaatcccggaaatccctgccattccggagaggcgcccgaggaccgagggagtcatggcgacaaaactcaccagcaccgcaggatcttcgcgctctgcgcccgcgttgtgggtctgcggagagattgcggtcacgctgaagtaatgcgggcgcccgcctgccatgacgacgccattctcgaagatggtgcggtgattggcgcggtagtccggctgaaagcggtaggcgcccgaaggtgttttgcggaagcttgagatgtagctgtcgcggacattggccaccggtctgcgcagcgcattgagcaatgttccgtcgagccagttgatggcgccgtcgctatcataggcgacgatggcctccagatcgcggttcaggatcaccgtcttcgtatggccatgcacgttcgcaagtgaaatggcgacctggtgcagcagccaggcggcttcttccgaaccgcgctttgcccggaaataggcatcatcccagaccgcggcagcttcctgctggctgctcaactggtccagttgcatcgccagagagccctcgatcagactgcgctcgctgtcttctgcggcactatcggtcagggacgaggaccagatgagaattgcgaagacaaacaggacagcaagcagcatgacgccaatcaccggaatgatgatcgtgtttgctatctttcctccctgcgtccctatgccttgatccatgtgatctgcccccggcttctgaaaattacactccgggaaaagacttaaggaatggcggatggatttggttaaggccagttcacgaagaggaaattgtaagtctgaatggaagaatgggcctgccgggcagtctgccgatcgttttgcagcgccgcggataaataatattgacgctacgtaatgttctgcggccaagcatctgcaggtccatatgcccggcggcaaacccgcattcctgcagatagctgcggaaccggagcatccgggatcttttcctgaaagcccgacctgttataccaaagcgttcgatgccgaagcatcacgtaacggaaatgccctgacgccgcacggacttggtaataatctgccgctgaaacgggaggccgcatggatcaggttgcgcaaacacgcgggagctggccgcagcatatggatgaaaaggcctatgcggctgcaatcttgcgctgcgcggagaacatcctgcccatgcacatgggcgaaaggctgatcaacaaggtgtttggcaagagccttcagtcccatgctgcaggtttgctggcgatcctccattgccgggcgcagctgggggagggggaggccgcaacgctgtccatcctgcagcagcagatgggccgcagccgcacgctggcgagcttcatcggcctgctgaagctggccggttacgtgcgggcggttgaagtctccggcaaccggcgcgaaaagcggctggagccgaccgagctgatgctgaacggcctcaggacctggctgtcgcatcatctggcctgtgccgaagtggccgggctgctgctgccggaaccggaccttcatcagcgcctgcatgccgatcccgtctacggcctgcgctttgtcgccgagacctacgacatggtgcgcctgacccgggaatcgctggcgggcgagggtgcctggccctggttcgaccggttcgactgcggcgaccggctggcgctgatcctgctgaaggcccactatggcgcgcgggagcaaacgccctggctgcccttcgccgcccggcaggctgccgcacagctgggcatctcccattcccatgtgcgcaatgtcatcaacaaggcggaggccgccggatggctggtgcagcggcgcgatcagggtgagctgcagctgacgcctgctttcctcaccggcgtgcgcgactggtatctgatgttctggggctggctatgcgaagccgcgcacagggcacatgaacgtgaggccggatcagcctgagcggaacagccctcagatcagctgcaggccgcggaagctgatttccgagccgcgggcgacgatgatgtgatcatgcacctcgatgcccagaggcttggcgatgtcgatgatctgcttcgtcatctggatgtcggcgcgcgagggcgtcgggtcgccgctcgggtgattgtggaccagaatgatggccgtggccgaaagctccagcgcccggcggatcacctcacgcggatagaccggcgtatggtccaccgtgccgcgctgctgcacctcgtcggcgatgaggccgttcttcttgtcgaggaagagaatgcggaattcctcccggtccgcatggccgctggcggcgcgcacataggtgacgaccttggaccaggaagacagcggctcgcggtcgacgatctcgccccttgcataacgggtggcgcaggcctgcatcagcttcagcgcatcggccactttctcgcccgcgcccgccacctcctgaatgcgggccggggaggcggcaatcacattggtgaagctgccgaagcgctgcagcagggctttcgccagcggcttggtgtcgccgcgtgggatggcaaggaagaggaatagctccagcagctcgtagtcggcgaagccctcggctccgtgctggcggaaccggtcgcgcagccgctcccggtggccggtgtaatgcggggcgggagtgcgctccgaaaagccgccctgcgcctcgcccatcctgctggccgtgtccttgtcgcccgtgtcgtccttcggcatgccggtttccgtggtcagaagagctgaagagggtacttgcgggaggtgaggctgcctggtcaggcggccttgtcgaagccgggacggtgcaggcccttcggcgagagcgtgaagatctcgcagcccgtgtcggtgatgccgattgcatgctcgaactgggccgagagcgagcggtcacgggtgacagccgtccagccgtcgctcagcaccttcacctgcggcttgccgaggtttaccatcggctcgatggtgaagatcatgccgggcttcagctcgatgccctcgcccttgcggccatagtgcaggatgttgggcgtgtcgtggaacagctggccgacaccatggccgcagaaatcgcgcaccacggagcagcgctccttttccacgaaggtctggatggcatagccgatatcacctgtggtgttgccggggcgggcggcctcgatgcccagcagcagcgactcgtaggtcacctcgatcagccgttctgccgagcgcttcaactcgcccacgggatacatgcggctgctgtcgccataccagccatcgaccacgaaggtcacgtcgatgttgacgatatcgccctcgcgcagcggcttgtcattggggatgccgtggcagaccacatggttgatcgaggtgcagctcgccttggtgtagccccggtaatagagcgtcgccggcagcacgcccttgtcgcggccgaagcggtagacgaaatcatccagctcctgcgtggtcacgccgggcttcaccagatctgcaaggccgtcgaggcactcggcggtcacctgaccggccttgtgcatggccttgaagtcttccggcgaatagagccgcacctggccggtgttcttgagcggggcggtggctgcgtcgatataggtgaccatgggttccgttctgatccgattcgtctccgccctgtgccgaaggtcaagaacccgctgcgcatgggactttgtggccctggcgcgcaaggccgtggtgctctggcgcggggcacctgaccggggcggcatgctgcctgttgtcatggggctcgcctgtctgttctgtcgcctaatatgagcggccccggcttgcaaggaaagatgtgtcagcccccgcagaagaattttcctgccgcaggctgggggaggcgggggaaaaggagagcagaaggctgtttcgacagccggagatgagccggaaaccacccttggcccggccagcacgcagaacatgagcagcagccggctctgcttcggcccgggaacggcctgcccgcccgcctggcaagggcctgcctgtccgccccaatttgcacttgcagacgggcgccgctgccgctacctcataccccgcgctggagacatcctccccggcctcttgttcttgctcctcgggtgagcttgcagcaaccggacaaggcacgcccaaagggcgcgccccaagctccggcccagacatgcggacgtggtgaaactggtagccacagcggacttaaaatccgccgccctcaaacggcttacgggttcgagtcccgtcgtccgcaccaggctgcatcagccaccatcctctgaataccgccgccagttctccgtcccgatccgtttgcctgcccggcgggccgctgactggggctgactgcatatctgctccgaatgcaccagaaacctacaatgctcaccaaatatatccatgccgcaaaacaaacaggaacaccccgcccggcaagccgagcggggtgtgaaccttcaatggtgattaaaccacttgccgtggctttcctaccgatttccctgagctcacgattaaccgattgatttggcatgtcaaccgaatagcatggctcctacgtgtattttttggagtttcaatcatgcgcattctcggcatcgatggcggtatctccagcattggctgggcagttgtcgaccttgagagccaacgaatagttgccgcaggtacgcggatgttcgattcacccgaggaagcgaccaagagtggccccaaactcaaaaatgccgatcgccgtctcttccggggtcagaggcgaaccatacgcaggcgcgccaagcgcatggcggacatcaggaaactgtttcacgcgtcaggccttctgccgtcaggtgatcgaggtgctttggcggccgaagccggagacaaggacccctggtccctccgggccgaggggcttgatcggaagctgacctcccgggagtgggcgctggcactggggcacatcgcccgtcaccgtggcttccgatccaatcgcaagggaaccgagtcgaacaaggccagtgaaaaccaaaaggttctggccagcatagaagccacgcgggagaagtcacaaaggtggcggaccgtgggcgaaatgttcgcccgtgatgacacattcatcgaccgcaagcgcaatcgtgacggagactatacccggtcgatcctgcgcgcggaccaggaagcagaggtccgcaaactgtttgcggcacaaaggcggcacggcaatcctcatacgtcagatgaactggaggccaccttttcggagttggccttttctcagaaaccgttgcaaggcagcctcgggatggtgggcgattgcccgttccttcccggtcacaagcgtgcaagcgtctttgcgccgtccttcgaacggtttcgattgctctcccggctgacaaatctgcggctggttacggccgatggccgacgtgctctcacgcccgatgagatcacaaaggcgctttccggctatgcgcgcaccaaaagcctgactttcaaggcattgcggacaaagctcgggttggtggaggctgaccgttttgatggcgtgggtccggatatcgaaaaaagggatatcgcccggcgaaccggagcggcgcttgagggcacaaaaacactgctggatgtgttgatcccggcgattggcgagattgaagcttttgggctcctggaaaggggaactccccttgacgaggcaacggcggcgattgccttcaacgaggaccttggcgacatcgagactgggcttcaagcctctggtctgcctgcggaggcggtttccgccttgctcgaggcggcgcgtcagggcgctttcgacaccttcaaaggcactgcagccttgtctgcagccgccgcccgggccctgtgcgagccaatgggacgtggcctggtttattcggacgcctgcgcagagcttggctggagccacagcgaacaaagcgtcatggatctttcggcaattggctcgcctgtcgcccagaaggcggcccgggaaatcctcaagcagattaaggcagtctcccaagcgttcggtccattcgaccgtgttcatgtggagatggcgcgggacgttggaaaaagcagcgaagagcggcgcaagatagagaacggcatcaacaagcggaccgacgagcggcacagggccgcagaagaactggcggaccacctcggcaagaccgcgtcgacacttcgaagcgaagatattctgcgctatgaactttggaaggaacagaatgggcggtgcctttactcgggcaaggcaattccgcttcaagcagtgctcgccaccgacaacgccgttcaaatcgatcacattctgccttggagccggttcggcgacgacagttttgtgaacaagaccctgtgcttcacgaaggcgaacgcagacaaaaagaaccggacgccctacgagtggaaatcggcggaacagtcagacgactgggagcgtttccaggctgaggtcgagagcaacaaggccctgaaaggcctgaaaaagcgcaactacctgatccgtaacgcctcagaccgggaagaagctttcagaagccggaacctgaatgacacgcgtttcgcgttgaaggtggttcttgcacacctgaaagacgcctttccaaaccttgcccgggaaaccgggggcgaacgcaggatctttgccagaccgggtgcactcacggcagcgttgcggcgtgcctggggcttggaaagcctgaagaagggcgcgcatggcgaacgtcttgaagacgaccgtcaccatgcacttgacgccatagtgacggccctgtgcagcgaaagcctgctgcagcgagccaccgcgctggcaaaggcagcggagatcaagggagagaaattcgaactgcgtggtctgcctgcgccttggggaacgcccgccgagttccggaacgaagttgcagccgtcgtccaggcagtgtttgtgtcgcggccggaaagcggccggatacgtggaaaaggccacgatgcgacaattcgacagatccgcgagatcgacggtgaagccaaggtctttgaacgcaaggcgattgaggagctcaagattggcgacctcgaccgtatccctgtcccaaaaccctatggcaagattgtcgatccggggaaactgcgcgatcagttgctcgatagcctgaagagttggattgaggccggtaagcccaaagacgccctgcctttgtccccaaagggtgacccagtcaggaaggtcaagcttctttcacgcgccaagaaggccgtggccgtccggggtggatccgccgaccgctccgaaatgattcgggtcgacgtatttgccaaggcaaacactcagggcaagactcagtatttcttagtaccgatttatcggaatgatttctttcgatcaaagggcggcggaatggacggcccccctaacagcgcggttcaggccaatacgccagaaagctcttggccgattatggatcaaagttatgagttctgtttctccattctccaaaacagtctgttgactgtcgttcgtcccaccggcgaggtcgttgaggggtatttcaaaggacttgaccggtcgaccggtgccatttccttggcacaccatacggcacctcagcaaattgaacgtggtatcggtgctcgcacgctgttgaggatcgaaaaatatcatgtcgaccgccttgggcaaaaacacgcggtcggaaaggagatccggacatggcgtggaagggcgtgcatctgacaaatccggcgcggttatctttggcggcggcccagcttgtcgtgtcacaggaagacggcgaaacacggttggccatagaggatatcgcctgggtgatcatcgacaatcaccagaccacactcagcgttgccctgctcgccgcactcgcggaagcgggggctgtcgttttgacgagcgaccggcagcatatgccaagcgcggtgacgctgccctatcacccgcaccacaagcaggcggccatgaccgagcttcaggtcgcggccggagcgccgctcaagaagcgtctctggcagcggatcatttaccgcaagatcatcaatcaggccgcggtccttgagagcctcgaacgcgtggggccgcccctgaccggaacggcgaaccgtgtccggtccggcgatccggacaacattgaggcacaggctgcacgcgcttactggcagcgcctgtttctcaacttttcgcgcggggacgaaacggatctgcgcaacaagaccttgaactatggctatgcggtggtgcgcggatgtctggctcgtgcgattgccgcaactggacttatccccgccctcggactgcaccacgcaagtcaggcaaatgcgttcaatctggttgatgacctgattgagcctttccgcccactcgtcgatttgactgttgcgggcatctgccaggatcgggacacaagcgacgagttgacacggcaagaccggcaaaagcttggtggcctgcctctgattgatgtcgtgatgacgggtggtaaaatgagcctcctgaatgccactgagatcgccgcgcaaagcctggtgcaggcactggaacatggctccgcagacttgctggacctgcccaaactctcggtctgctctcgccaatgaacaaggacatccggttcatgtggcttatggtgttcttcgatctgccggtcacgacaaaaaaggagcgcggcaatgcgacacgcttccggaattttctgaaacgggatggctttctgatgatccagttctcggtttacgcgcggatttgccgcgcggaagaaggtgtggaaaagcacctcaagcgcatcaaatccaacctgcctccgaagggcagtgtgcgtacgctgcagatcacggacaagcaatatgcccgaatgaaactgcttgttggcgaatcaactaaaaccgagcgcaaggcgagtgaacaacttgttctcctctgatttcctctccgccctgggagccttttatctcaacnnnnnnnnnnnnnnnnnnnnnnnnnnnnnnnnnnnnnnnnnnnnnnnnnnnnnnnnnnnnnnnnnnnnnnnnnnnnnnnnnnnnnnnnnnnnnnnnnnnnnnnnnnnnnnnnnnnnnnnnnnnnnnnnnnnnnnnnnnnnnnnnnnnnnnnnnnnnnnnnnnnnnnnnnnnnnnnnnnnnnnnnnnnnnnnnnnnnnnnnnnnnnnnnnnnnnnnnnnnnnnnnnnnnnnnnnnnnnnnnnnnnnnnnnnnnnnnnnnnnnnnnnnnnnnnnnnnnnnnnnnnnnnnnnnnnnnnnnnnnnnnnnnnnnnnnnnnnnnnnnnnnnnnnnnnnnnnnnnnnnnnnnnnnnnnnnnnnnnnnnnnnnnnnnnnnnnnnnnnnnnnnnnnnnnnnnnnnnnnnnnnnnnnnnnnnnnnnnnnnnnnnnnnnnnnnnnnnnnnnnnnnnnnnnnnnnnnnnnnnnnnnnnnnnnnnnnnnnnnnnnnnnnnnnnnnnnnnnnnnnnnnnnnnnnnnnnnnnnnnnnnnnnnnnnnnnnnnnnnnnnnnnnnnnnnnnnnnnnnnnnnnnnnnnnnnnnnnnnnnnnnnnnnnnnnnnnnnnnnnnnnnnnnnnnnnnnnnnnnnnnnnnnnnnnnnnnnnnnnnnnnnnnnnnnnnnnnnnnnnnnnnnnnnnnnnnnnnnnnnnnnnnnnnnnnnnnnnnnnnnnnnnnnnnnnnnnnnnnnnnnnnnnnnnnnnnnnnnnnnnnnnnnnnnnnnnnnnnnnnnnnnnnnnnnnnnnnnnnnnnnnnnnnnnnnnnnnnnnnnnnnnnnnnnnnnnnnnnnnnnnnnnnnnnnnnnnnnnnnnnnnnnnnnnnnnnnnnnnnnnnnnnnnnnnnnnnnnnnnnnnnnnnnnnnnnnnnnnnnnnnnnnnnnnnnnnnnnnnnnnnnnnnnnnnnnnnnnnnnnnnnnnnnnnnnnnnnnnnnnnnnnnnnnnnnnnnnnnnnnnnnnnnnnnnnnnnnnnnnnnnnnnnnnnnnnnnnnnnnnnnnnnnnnnnnnnnnnnnnnnnnnnnnnnnnnnnnnnnnnnnnnnnnnnnnnnnnnnnnnnnnnnnnnnnnnnnnnnnnnnnnnnnnnnnnnnnnnnnnnnnnnnnnnnnnnnnnnnnnnnnnnnnnnnnnnnnnnnnnnnnnnnnnnnnnnnnnnnnnnnnnnnnnnnnnnnnnnnnnnnnnnnnnnnnnnnnnnnnnnnnnnnnnnnnnnnnnagcctaccacagggaaatcggtagggaagccacggctccgaggttagcctgcgccgcgctgaggccagcctaccacagggaaatcggtagggaagccacggctcttatcggccgcacggtcattgcaccggcagcctaccacaggggaatcggtagggaagccagtcttggcaaccttgggcatcccttaaaggcagcttgtccggtttgatgacaagacgtgacttcccagcaccctgaaccgtcccgggttttccggaggcagtttcatttgagtcatgcaaccatatcgagggtcttttgggctgcatggtatttggcttcggcctctgcgggcgggatgtgcccgatggggccgaacaggcggttgttgttgaaccaatcgacccagcgcagggtcgccatttcgacggccgacgcgctcggccatgaccgctggcgccagatgacctcggccttgtagaggccattgatcgtctcggccaaggcgttgtcgtaactatcaccgacgcttccga

SEQ ID NO: 2993 - DNA, 23312 bp, synthetic construct
  misc_feature 1..23312: note = Synthetic
  variation 15507..18271: note = note, n is a, c, g, or t
  source 1..23312: mol_type = other DNA
gcgccgcctgcagctgatcaatcagctgctgtcgcgcgggtacacgctcgccaacatccaggagctggtcgagggtctggagaaaggccggcagttgcaggacatcctgggtctggaacgtgccatttccagtccctggtcggccgagcagccgcgtcagtattcgctgccggagctcttgagcctgttcggcatcagcgcctttgatcctgccgtgctgggcaaggtcctgagcctgggcctgctggtgccggagggcctgggctttcgcgcaccgaatcccaagatcctgcaggccggtgccgagctggcgcgcgccggcatgccgctgaacgacatgctcaccatcgtcgaaagcctgcgcgccaacgtggagcgcgtggccgatgaaatggtgcagctgatcgcgcgcatcctggaccgctacaacggcggcctgccgccgccggaagacgtgccgcgtctggccgagctgatctggcgcctgcgtccgctggccaacatggcggtggacgcggaagtctcgcgcgcgctggagaacagcgccaacaaattcctcggcgagcgcgtggcgcagctgctggaacacatgctgcccgcagcgccacgcccgccttcagagccactctgatcgccgcacagccgcgaccgattcaggtcttgtcgccggactccggctgccccttgcccgcaaagggataggcgccgccgcccttgccccgcggcgggatgtagagcgacagcagcatggtcaccaccaggatcgccgcagtgaccgacagcgaccacagcaccggaatcttgtagaggtcgatgatcagcatcttgatgccgatgaaggccagcaccacggcaagaccgtagctgagcaggtggaagcgctcgtgcacgccggcaagcaggaagtacatggcgcgcagacccaggatcgcgaacacattcgaggtgagcacgatgaacgggtcggtggtaatggcgaagatcgccggaatggaatccaccgcaaacaccaggtccacgatgccgatcagcagcaccacgatcgccagcggcgtggccatgcgcaggccctgcgccacgatgatgaacttctcgccgtcgtagtccggcgcgatacggatcctgcgacgcagccacttaagcgcgggattggcctccagatcaggctcctgaccggcggcccaccacatcttgatgccggtgaacagcaggaaggcgccgaacacatagagaatccagtggaactgcgcgatcagccaggcacccaccagaatcatcaccgcacgcagcagcagggcaccgagcacgccaatcatcagcacgcgcttctggaactccggcggcaccgcaaagtaagtgaagatcatcaggaacacgaagacgttgtccaccgccaaggctttttcgatcagatagccggtgatgaattccacggccttggcattggccaggctgcgcgccgcggcatcgccgtccaggccccccagcgaccaccacagccaggccacgaacacgaaggacactgccacccaaatcagcgaccagatgccggcctcgcgcatcgacacccgatgcgcgccctgacgcgacagggcgaagaaatccacggccagggccagcagtacaaacaggccgaacaaggcccacatggtgggggaaccaatcgtcgtcatcgtggcaaactcagttcttcaagaaatctcgcccctgcgggcatcacgggaaacgggcaggctgctgcgtcatgctgcagcggcctgcccttggctgagaggcatggcaacccaagcggctcagatcttggtggaaatctgcagctgcagcgcatggttctgtgtatccacgctgcggcccagcaccagctgattcaggtaaccggcctccacatccagcttcggactgaaacgccagcccagcccggcatagaggcggttctgatcgaaaagtttcccgttcaggcgctggcgatggctgagatggaagaacacctcgtcctgcaggaacgcaaaggcaccccgctccagcggcttgtcgcggtcctgcagcggcatcgtcacgcgaccctgcaggcgcaggcggtcggaatacgtatccggcgctccggcgcgctcgatgaagcgctgctccagtcgcaggcgctcgctgaaggtgcagccaccgatccgctggctggcaatcagctgctgccagctgcgatgctcggtgagcgtggatgaaccgggccggtaggtatcgatgtaggcaaagcccgccgccatgcgcagctgcgggttgagggcgtagctcaagccggcccggacgatgaaattgcgcaggtcttcggcgtcatcattgctgcgcagctgcacatcactgaccagcgaccagtcgcgcgacagcgccgtggtgttggaccatgaggtccataatgtctgggtgtggtcggcatccgcccaggctgctcccgggcctgcgcccaggagcagcactgccagaaccttgctgaaaccccgcatcagccctgctccttgtcgtcaggtgccgccttgaaatgcacctcgaagtgctcgatgtgatcgacggtgaagccgtcgtccttagggtgctccacatactggtgtgtcagctcgcaatcaccggtcggctgcaccttgtgatgcttgaacaaccaccagccgcgctcctcgacggtggcgcagaccacgcgctgctgcggcgcctcgaacaccacctcggcgcgctcgctgtcgtagcgaagacccggcaccggcacgcgatggtgctcggtcatttcgctggtcggatagaacagatcaacttccacccaggcgcgccccagctccgggttgatcgcaaagcgcttggattcgctcggctggaagccgctggcgggcgccttgaagatgcgctgctcggattggttggcctgcacctgggtgaggctcgtactcaggcccagcgccacgccaaggccaagagccaccgcgctcagactggatttcatgcttgttactccggtgttcaaggtagggatctgcggtgccgctggcgcaggtgcccgccgcgaggcgggcacctgcgctggcgcgcgatcagcgcgtcacgggcagagacgagtggtgcagcacgatgcgcagattgccctggtcatcgcgcatgtagccccaggtcttgtcgaccgtggtgaccttgccggccttgtcggtgaggatcacattgcccatcgacagcgcggtgtcaccgtgcagctggatggcggcgttgcggatttccactgagcgccagcccttcagcgcgaagccctggtcatcgggataggccttgtcatcgcccacgaagtaggcgagcgcaccttcacgcgtggtacggaaggtctgcggcgcaaccgtcagggtcggcttgaacagcacggggccgtactgatagccgtaggcactgtcgatcacgctgctggcggtggccttggccttggcgatgccgccggcctcatagtccttggagatctgcaccagcgcttcgccccaggcgcgctgcgcggccagcacctgcgcctcggtgatgttctgactggcgatcgccgaaggcggtaccacctgcttgacggcgctgctctgggcgagcgcggcaccgcctgcgcccaggccgccggccagggccaggctcagggcgaggatacggaagttcatgggcttgttcatggcgactctcgatggctaggtccgacattggactgtggccagtgtcggcgcggcgaggcccgccgccatcggtcatccggcagagcatgcgatctgccgactggcctatgattgacggatgtcgtttgcgcatccttactgcacgccatgagcaagatcccctcagccgaaacaccggacagcgagagcacccggctcaccgcgcgggcgctgcgcgggcgcatgcgcagcgtcgagcacgaagccagccgcctgcacctgctggagtcctgcgcacagacgctggccgaggacagcagcttcaaatcggcgctgggctcggtgctggccctgagcctgcggcatctgggcgccgacaccggcctgctgctgtggcaggacggcggtgcgctgaccgtgcaggccgcgcagggcgatgccctgccggtgggcgcgcgcattccagtcggcggggtgctggcggccgttctgcggccaccgctgcaagccagcctgcgcaagcacatcgaaagccgcctgcggctcggccgtgattccgaggtggcctgggagctgctgctgccgctgcgcctgagtggcaagggtctgggcgtgctcgccctgatgagccggaacggacggctgatgccctccgccgaggatctgcacaccctgctggcggtggccacgctgctggccggcgcgctggccgccagcatcgccagaccgcgtgcgcagaagcgtgaagcggctcactcgctgtcgcggctgacgccgcgcgagcagcaggtgctggccctgctgccgcagggcctgagcaatagcgagatcgccgcgcagctgggcatcagcaccggcacggccaagattcacgtcgaacggatcctgcacaagctgggtctgaaagaccgcacacaggcggcggttcgcgccacggaatggggacatcgcacatgagcgcacgatggtggcgctggcaggactggtcattgggcgccaagagcgcagcggcagtggcggtgccactggcctcgctgctggcggcgctgtcgttcaactaccgcctgcagcaggatctcaacgccgccgacgccgaggtgcggcgggcgctggccatccaggccgatatccagaccctgcacacccagctggcggaggcggccaccggcgtgcgcggttacctgctcaccggccgcgacgactttctcactccttatctgcgcgcccgcgacgctctgccgggcacgctggccgagcttcgccgcaacatcagcgatccgcaggtcatggcgcatctggagagcgccagcgcgctgctggaacgcaagcagcagagcctggaggaactgcgcctgcagggccggcagctggcaccggccgagctgcaggcgcatctgatccgcagcaagcaggtgctggatgcgctgcgcggcgaggtgcgcgccatgcagtcgcgcgaaaccgatctggtggcggagtactcggacaaggcccggcgcgcgctgcatcgcaatttctggatggacatcgtcagcagcatcctggtgctggccagcggcgtcggcgcctttctgctgctgtacagcggcgtggtgcggcgcgtgcagcgtctggcactcaatgccgagcgtctggcgcagggcgcaccgctggcagccctgcccgccggacgtgacgagctggggcagctcgccgaccgtctgcacaacgccagcctgctgctggccaagcgcgccgccgaggcgcagtcagccaaccaggccaagacccagtttctctcacgcatcagccacgagctgcgcacgccgctcaatgccatcctgggttttgcgcagctgctggagagcgatctgcaaggcagcgcacaagcacctcaggtcgagcagattctgctggccgggcgccatctgctggcgctgatcgacgaggtgctggacatcgcccgcatcgaatccggcagcctcaagctcaagctggaggcccagccgctgcagccgctgattcaggaggcctgcgatctggtggcgccgctggccacgcgccaccgcatccgcctgcagcacagcggcgagcacgagaatctcgccgccctcgccgaccgccagcgcctgctgcaggtactgatcaatctgctttccaatgccatcaagtacaaccgcccgcagggcgaggtgcgcatcagcctgcaggaaagcgaaggcaaggtgcgcatcgccgtgcaggacagcggcgtgggcattcccgccgcgcagattccgcgtctgttcacgcccttcgatcgtctgggtgcggaaagcggcacggtggaaggcacgggcctgggcctggcagtgtcccggcagctgatgctgcacatgggcggcgacatcgaagtgagcagcaagccgggccagggcagtgtcttcgtcctgcggctggacatggcgcaggcacaggtgaacgagaccgccgccccggcgctcgcgccggctgccggtctcacgctcagccagccccgcgccatgcagtacgtgctggtgatcgaggacaatgcctcgaatctggccttgctgcaggcggtgattgcacgccgcgccggctggcatctggtggcggcgcgcgatggcgccgaaggcctgcgtcaggcgcgcgccctgcggccggcactgattctgctcgatctgcatctgcccctcatgagcggtgaggcggtgctggccgagttgcgcggcgatccgagctttgcgcagacacccatcgtgatcatcagcgccgacgccctgccggccaccatcgagcgcctgcgcgcggccggcgccagcgactatctcaccaaaccgctggcagtatcgcgcgtgctgactctgctggaccggagcggcgcatgaacgacgatgagatcctgagctcgcgcatcctgatcgtcgacgatctgcccaccaatctgcgcctgctcgaagacctgctggaacgcgagggcttccgcaacgtggtcagcaccaccgaggccgaacaggcgctggacctgttcgccgccttcgatcccgacttggtgctgctggacctgatgatgccgggcctgagcggctatgcagtgctggaaaagctggaacgccagcgtgcacccgacgagttccggccggtgctggtgctcactgcggatgccaccaccgctgccaagcgccgcgcgctgtcgctgggcgccaaggactttctcaccaagcccttcgaccatatcgaggcgatgctgcgggtctggaaccttctggagacgcgcctgctgcacaagcgtctgcgcgccttggtgccggaggcggcgcggttgccacgcggtccgcaccagttcaagtagcgcaggacggccagcggcggcgccgttttgcggcgggcggcgatagccgtttctgagcaggcgcatcaccctgttacgatgccgacctcatgtccgcgcgcctgcgtcatcgtctgcattgcctgctgctggccattgccctgctgggcgtggtgccgcgcacgctgctgccgctggccatggccgcgccgcagggcgcgcacgcgctctgccatgccggcggcgaaggaccggatcatccggccagccactgctgctgcgaagatggctgctgcagcgtgctcgacggcttcaacggcctgcccgcctcagccgctgccgcgcccctggcgctcacgcgcggcgtggacctcatctgcagcgccgggcagcacgccgccgtcgcaccctggcgctatcgcgaaccaccgggacaagcgccgccgcacacgctcttcgtctaaaagcctgatctccgctgcagcccgaacggcgctgcggcccatcattttttgcaggacacgaagagcatgaatcactttcggtttaccgccgcggcgctggccgccggcctgagcgcgtttgccggcagcagcctggcctgttccagctgcggctgttccctgggcagcgaatgggccgacaacgcctattccaccaaccgcggtctgcgcctggatctgcgttatgactttgtcgatcagaaccagctgcgctacggcagccaccgcgtcaggctgggcagcctgagctttcccaacgacgatgaaatccagctcggcacgctgacgcgcttctacacgctcagcgccgactacgctttcaacggtgattggggtctgagcgtgcaggcaccgtatctgcggcgcgatcatcagaccattggtgaaggcgacaccgagacctccacctcagccacgcgtggcatcggcgatgtgcgcgtgatcggccgctaccagggtttctttgcggatcgcagctggggcctgcagctgggcctgaagctgcccaccggcaagaccgatgagcacttccgcagcggccctgcgggtgaagacggcgagatcatcgaccgtggcctgcagagcggcacgggcaccacagatctgatcgccggcgtctatcactacgcggcgctgtcgcgtgactgggaccagttccagcaactgcagatcaagcaggctctgaaccagcatcaggactttcgtcccagcacgcagctcatcggcaatgcgggcctgcgctatctgggcttcggtgcgctggtgccgcagatccagctcaacgcccgcatcgaaggtcgcgagaccggcgcgcaggccgattacgccaacagcggcagtcaggtcctgaatctgagtcccggccttgcggccacgctgggcagccgcctgtcactcgcggcgttcgtgcagctgccggtgtatcagcactacacgggttatcagctggcaccgcactatctcagcagcgtgaatctgggctatcgcttctgagcgtttcagcgcgtgggcgcggccgttgcctgcagcagcggccgcagctcctgctccaggctcggcagatcccagagcttgcgctgcccggcaccgccgtcgaaacgcagcacgccgtcgcggtcgatcacgaagctgatcggcaatcgccagatgcggccgtaacccggcgcctgcaactgcgcgatcagcgcggtgggaaaggaatactgcgcggcgatatggcggaccttgtcgagctgctcggggtcatcggtattgatggccagcacgctgaggccttcatcgcgatgcgcccggtaataggcttcgaacgccggcaactcttcctgacagggcgcgcaccagctcgcccagaaattcacgatcaccagctcaccgcgatgcgccgccagagagtagctgctgccatcgagcgtggtcgcatgcagcgccggtgccgcgcgattttccagaccgcgcgcctgcgcggcgccgcagagcagaagcagcaagagcaaggtgcagcagcgcatgcgcgcgaggcctgatccgaatcgggatgcggattttgacagaagcggcgacatgaaacgaaaagcccccgggccacggtcgctgcacggccgggcacaggggctttattcccgccgcaggactcaggtcttgggctgcggcacgatgcgcagataaggcttgagcgtcttccagccctgcgggaacagcttcttcgcctcctcgtctttcaaggccggcacgatgatcacgtcctcgccctgcttccagttcaccggcgtggccaccttgtgccggtcggtgagctgcagcgaatcgatcacgcgcaggatttcatcgaagttgcggccggtggaagccggataggtgatgatcaggcgcaccttcttgttcgggtcgatcaccaccacgctgcgcacggtgaaggtatcgctggcattgggatggatgaagtcatacagcagcgagaccttgcgctccggatcggcgatcagcgggaagttcagcgccgtgccctgcgtctcggcgatgtccttgctccagccgtgatgatcctccagcttgtccaccgacaggccgatgaccttcacgccgcgcttctcaaactccggcttgagcttggcggtatagcccagctcggtggtgcacaccggcgtgtagttcttgggatgcgagaacagcacgccccaggaattgcccagccactggtgaaaggcaatggggccttcggtggtctgtgcctcgaagtcgggggcgatgtcgcccagtctgatgctcatgtcgtcttctccggtgtgcggggagctcatgatgcgcccaccaatgggaagttcaagagctgaggactgaatgctctatcctcagaactgcgaagcagattgtcatcagttgatgcctacaggcaaaacgaaacgggcctccgaagaggccctgtgtatcggtagcatcgagaccgaagtctctaaagctttgttgccgatagtccccaccatcggaaagcctgatacggttaggagggtacagaaaaatatgggagattggcaatggcttacagattgggcctggatgtaggcacggcatcttgtgggctggtggcttggcatctggatgaaaccggacatccggtatccctgccctattattcgctcgacatctggcaggagccactgctaccggccaaatcgggaggagtgggcgagcccaagaaggcagcgcggcgcgcagcccgcatgatgcgtcgtggcatctgtcgacgggctcgccggctgcgccggatcgcctatcttgctgagcggctcggactggaccgtcatcagatcgccagcgattccggccagcagattcatgccctgcgtgcgcgtgccgcggaggaacggatcgaactctctcaactcatcccggtgctgctgcacctggccaagaaccggggtccgtctggggactgggtctactcggaaccggagcgtaaatccaccaaggaaaaaaagagagacgctgacgatgagacgaggccgacagaaggacccgatgagaaagccattgaaatgggcaagatcgttgggggcgtccgccacctcgaagcactgatggccgaggcagccctcgaactgggcaaagactccataaccctcggacagtacctgaatcttcgcagacaaaagaaaatcagcaccactcttggccccgctggcctgtacccaagtaggcggatggtcgaacaggaattcgcgcgcatctgggacacgcagtccgctttctacgctgttatgcgcgatgcagacacctgcgaacagttccgcgcggccatcttcgatcagcggccgctcaagtcgccggcgccgatggtcggtcgctgcccgctggaaccgacgctgccacggtcacccgccgcgcagatggctgctcaagctttccgtatcgagaaacagattgccgatttgcgctggggcatgggaagacgcgccgaacaactaaattcacagcagcgcgaaacggtgcgaaccctgcttcataaccccgaaatgctgacggccaagggcgaattgagcttcaagaagcttctcgatgaactccgggcgcgcggctttcccggaccgggaacgcgtggactgaacatggatcgcgccagccgcgacagcctcaaaggcaacacgacgctggtcgcctttcaccggctcggattgttgagcgcatggcaagcattggacgacaagacccaggttcagatcatcaactttcttgccgacctaggctcgccagaggcactggacggtagaaactggcatctcaatttcaagaccaccagcggcgaaaaaagaaagttcagcgaggccctggtcacgttcatcaactgcatgcgcgacaaatcgaacttcgaccgcctgtcaaaaatgggttttgaaagcggccgcatgagctactccataaaagcgctcggcaaactcaatgcgttaatgcaagaaggctgggatgagcgcaccgccatcgaccaggcctatcccgaataccacaagcccagggccgcaagcctggaactgcctttgccaccggagactggaaacacggtggtcgatgttgccatgcgtcaggtctaccgggccgttcgcaaagcaatggaagcacttggaggcccacctacggaagtgatcgtcgaactgtcacgcgatatggcgctgggcgtcggcaagcgtaacgagatcgaaagcaagatcgataagaaccggaaggcgcggcttcaggcaaaaaatgcgctcgaaacccaaggccaggaaagcaccgagcgaaacatccagcgctatcttctttgggaaagccaaggtcactactgcccttactgcgctgatcgcatctcgattggtgacgctctgagcgcagccactgagcgcgaacatattcttccgcgcagcctcacgcgcgttggcggcaagcgcaatcaattggttctggcgcatcgcgcctgcaatcagcagaaggagaatcgcacgccctggcaggctttcggcgctgatgagaaccgctggcaacgcgtcaagctctgcgccgaaatgctgacaaaaagcaaacaatggggaaaagccaagctccttctgaaagaagattgggaagaggaagtcctggacgatgaagccatccagggcttcagcgaccgtcagtttcacgaatccagttggatcgccaagctcacggctcagtggctgggccgcgtatgtccgcccactgagcgcaacggtcagcccgtgatggtatcgaggggcgaactgaccgctcacctgcgtcgtatctggaagctcaataccgtgattccggaagtccggttcgagaccggattgccagttctggacgaagaaggcaaggccatcacccgcgtggaattcgaccgacatcgtctgtggtgggatggacaggaacgacatgccggcgccatccccgccgaccgccgccccgacaagcgcatcgatcaccgtcaccatatcgtggatgccttggtcatttcgctcacctcacgcagcctcttcgtgcgcatggcccagaattacaagctcgaacgcgaacgggagaaacgcggtgagcgggctcggatgagtttgcacgaggcgccgccgattccactcatccgtgatctggcactggagattgttcgcaacgtcgaaatccgacacaagcgggatcatcaccccgacggggctttattcgatcagacggcctatgggcgcagccggaaaccggatgaaggcgggagccatcttttgacttcgagcaagcggctggcatcgctgattgaccccgccaatgccggcaaaacccgtggtcgcctggagaccatcgagagcgagaagacccgcgagattgttctttccgcttttgaacagcgcttgagagccggcaaatctctcaagcagattttcgacgaacccgttgtccacccacagtacggaacccatatcagtcgtgtgcgcctacttcgagagtcggagcataccgccgccgtagttcgacacaagaaccggcacggtcagatgcttgaaaagcgctacacccactcgggcaatgcgtaccttgaaattatgatcgaagacgggaaactcgtcggggcgcctcgccttgtgaatattcaagaggccatgctggaaaaaagttcacggccgcctcatggcgttcggcgattctggaaaggcgacactattcaagacgcgcgagatggcaagagctttgtcatacgtcaaataaaaagtgaaggtggcggagctctgatcggggccttgaattccgaagcaagggaagtgcgtgaccttacagctgcctccggctatcggatgttcaaaggaaaaagtttagccaagctaacggtgatttagcaggccatgtctgagcaccgtatcctgctcatcgagaatccggcgcgcctgagtgtcgatctcggccgcatccgcatctgtcgtgagaacgaaaaggacattttcgtggcgccgggcgacatcgcggtaatggtgttgcatcaccacaccgttgaacttaccgcgcagactctgcaacttctggtagagaaccgggccattgtgctgctcaccgacagcaagcaccatcctagcggctggctgacgcccatgtacggactgcctcaagccacactgcgcttgcggcagcaattggagttggcaacggatacgcgcaagcgcctctggcaatcgatcatccagtcgcgtatcagaactgaagccaataccctgcgcgaattgtcgctcaatggcgcgctgcgtcttgagcggatggcaacggaagtgatgccaggagacgaatcacgccacgagggccaggcggccaagcactactgggactgcttgttcggcaagggcttcaagcgtgacaagcagggcgccgaggatctgaccaatgcagcgctgaactttggctacgccgtactcagatcgctggtggcacgggaactcgcggtggcgagcctgactccgatgctgggcatcgggcacagcagtggcgataacagttacaaccttgccgacgacttcatagaaccctatcggcatcttgtcgagcgcctggtcttcgagcaacacgattcgtttggtgaattcgacgccaaagcccggctcgctgtactgggcctcatcaagaagacggtgcggctgggcaatatggagtttcgcctgcctgcggcggtacgcgagactgtggccagttacctgcggattctggaaaccggtcgcggcggactcgccctgccatgctgaagcaaaggtagagcattgcggaaaatcccaatttgggactatgatccgcgatgcgggtcattgccctttcgactctgaaggacttttggactcggcacccgcagttccgcgaggccgagaggccgacgctggcttggtatcgcgatgtcgcacacgccgactgggcggcgcctgcggacgtcaaaagacaattccggaacgccagcgtcttgcgtaacggacgcgtggtattcaacatcggcggcaacaagtacagaatcgtggcttggatcaactacccataccgtattgtttacatccgcttcattggcacgcacgagcagtacgatgccattgacgcccagtcgatctgaagcgagtttcaatgaacatcaaacctatcaagacccgcaaggactatcgcgaaacactcaaggaaatcgaatccctcatgaccgcccgcgcggacagcgaggaaggtgatcggctggatgttctgacgacgctgatagaagcctatgagcgcgttcactttccgatggacctgccggatgcggtggatgcaatccagttctgcatggagcagcgtggcttgtccgtacaggacttggagcccgtcatcggacggcgcaatcgtgtgtatgaagttctcaatcgccgacggccgttgaccttgcgcatgatcgaaggcctacacaaaactttcggcatcccagccgaaagcctgctacggcagaacccactcaaacccggccgcaaagcggcctgatgcatcccgccgacatggccatcaacggctggcgcgtcatgtggctgctagcgagcttcgactgtcccgtcggaaccaaggaagagcggcacgactacaccgtgtttcgccgcaccttgctgcaggagaacttcacgcagcaccagttctcggtttacctgaagcattttccgacgctggccactgcgcaggcccagatcgagcgactgcgtccgagcgttccggaagacgcgcatgtggcattcttctttttcaccgacaagcagtacgccatgacccgcgaattcatcggtcccaggcgcagtaaaatccggccagatgcgcccgaacagttgctgctcatctgaaaagaaagcccgcaagtcagggacttgcgggcgaccagaccctatcaggctttccgatggtggggtatcggaacacaggcaccgttgttgttcttgagcttgccgaccctatcaggctttccgatggtggggtatcggaactgcccagcgcttgccgacgatatgcacagcgaccctatcaggctttccgatggtggggtatcggaacnnnnnnnnnnnnnnnnnnnnnnnnnnnnnnnnnnnnnnnnnnnnnnnnnnnnnnnnnnnnnnnnnnnnnnnnnnnnnnnnnnnnnnnnnnnnnnnnnnnnnnnnnnnnnnnnnnnnnnnnnnnnnnnnnnnnnnnnnnnnnnnnnnnnnnnnnnnnnnnnnnnnnnnnnnnnnnnnnnnnnnnnnnnnnnnnnnnnnnnnnnnnnnnnnnnnnnnnnnnnnnnnnnnnnnnnnnnnnnnnnnnnnnnnnnnnnnnnnnnnnnnnnnnnnnnnnnnnnnnnnnnnnnnnnnnnnnnnnnnnnnnnnnnnnnnnnnnnnnnnnnnnnnnnnnnnnnnnnnnnnnnnnnnnnnnnnnnnnnnnnnnnnnnnnnnnnnnnnnnnnnnnnnnnnnnnnnnnnnnnnnnnnnnnnnnnnnnnnnnnnnnnnnnnnnnnnnnnnnnnnnnnnnnnnnnnnnnnnnnnnnnnnnnnnnnnnnnnnnnnnnnnnnnnnnnnnnnnnnnnnnnnnnnnnnnnnnnnnnnnnnnnnnnnnnnnnnnnnnnnnnnnnnnnnnnnnnnnnnnnnnnnnnnnnnnnnnnnnnnnnnnnnnnnnnnnnnnnnnnnnnnnnnnnnnnnnnnnnnnnnnnnnnnnnnnnnnnnnnnnnnnnnnnnnnnnnnnnnnnnnnnnnnnnnnnnnnnnnnnnnnnnnnnnnnnnnnnnnnnnnnnnnnnnnnnnnnnnnnnnnnnnnnnnnnnnnnnnnnnnnnnnnnnnnnnnnnnnnnnnnnnnnnnnnnnnnnnnnnnnnnnnnnnnnnnnnnnnnnnnnnnnnnnnnnnnnnnnnnnnnnnnnnnnnnnnnnnnnnnnnnnnnnnnnnnnnnnnnnnnnnnnnnnnnnnnnnnnnnnnnnnnnnnnnnnnnnnnnnnnnnnnnnnnnnnnnnnnnnnnnnnnnnnnnnnnnnnnnnnnnnnnnnnnnnnnnnnnnnnnnnnnnnnnnnnnnnnnnnnnnnnnnnnnnnnnnnnnnnnnnnnnnnnnnnnnnnnnnnnnnnnnnnnnnnnnnnnnnnnnnnnnnnnnnnnnnnnnnnnnnnnnnnnnnnnnnnnnnnnnnnnnnnnnnnnnnnnnnnnnnnnnnnnnnnnnnnnnnnnnnnnnnnnnnnnnnnnnnnnnnnnnnnnnnnnnnnnnnnnnnnnnnnnnnnnnnnnnnnnnnnnnnnnnnnnnnnnnnnnnnnnnnnnnnnnnnnnnnnnnnnnnnnnnnnnnnnnnnnnnnnnnnnnnnnnnnnnnnnnnnnnnnnnnnnnnnnnnnnnnnnnnnnnnnnnnnnnnnnnnnnnnnnnnnnnnnnnnnnnnnnnnnnnnnnnnnnnnnnnnnnnnnnnnnnnnnnnnnnnnnnnnnnnnnnnnnnnnnnnnnnnnnnnnnnnnnnnnnnnnnnnnnnnnnnnnnnnnnnnnnnnnnnnnnnnnnnnnnnnnnnnnnnnnnnnnnnnnnnnnnnnnnnnnnnnnnnnnnnnnnnnnnnnnnnnnnnnnnnnnnnnnnnnnnnnnnnnnnnnnnnnnnnnnnnnnnnnnnnnnnnnnnnnnnnnnnnnnnnnnnnnnnnnnnnnnnnnnnnnnnnnnnnnnnnnnnnnnnnnnnnnnnnnnnnnnnnnnnnnnnnnnnnnnnnnnnnnnnnnnnnnnnnnnnnnnnnnnnnnnnnnnnnnnnnnnnnnnnnnnnnnnnnnnnnnnnnnnnnnnnnnnnnnnnnnnnnnnnnnnnnnnnnnnnnnnnnnnnnnnnnnnnnnnnnnnnnnnnnnnnnnnnnnnnnnnnnnnnnnnnnnnnnnnnnnnnnnnnnnnnnnnnnnnnnnnnnnnnnnnnnnnnnnnnnnnnnnnnnnnnnnnnnnnnnnnnnnnnnnnnnnnnnnnnnnnnnnnnnnnnnnnnnnnnnnnnnnnnnnnnnnnnnnnnnnnnnnnnnnnnnnnnnnnnnnnnnnnnnnnnnnnnnnnnnnnnnnnnnnnnnnnnnnnnnnnnnnnnnnnnnnnnnnnnnnnnnnnnnnnnnnnnnnnnnnnnnnnnnnnnnnnnnnnnnnnnnnnnnnnnnnnnnnnnnnnnnnnnnnnnnnnnnnnnnnnnnnnnnnnnnnnnnnnnnnnnnnnnnnnnnnnnnnnnnnnnnnnnnnnnnnnnnnnnnnnnnnnnnnnnnnnnnnnnnnnnnnnnnnnnnnnnnnnnnnnnnnnnnnnnnnnnnnnnnnnnnnnnnnnnnnnnnnnnnnnnnnnnnnnnnnnnnnnnnnnnnnnnnnnnnnnnnnnnnnnnnnnnnnnnnnnnnnnnnnnnnnnnnnnnnnnnnnnnnnnnnnnnnnnnnnnnnnnnnnnnnnnnnnnnnnnnnnnnnnnnnnnnnnnnnnnnnnnnnnnnnnnnnnnnnnnnnnnnnnnnnnnnnnnnnnnnnnnnnnnnnnnnnnnnnnnnnnnnnnnnnnnnnnnnnnnnnnnnnnnnnnnnnnnnnnnnnnnnnnnnnnnnnnnnnnnnnnnnnnnnnnnnnnnnnnnnnnnnnnnnnnnnnnnnnnnnnnnnnnnnnnnnnnnnnnnnnnnnnnnnnnnnnnnnnnnnnnnnnnnnnnnnnnnnnnnnnnnnnnnnnnnnnnnnnnnnnnnnnnnnnnnnnnnnnnnnnnnnnnnnnnnnnnnnnnnnnnnnnnnnnnnnnnnnnnnnnnnnnnnnnnnnnnnnnnnnnnnnnnnnnnnnnnnnnnnnnnnnnnnnnnnnnnnnnnnnnnnnnnnnnnnnnnnnnnnnnnnnnnnnnnnnnnnnnnnnnnnnnnnnnnnnnnnnnnnngaccctatcaggctttccgatggtggggtatcggagcagtgcaatccaaacaatccttttaatacttaccagacgccggccccgtatggctgaggaagcgatacgacagccccaccgccgccaccgccaggccggcaatgaagccgctccacacgcccagcggccccagcggcgtgcgaaatgacagccacagcgccagcggcatggccagcacccagtaggcggcgacggtgatgagcatgggcaggcgcgtgtccttgatgccgcgcagcgcgccgttggcggtggcctggatgcaatcaaagatctggaacaccgccgcgaacatcagaaagcgcaccgccagctgcgccacggcctgttgatcggtgtaagccgcgacgatccactgcggcgcgcccagcatcaggctcgccgaacacagcgcaaagccggcgccgagcagaatgcccacgcgcccgcgcagcgccacgccggcctgatcgcccgcgcccgccgcatgacccacgcgcacagtggcggccatgccgatcgacatcggcaccatgaaggccagcgaggcgaaattgatggccacctgatgcgcggccatggcctgcgcgccgaagcgcgccacgatcaaggcaccgatctggaacaggctggcctcggcggtgaggatcgcagccgtggcgccgccgacgcgcagcagctcgcgcgccacggagagcatcggcagcgcgcgcgcctgcagcagatgcagcgcacgcaacggcgcgtgatgacggtacagccacagatacagcagcaccatcagataaccggagatggacgtggcataaccggtgcccgccggccccagcgccggcagaccgaagcggccgtacatcagcacataagccagcaccccgttgaacagcagggtgatcgccgcgacgatcagcgccacgcgcgtgaggccatgcgcatccgccgcattgcgcagggtgaagctcaggcagaacggcaccgccgcccaggcgatggcgcgcagatagccgtcggcgtaggtgtaggtctgcgcatccagacccagcagatccaggatcggcgcgcgcgtgccgtagatgaaggctgcccagagcaggcccgcgacgatggccagcagcagcaccgcgcgcagccgcgcaccgatggcctcggcggcggccccgcgcccgatggcctgcgccaccatcggcgacaccgccatgaacaaacccatgaagaacacgaagctgaggaagaagatgttgctgcccacggccaccgccgccagcgcctgctcgcccagatggccggccagcatggtgtccacggtgcccatgccgatgaaggacagctgcgcgatcacgatgggccaggccaggcgccagtaggcgcgcagctcggtgcgcagcagcggcagggacggcagattcagcatgagtcgtggtgcgtgttcaccgcagcgggcgcgcggggccgcgtagtctgcgcagttcgtcggggcaatgccagcggtggagttcctgagctgaggtttgtggtcagggcccgccccctctcccctgcccctctcccgcgaggggagaggggaaaagttttgtgacgcatcgagggttcggcactcggattgcggggtccggggttctaagctcagagctcagagctcagagctcagagctcgaagctcgaagctcgaagctcgaagctcgaagctcgaagctcgaagctcgaagctcgaacgagtctattcccctctccccttgcgggagaggggtcaggggagagggggaagccgctcccgcaacgcctgctcaatcgcctccagcacttgtggcgtacgcagcagaatttcgtcgttccagaagcgcagcacggtgaaaccctgtgccttcagccaggcatcgcggcgcgcatcgctggcagattcgcaatgctgtccgccatcggcctccacgatgacgcgcgccgcaaagtgcacgaagtccacgacataaggcccgatgggctgctgacgccgaaacttctgctcggcaaaacgatgcgcgcgcagatgaaaccacagatgacattcggcatcgctcatccggcgccgcaaggccttggcgaaatcgcgttgctgcatgcgccgcagtacacgcgcatctgcgccacgcatccgcgccggccatcacaaagtcagtccggcaccgcactcaccagttgtaccgcaggctcgccgtgacgctgcgcagcggggtctgcaccgcgccataggtattggcgaacaccgcgtggtcgaaaaccagatccagcgcgcgcttgtcgctgagattgttgccggcgagctgcagctgccagtgctcgtccgcagtctgcaggcccagatgcgcgccccacaggccgtagccgcgctggtggctgtgatcgtcgaggtcgatggccgagtactggccgctgcgatagctgtagtccacacccagactcgccgccagcgtctcgcccagcgggaacttcagattgggtgagagcgaggccgtgagtcgcggggcgtgggccagggtcttgccgctcaagtcctgctggccgtcgctgtcgtaggccggcgccggtgcctcgtggtagctcgtgtattccgccgtgccataggccatcgagctggccacgctcagccagggccagggcgcctgccagaggatttcagtctccacgccctgcagccgcgcctcggcggcattgctcaccgcgaactcggtgccggtcaggtccaccacctgcagattgcggatgtcggtgcgatacagggtgagattgaacatcaggctgcgcgcgaacagctggctcttgaagccggtttcccaggcaccggcgcgctcgggttcaaactccagattgtggtcgttgtcggccgtggcattgaagccgccgcccttgaagccgcgcgtgtaggtgagaaagcccatcaacgcgggcgtgaaacggtattgcaggccggccttgggcgagaagtcgttttcacggcgctccagatgcgcggcaaacggcgtggcgccgaccacattggagatcaggccgatgccggtttgcgtgacgtcgaagtcggcctgcttgcggtcctggcccaggcgcaggccgaaaatcgcgctgagctgctcaccgagtttccagctcatctgcccgaaagccgcatagctctgcgcctgctgcgcaaagccgcgccgcaggctgtcattgagcggcaggctgatgttgggcagcagcgccagcagggcattgagctgcgcgccgggcaggcccagggcctccaggccggcactgctgagcgcgaagtccaccaggttgtcgccgcccagggtgtcgaagtggctgcccagatccgagcggaagtagtacaggcccagggtccagtccacctcgccgccgaaacccagcagcgaatcgctgcggccgctgggccgcagctcgatggagttctggtggtagttcacgttgaacacggtgttgacgatgtcggaggccgtggtgtcgatgtcgtagaaggcatcgatcttgaacgcggcatggcccagcaccgtggtgagcttcacctcgtgcgcgcccagcgcttcacccagctcgtagtcgatcagggcgcgctgcagattggacgtgcgcttcacatagcccggcgtgttggcggtggtgtgggcgtccaggccattgtcttcggcgctggcatcgaagctctgcgcataggacagcgcctcgggcgtggcggcgtagagctgccagggcgagtagtccgcatgcgtgtgcgaatactggcccagcaggctgatgcgccagcgctcgcccggcgtggccagcagacgcaggcggccggcgccctgattgaagctgccctcccggcgatccagcgtggcgttctccacatcaccctgcttgttccaccaggtgccggcggcgcggccggacaaccagtccgtgagcgccagattcaccgcgctctccgcgcgcacctggcgcggatcgccgctggtcagcatcagataaccgctgtcctcgggcctggcctcctgcgtggcgaagttgatcacgccggccaccgtgttcttgccgaacagcgtgccctgcgagccgcgcagcacctcgatgcgctgcagatcgtagagaccatcgggcacgaattcgggccgcgccagggccagatcgtccatcaccaggcccacggaggactcgaagcccacgttgtcggtctccgtggaaaagccgcggatgccgatcaccggcgcctgcgggtcggtgtcgatctgcacattggcgacgaagttttccagcgcgccgacctcggaattgccggactcgcgcagggtgtcacccgagagcacccccaccgagaccggcacgtcctgcaggttctgcgccttcttctgggcggtgacgatgatttcggcgatctgcggcccgggcgcgtccgccgcggccggtggcggcgtggcgggcgcctccgccggcaggctgagcgtgggcggctccggctgcgccccggcgggcgcggcggcgaaaaggcaaagcagggcgagcgcgcccagcggcgcgcggacgacggcggtgtcggtcatgacggtgcaggattccccaatcccaggctgtgcggtgcaaagttcggcgcttatatagcaagaaccgccgcagggccgtatgacagcccgcgccccggggtaaaatgcgcggcttccgccgggcctgccatgaacatccattccgaccgcatcctcatcctcgacttcggttcccagtacacccagctgatcgcgcgccgcgtgcgcgagctgggcgtgtactgcgagctccacccctgggacatggccgacgaggcggtgcgcgccttcgcccccaagggcgtgattctgtccggcagcccggaatcggtgctggaagccggctcgccgcgcgcgccgcaggcggtctgggacttgcaggtgccggtgctgggcatctgctacggcatgcagaccatggccgcgcagttcggcggcaaggtgtcgccgggcaaggtgaaggaattcggttacgccgagatccgcgcgcgcggccattc

SEQ ID NO: 2994 - DNA, 23306 bp, synthetic construct
  misc_feature 1..23306: note = Synthetic
  source 1..23306: mol_type = other DNA
tcgaggaacgccgtgccttcctcggtcaggctcaggctgcgcgtcgtgcgcgtcagcaggcgtacgccgagccgggcttcgagcgcatcgatgcggcggccgatcatcgccggcgtcaggtccagcgcgcgcgccgcggcggagaggctgccgcgctgggcaacctgcacgaatgtctcgatttcccggagcggattcactctgttgatacaaaaagtaaaagatgatttgcagtgtagttcattcttctgccgcgtttcgaggcctatcatcgcgattcgtttcttggacccgaccggagcccccgatgagcctcaaactgcccgaaggcatgcagatcaacgcgccgctgcagccgcgcttcgacgaaatcctcacgccggacgcactggcgctggtcgccaggctgcaccgtgcgttcgagccgcgccgccaggaactgctgaaggcccgcgtcgaacgccagaagcgcatcgacgccggcgaactgccggacttcctgccggaaaccaaagcgatccgcgagggcgactggaaggtcgcgccgctgccgaaggcgctggaaaaccgtcgcgtcgaaatcaccggcccggtcgagcgcaagatgatcatcaacgcctacaactcgggcgctgattcctacatgacggacttcgaggattccaacagcccgaactggtcgaaccagatccagggccaggtgaacctgtacgacgcgatccgccgccagatcagcttcaccaacgagaagggcaaggagtacaagctcaacgacaagatcgcgaccctgcagatccgtccgcgcggctggcacctcgacgagaagcatgtgctggtcgacggcaagcgcgtgtccggcggcatcttcgacttcgcgctggtgttcttccacaacgccaaggagcagatcgcgcgcggcgccggcccgttctactacctgccgaagatggagagccatctggaagcgcgcctgtggaacgacatcttcgtgatggcgcaggagcacatcggtctgcccaagggcacgatcaaggcgacggtgctggtcgagaccattctcgcgacgttcgagatggaagaaatcctttacgaactgcgcgatcactcggcgggcctgaacgccgggcgttgggactacatcttctcgtgcatcaagaagttcaagcgcaacacggacttctgcctcgccaaccgcgcggcgatcacgatggaagtgccgttcatgcgcgcctacgcgctggcgctggtcaaggcctgccacaagcgtggcgcaccggcgatgggcggcatgagcgcgctgatcccgatcaagaacgacgaagcggccaacgaaaaggccatggccggcatccgcaacgacaaggcgcgcgacgcgcgtgacggcttcgacggcggctgggtcgcgcatccgggcctcgtgtcgctggcgcaggaagagttccagaaggtgctgggcgaccgcccgaaccagtgggacaagcagcgcgacgataccttcggcccgaaggactggatgaacttccagccggaacagccgatcaccgaaaccggcgtgcgcaacaacatcaacgtcggcatccactatctgggttcgtggctgtccggcaacggttgcgtgccgatccacaacctgatggaagacgccgccaccgctgagatcagccgctcgcagatctggcagtgggtcgtcagccccaagggcaagctcgacgacggccgcaaggtcgacgcggcgatggtgcgcgcgatcattccggaggaactggcgaaggtgaaggccaccgtcacggccggcggcgaagacaccgccacctacgaccaggccgcgaagatcttcgaggagatgtcgctgtccgacaacttccccgagttcctgacgctgccgctgtacgaagcaatggcgtgagaatcaccgcgatgtgaagaagccgcgcgaggcgactcgcgcggcttttttgttggcgatgagatcgcggcgccgcagcggtcgcgggcctggcccgcttccataagaaagcgccgactgcgcgcgcgagccgtatccgttcagaccggctgcagctgctcgcggaagcgcctggcgttctgcacgtagtgcagggcctgcattttcagcatcgccgcgctgctttcgtccagcgtgcgcacgaccttggccggtgagccgacgatcagcgaattgtccgggaattccttgccttcggtgatcagcgcgttggcgccgacgatgcagttgcggccgatcttcgcgcggttgagcacgaccgaaccgatgccgatcagcgtgttgtcgccgatctcgcagccgtgcagcatcaccatgtggccgatcgtgcagtcggcgccgatcgtcagcttgatgccggggtcggtgtgcagcaccgagccttcctggatgttggtgttggcaccgatcgtgatgtcgtcgttgtcgccgcgcagcacgcagttgaaccagatgccgacgccgggcgcgcagcgcaccgagccgatgacggtggcgttgggggcgacccagtgctcgccgtcgaactgcggaacgcggtcgccgaggcggtagatcatgcggaactctccggaaagggtggcgccattgtcgtcaatgcggcgtggcgcgtcgcgcttgccggcgatgccgggccggcgctagcctcgccggcaatgcccgatgtcacgatcctcaagcagggtgcgctgacggtggccgactatcgttgtcgggcgctgccgggcgagcgtgcctacgacgagcagcatctgcgtcattcgatctcctatgtgcgccgcggcagcttcggctgccgatcgcgcggccgggaatacgagctggtcgccggcgcgttcctgatcggtcatcccggcgacgaataccgttgcacgcacgaccatcatgtctgcggcgacgagtgcctgtcgtttcatttcgacgcgggactcgtcgagacgatcggcgatcgacggcagagttggcgggccggctggatgccgccggtaccggagttgatggtgctcggcgagctggcacaggcggcggccgacgggtgcagcgaggtcgcgctcgacgagctcggcctgctgctcgcggcgcgctttctcgcagtgcacgccggcaagggcaatcgcctgtcgtcgccgtcggctgtggatcgtcgccgcgccgtcgagaccgcgctgtggatcgacgcgcaggccgtgcaggacatcgaccttgcggcgatggcgcgcgtcgccggtctcagcgccttccatttcctgcgcctgttcgtgcgtgtgctcggtgtgacgccgcatcagtatctgctgcgcgcgcggctgcggcgtgccgcacgcctgctggtcgggaacgagcagccgatcatcgacgtcgcgtacgacgccggcttcaacgacgtctccaacttcgtgcgcagtttccggcgcgccgccggcgtacccccgcgcatgttccggaacgcctcgcgcggcgaccgcaagattttccaagaacgcctggcacgccccatccagactgcggtctccatctccggagacctcagccatgtatgaccatgtcggtttgcgtatcggaaatctcgcggccagcggccgcttctatcgtgccgtgctggcaccgctcgggtacgtcgcggacgcctcgggcggcggcttcggtccggacgggcggccgatgctgtggctgcacgagcacgccgacgccggcgtgcgcggcgtgcatctggcgttcgcggccgccagccgcgcggcggtcgacgccttccaccatgccggggtggccgccggcggccgcgacaacggcgcgccgggcctgcgttccgactacggcccgaactactacgccgcgttcctgctcgatccggacggcaacaacgtcgaagcggtctgcctcaagccgggcaactgaaatggcctcgatccagcgtgaggctttgatcaatgcgagcaccgcccaggtctgggacgcggttcgcgatgtcggcgcgctgcacgatcgtctggtgccgggcttcgtcgtcgataccgtcgtcgacggcgaggtccgcacggtgtgcttcggcaacggccttcgtgttcgcgaacgcatcgtcgatgtcgacgatgcgcgccggcgcatcgcctggtcggtactcgatgcgccgcagctgcgttaccaccatgccagcctgcagttgttcgacgacgccgggcgctgtcgtgcggtctggatcgccgatctgttgccggacgagctcgcgtcgcggatcgcgacgatgatcgaacagggcctgatggcgatgcagcgcgcgcacgagcgcaccgctacggcagatcgctgaagctgcgatcggcacgcagtgtcgccgccgagtgcgtgttgaggttcagcaccatctggatcagcgccttgatctggcgctgttcgagatcgtagtcggtgaagtcgctggagacttccgggagcgggccgttcagcagatataccgggccggtgatgagctggatcttcggcagcccggcgtcgctgctccacgggccgccttcgccgaacggcagcggcacggtgacgaggctgcggtcgaactgcctggcgaacgtcacgctttcgtcctgctgcacgctgccgagatcgccgtacagcaccagcggctccggcaggccgtcgagcgccatcgtgccgggcgtgagctcgtcccactcgcgagcgccgaggtgttcgatctcgatcgccgtcatcgccttttcctgcagctcgtcgtgatgcgcatcgatgtaggcgctgatgccggggctgccggcgaaatgaccgccggtgaagacgatcttcaggccgcgccggcgctgtgaggccggcgcatgcaggaagtattcggccatcgacaggatcgccgccggaccgttgtcttcgatcgagttcgggccgtcgctgtgcgagctgaccagaatctgccgatcacactcgcccggtatcagcgccgagacgttgtacgaggtcgcgtcggcctgactggcgtcgagcgtcatcttcagctgcagcggcgtgacgccggcatcgacgatctgctgcttgagcgcggcgccggtgtcgcggtcgagatagaggcccggcacgctgggaatcgccaggccgccgaacggcacgtaggagttgtcggcggccgccggcggataatcgagcacggcgatgacccctgcggcgccggcggccttcagcgcggcgtcgatcgcgccgatcaggatcagctcgttgacgaagggccgcgtgtacggcgtcagtgggcccagcgtgccattgtcgtcgtggacgtagaccgacaaggcctcgaacgcgccgatcggcagcgccagcttcggcgcgtcgtacaggacgatcttgccgccgacattcgcggacgcgatggcctgcgtcagcgagacgccgccgctcagcgtgtcctgcagcgtggcctggatcgccagcgggatgtcggcagggttctgctggctcagggcgccgtagaccgcgccgagcagattgacgccggacagcgccgacaggtaggtgaccggtgcgctcagtccgtcggggccggtgctgccggatgacggaatgaaatacgcgacatgcagcgggccgggcgaggcgccgttcagcacctcgagcttcgttgtcttcgccgaccacgacgtgaaggtatacggttcttcgcgcacgtcgctggcgccgagcttgcgcagttgcccggcgaggtaatggatgtaatcgagctcggcctgattgccttcgacgcggaagccgtcgccgaagcggtccgccgccacctggcgtttgcggaccgtcgcgacgtccggtacgagcgcgtcgatgatcgcggcgtcgccggcgatgtcgctcgtgcagtcgcctagcgccgcgccaccggatgactgcggggccgagctgcggccgcagccggacagcaggaccagaccggcgatgccggcggccgaggccatctgccgccaccgcggcccatccttgcgcattgcgtttctccccttgactcgtgtcttatgtgccgctgctcgagcgcgcgatgatggcccagcgccggccgggtgtcatcggtgtcggggccacgccctggctttgccccgggggcatggacggatcggcctgccgcaaattgttttgccgctaccccttgaatcccgccggcccgtcaccaacaattagcagccttcatcggagagtgctaacaccgtgcctagaaaacggctccggcactcttcagggttttaccaagtcattgacctatctggagattcaccatgaagcttcgtcccctgcacgatcgcgtgatcgtcaagcgtcttgaagaagagaagaagtcggctggcggcatcatcatcccggacaacgcggccgagaagccggtcaagggcgaaatcctcgccgtcggcccgggcaagaaggacgacagcggcaagaacatcgcgctcgacctgaaggtcggcgacaccgtcctgttcggcaagtactccggctcggaagtcaaagtcgacggcgaagacctgctggtcatgcgcgaagacgacgtgatcgccgtcttcagcaagtaagcacgcacccccgaattcgaaagaggaactcaacatggcagctaaagaagtggtttttggtgacagcgcccgcacgcgcatggtcgccggcgtcaacgttctcgccaacgcggtcaaggtcaccctcggtccgaagggccgcaacgtcgtgctcgacaagtcgttcggcgcgccgaccgtcaccaaggacggtgtctccgtcgccaaggaaatcgagctgaaggacaagttcgagaacatgggcgcccagctggtcaaggaagtcgcgtcgaagacctccgacgaagccggtgacggcaccacgaccgccacggtcctggcccaggcgatcgtcaacgaaggcctgaagtcggtcaccgccggcatcgacccgatggacatcaagcgcggcatcgacaaggccgtcgaagccgtcaccgaagagatcaagaagaacgccgtgccgtgcaaggatcgcaaggcgatcgcgcaggtcggcaccgtctcggccaacgccgatgaagcgatcggcaagatcatcgccgacgcgatggacaaggtcggcaaggaaggcgtgatcaccgtcgaagacggctcgggcctcgagaacgagctgaacgtcgtcgaaggcatgcagttcgaccgcggctacctctcgccgtacttcatcaacaacgcgcagagccagcaggtcgagctggaaaacccgctgatcctgatcaccgacaagaagatcagcaacatccgcgagctgctgccgatcctcgaaggcgtcgccaagagcggccgtccgctgctgatcgtcgccgaagatgtcgaaggcgaggccctggccacgctggtcgtcaacaacctgcgcggcatcctcaaggtcgccgccgtcaaggcgccgggcttcggcgatcgccgcaaggaaatgctcaaggacatcgccatcctcacgggcggcacggtgatcaccgaagagctgggcctttcgatcgagaaggccacgctgaacgatctgggcaccgccaagaaggtgcagatcgagaaggaaaacaccaccgtcatcgacggcgccggcaagaaggacggcatcacctcgcgcatcaaggaaatcaaggcgcaggttgaagccgcgaccagcgactacgacaaggaaaagctgcaggagcgtcttgccaagctctccggcggcgttgccgtgatcaaggtcggtgccgcgaccgaagtcgagatgaaggaaaagaaggcgcgcgtcgaagacgccctgcacgccacgcgtgcggccgtcgaggaaggcatcgtcgccggtggcggcgtgatgctggtgcgcgctgccaaggtgctcgagaagctcaagggtgcgaatgaagaccagacggtcggcatcggcatcctgcgccgtgcgatccaggagccgctgcgccagatcgtcaagaacgccggcgaagagtcgtcggtggtcctgaacaaggtcgccgaaggcaaggccgcgttcggctacaacgccggcaacggcgagtacggcgacatgatcgagatgggcatcatcgacccggccaaggtcacgcgcctggcgctgcagaacgcggcttcggtcgccggcctgctgctgaccaccgaagcgatgatcgccgagctgccgcagaagaacgacgccccggccatgccggccggcggcatgggtggcatgggcggcatgggcgacttctaaaagaagcccgcgtggttccaagcagtcccgtcagggcgccctcgggcgccctgatttttttgcgtcccccaaaaccaatcgcctagcacctcccaaccgctcatgccgagtgccgccgcaggcggtgtatcaaggcacgcggtgcagccgaaaagcgctgacccctcgatacgatcgctgcgcgatcactcggggcgaacggcgggtttcggcaacgcccctcacccccaaaccgttcatgccgagtgccgccgcaggcggtgtatcgaggcacgcggtgaagctcgaaggcgcaagctcgatcccccatgtcggctcggtcccggccgccaatcgcgctactctccacccatgaaatccttcgagcacgtctaccgtctgcaccggctcatgaagcgctcgcgctatccggtgccgttcgagcgcgtgatgagcgagctggaatgctcgcgcgccacgaccaagcgtgtgctcgcctatctgcgcgatgtgctcggcgcgccgatcgaaacctcgcgcgagccgcgcggttaccgctacaccgacgccgcctacgaattgccgggcttctggttctcgcctgaagagctgcagtcgctgttgagcctgcagcagctgctcgccagttttcagcccggtctgctcgacgaggccctggatccgctgcgcgatcgactcgaccagatcctcaagtcgcagaacctgcagaccggcgaggccggccgcatccgcctgctgcgcgccgccgcccgtccgccgggtgcgcacttcgccgtgatcgccagtgccgtgctgcagcgcctgcggctgaagatcgactacgaggcgcgcggcaccgggcaggtgacgacgcgtgaaatctcaccgcagcgcctcgtccactatcgcgacaactggtatctcgacgcctggtgccacaagtcgaacgggctgcgcaccttcgcggtcgactgcgttcgccaggccgcagcgctcgtggctgccgcgcaggacatcgacccggtcaagctcgacgacgagctcggcggctcctacggcatcttctccggcgccgcgaccgcaaccgcggtcctgcgtttcacgccggcacgcgcacgctggatcgccgtcgagcaatggcatccgcaccaacagggcatctggctgccggacggcagctacgaactgtcggttccgtatcaccgcgacgacgagctgatcctcgacatcctccgctacggcccggacgtcgaagtgctggggccgccggccttgcggcaggcggtggcggcgcggctggcgcaggcggtggcgcgttatgccatgggcggttagtagccgatggcgcgacagagtttgcgccgggtctcagtttttgagcccaatcacaggcagactcgattcgaccctacgccgccgagccctgtcatgcccagcacccttccgtttacggtccaactgacggcggaccgcaagtacgttaacgtccggattccagtttcctcgctaccgccgcacttgcagaagtatccgtcggccatgaatgttcgtctcatgccggagtcagctactgcgaagaactggacgccgccatttttgttggcgctggcaaccggtcaatgatcgacgtgagcaaagaagattagcaaatagcttggtgcggaaagtaaaacggcctccgaagaggccgtttgtatcggtagccttttaaggctttgttgccgatagtccccaccatcggaaaacctgatacggctttcagggtacaagaattgaatggggggagcaatggactatcgacttgcagtggatgctggtaccgcatcttgtgggctcgttgcgtgggagctcgacgcaaatggagtgccagttcgtcttgctcattacagtctcgacatctggtctgaaccactgcttccggctaagtccggtggcgtcggtgaaccgaagaaggcagcacggcgggttgcccgaatgatgcgccgtggcatctgccggcgtgcgcgccgcttgcgcaaaatttcgcacatggcgaagttgctaggattggataaatccgctgccccgtcggatttcggccaagggattcattcgctgcgcgccaaagcggctgaagaatgcatcgaattggcgcaactgatgcctgtgttgctgcatttggcgaagaatcgtggtccttctggagactgggtcgaagcggagcccgacatgtccggaaaggagagcaggcggcgtactaaagagcccagatcggattcgaccgctgcaaaagataaagcgccagccgacgaaaagaaagacattgttggcggtgtgcgaaagctgaaggacttgatgcacgaagcggcagcagctttgaacaaagactctctaactttaggacagtatcttgcgtggcggcgcaataagggtgagccggttgttctcggtcgcgctgacgtcggtctctatcccagtcggcgcatgatagaggaggaattcgaccgaatctgggatacgcagtcgcagcaccatccggtcatgctcgatagcgatatccgtcaacgcttcttcaacgccgttttttttcagcgtcccctgaagtcgccagcacctatggtcggtcattgcccattggagccgacgctgcctcgcgcacctgctgcgcagatggcggcgcaggtcttccgcatcgaaaagcagatagccgatctgcgatggggtatcgggcgccgctcaataccgatgacggaagacgagaaggctattctgcgcaagctgctgaatgatgcggagcaactcaccgagaaaggggagttgagcttcaagaaaatcctaaaggcacttgaggcgagtggttgccctccacctcaaggtcgcggcctcaacatggagcgttccagccgcgaaacactgaaagggaacacaacgctcgccagttttcgacgattgggaatggaagatgattggaatgcgctcgacgaaagtactcagttgcaagtcatcaacttcctcgccgatcttggttcaccggacgcgctggacagcagcgagtggcatctgaatttcaagacgagtaaggggaagcagagaaatttcaacaacgagttcgtggacttcattaataacctgcgagcacatccgaagttcggccgcctgtccgcgatggggttcgacggtggtcgtgtgggatattcaatcaaggcgctgcggaagctggccgcgctgatgcaggaaggttgggacgagcgtgcggccgtggacgacgcttatcccggtcatcacaaggcaaaggctgtcagtcgtgaacttccactgccggcggaaaccggcaacacagtggtggatgtggcgctgcgacagatctatcgtgcggttgatcgcgcaatggaggctttggctggtccgcctgtagaggtcatcgttgaactgtcgcgtgacatggcattagggataggcaagcgtggagagatcgagaatcgcatcaagcgtaaccagaatgcgcgatcggatgctgcaaaggcgcttgctgatcagggtcagcgggtcactgacaggaagatcgaccgctatctcttgtgggaaagtcagctgtactactgcccctactgcgatcatcgaataacactgggggaagcgcttggcgccgaaacagatcgcgagcacatcctaccgcgcacgctaacccgcgtcggtggcaagcgcagtcaactcatcctggctcatcgtacctgcaaccagcaaaagggaaatcgtacaccttggcaggcattcggtcaggacgaggatcgctggcgcatcatcgaggaccgcgccaggcaacttcaagccaacaagcaatggggcaaggcgaggctgctactgcttcaggactgggaagatgaggttctggacgacgaggcagtttctggatttagcgatagacagttccacgaaagttcatggattgccaagctcattgcgcaatggctgcgcgcagtctgtactaacgttgccgtttcgcgaggggagctgacggcgcatctgcggcgaatctggaagctcgataccgtgattcccgaagttcgccttgagtccgggctccctgtgcttgatcgcgaaggcgagcggatttcaactgaagagttccacaagcatcgcagttggtgggagggccacgacgagcgagctggcggaatccctacggatcgcaaacctgacaagcgcatcgaccatcgacatcatctggtggacgccttggtgatttcgctcacttcacgtcagctctatgccgagatggcacgccactacaaaaccgagcgagagcgggaacgtcgtggtgagcgggcgcggctgagcttgcgtatcgccccacccgtcgaagcgatacgcgatttatcgctcgacgctgttcgcaaggtgggaataagacataagcctgataggcaccccgatggcccattgttcgagcagactgcctacggaattagccgtaaaccggatgaacgttccggtgaacatcttttgacgataagtaagcctctgaccatgctcatcgacaaaggaggtaacaaagagaagacgcgcaaggcattggaaggaattgagagcgtggcgacgcgcgatgcggtgttgcaggcgtttgatcgacgcgtcgaagcaggcattcccgtcaagcaagtttttaacgacgtagtcttgcatccacagttcggaaccccgattcgccgtgttcgactacttggtaattccattgctactgccgcactgattgtgcatcggaatcgcgaaggaaaggttctgcacaagcgctatgcgcacgatggtaacgcctttttggaagtgcttgtggtggagaataaacttgtcaaaaagccgcgacttgtcaatgtccaggaggcgatgcgagagaaaggctctaggccgccacacggtgtgcggcgattctggaagggagacaccgtggaagatgctcgagatggaaagcactttgtcattcgtcagataaaggccgaagacggcggtgctctgattggaacactagtgactgaagccagagaagtacgagatttagctgcggcctctggtttgcgaaagttcaaagggcgcgggatagcgagtttaagagtgctctgaaggcactatgtctgagcatcgcatcctgctcattgaaagcccggcccgccttacggttgatttgggccgcatccgcataagccgggaggccgagcaggacatctttgtcgctccttcagatatagctgttgcggttctgcaccaccatacgatcgagctcacagcgcgggcgttgcaactgctggtcgagaatcgcgccatcgtattgttgaccgacagcaaacacaatccgtgcggttggctcactccgatgttcggcctgcctcaggctagcctgcgtctccgccagcaattcgctctacaagaggaaaaacaaaaacgtctttggcaggccgttgtccaatcccgtatccgcacggaggccagaaccttgcgcgagttggatctgagcggtgcgctgcgtcttgagcgtatgacgacagaggtgttgccgggcgacgcgtcacatcacgaaggccaggcagcgaagcactactgggattgcttacttggcaaggatttcaagcgtgacaagcaaggtgctcaggatgttacgaatgccgccctcaatttcgggtatgcggtactgcgctcaatggtcacccgcgaattggcagttgcgagcctgactcccatgctgggcatcgggcacaacaaccgcgagaactgcttcaatctagccgacgacttgatggagccctaccggcatctggtcgaaaagaccgtgtacgaattgcgtggcaacatcgacgaattcgattcgcaagcgcgcttgaaggtgctagggctggttaaacgaacggttacgctgggcaatatggagtttcggttgcctgcagctttgcgggaaacggtagctagttttgtacgcgtcctggagtccggtagcggcacactggcattgccttgatgacggttcgcgcgtactaatctcagcaacaatcatggcaatcaacagttggcgtgtcgtgtggatactggcgagtttcgattgtccggtcggtacgaaagaggaacgacacgattacacggtgtttcgtcgcgcgctgctaggggaaaacttcacccaacaccaattctcggtgtacctcaaacactttccgacattggctgccgctcaggctcaggttgagcgtctacgtccgagtgtgccggaggacgctcacgtggcatttttcttcatcaccgacaagcaatacggcatgacgcgcgaattcataggtccaaagcgcagcaaaattcgccccgatgcgcctgaacaactattgcttatctaaaaagaatgcccgcaagtcagagacttgcgggcaaccagaccgtatcaggctttccgatggtggggtatcggaaccaattatcaccgcgcggtgtccacgcgtgggaccgtatcaggctttccgatggtggggtatcggaacaataaatataagagatatttgttttcaatcgaccgtatcaggctttccgatggtggggtatcggaacatcgtctttattcaccccgacatagagcgcgaccgtatcaggctttccgatggtggggtatcggaacaagacgcccgcgaatccgcaaggcatcaaggaccgtatcaggctttccgatggtggggtatcggaacgtaattggtgcgggggcgtcggcatattcggaccgtatcaggctttccgatggtggggtatcggaacaacatccgagacgtatgcgtggtcccgcaggaccgtatcaggctttccgatggtggggtatcggaacgacagcgtacagttctagctgatcgtcatagaccgtatcaggctttccgatggtggggtatcggaacaacgtgacggccgacacgacggccacgccggaccgtatcaggctttccgatggtggggtatcggaaccaagtacatcgcgtccatccagccgagcgggaccgtatcaggctttccgatggtggggtatcggaacgaatggcactggatcattccagactgtgttgaccgtatcaggctttccgatggtggggtatcggaacagcttgcgcggcggccgaacggctgcgcgagaccgtatcaggctttccgatggtggggtatcggaacgcgctgtccatcacggccgacaacctcaaagaccgtatcaggctttccgatggtggggtatcggaacggcacacctgtgcggtagttttcgcgcgacgaccgtatcaggctttccgatggtggggtatcggaacacccatgccaaacgctatattgtctgcactgaccgtatcaggctttccgatggtggggtatcggaactgtcgcgtcgcaggacgaactgatcgaggcgaccgtatcaggctttccgatggtggggtatcggaactggtcgagctcgatggccgtgcgtgcgagggaccgtatcaggctttccgatggtggggtatcggaacgaacatgatgtcggcgaagatgcgggcattgaccgtatcaggctttccgatggtggggtatcggaactcatcaagcgcattgcccgggatggcggtcgaccgtatcaggctttccgatggtggggtatcggaacgactggcgaagcggccttttccgagatcctgaccgtatcaggctttccgatggtggggtatcggaacatcgtcgtcaggcgcgtcaggcccagccccgaccgtatcaggctttccgatggtggggtatcggaactgttgggttgattgcgcctcatggcgtgacgaccgtatcaggctttccgatggtggggtatcggaacggaaatgccgccgacaaaggtgctcgtgcagaccgtatcaggctttccgatggtggggtatcggaacaagatcggcagccgccagcacctgaaacgagaccgtatcaggctttccgatggtggggtatcggaacagcggcagtggaagcgttggcacgggcgcggaccgtatcaggctttccgatggtggggtatcggaactgcgtctacgatctgtcctgcgggtcagatgaccgtatcaggctttccgatggtggggtatcggaacagacacgttgccggcttgcacgaactcgatgaccgtatcaggctttccgatggtggggtatcggaactcaccgtgctcgaggccttcgccgcggccggaccgtatcaggctttccgatggtggggtatcggaaccatgatctgtgcctgccacgccagcgagcggaccgtatcaggctttccgatggtggggtatcggaactggcatcggctgcagcgagcagctgctgaggaccgtatcaggctttccgatggtggggtatcggaactgcgtcattgccggggtcctgcccagcactgaccgtatcaggctttccgatggtggggtatcggaacgatgagtagtgtgggtgcgcagtatgttgagaccgtatcaggctttccgatggtggggtatcggaacaaaggctcgttcaagtcaggccggcgcgtacgaggctttgcggggggtaatgacgtcgcgctacgccactcactcgtcgtcgcgcatttccaggctgcggttgatgcgcagcgccgcgagcgtggcgatggcgccggacagcaggtagaggccgacgtagccgacgccgaggtgcgaggccagctccagggcaaccagcggcgcgaaggcggcgccggtcagccagccgaagtccgaggtcagcaccgcgccgctgtagcggaactgccgggcgaagctggagttgacggcgccggcggcctgcgcgtgactgaaaccgagcagggcgaagccgacgaggatgaagatgtaggcgcccatcgagttgccttgcgcgaacagcggcgtcatgccggcgatgctgaacagggcgatcagcacggcgccgatgccgagtgtcgtgcggcggccgatgcggtcggcgacgacgccggagatcagcatcgtcacgacggcgatcgccgcgccgacgatctgcacgatcaggtattcggtgaccgatgccttggtgaacagcgtcacccatgacagcgggaataccgtgacgaggtgaaacagcgcgtagctggccagcggcgcgaaggccccgagcacgatgttctggccctgggtcttgatcagctcgagcagcggcgacggttccagctcgcgggttttcagcagctgcgtgaattccggcgtcatcaccaggcgcaaacgcgcgaacagggcgacgacattgatcgcgaacgccacgtagaacggatagcgccagccccagtcggcgaagtcctccggcgacaggctgtggacgagaaacgcgaacaggccggcggcgagcatgaagcccagcggcgcgccgagctgcggaatcatcgcgaaccagccgcggcggttctccggcgcattgagggccagcagcgagggcaggccgtcccagctgccgccgagcgcgaggccctggccgacgcgcaggatcgccagcagcacgatggcggcgatgccgaggtcggcgtagccgggcaggaaggcgatgctgacggtcgaggtgccgagcatgaacagcgcgacggtcagtttggtgccgcggccgtagaactggtggatgtagcggaacagcaaggagccgaccgggcgcgcgacaaatgccagcgaaaacaggctgaaggagtagatcgtgccctgcagcgccggtacgaacgggaagaacacctgtggaaacaccagcaccgaggcgatgccgaacacgaagaaatcgaagaattcggacacgcggccgatgatcacgccgatcgcgatttcaccgggggcgacgttttccggctcggcgtgggcaccggacgacggcgctgccagtttctgatcgtgactcatgaccgtgcctcgtggcggactttgtgcattgacgtcaggcgccgcatccccaggggacctgcgcgcattgtggcgtggttacgcaatttcggcgaccagtgtcacggatcggccaaaaaagcgcgataggacaaaacgtccaatcgcagttccgggccagggtgattaaagtggcacatccctcaacgcaaccgatccgacatgtcagtcagagttttgcgcggattgtccgtcaccgtcctgctggcgctgctcggcgcctgccatgccgtggtgctgaagccggccggcgatgtcgcgctccagcagcgggatctggtcgtcgcgtccacggtcctgatgttgctgatcatcgtgccggtgatggtgctgacggcggtgttcgcctggcgttaccgggcatcgaacaagcaggcgacgtacaagccggactggcatcactccacgcagctggagctggtgatctgggccgcgccgctgctgatcgtcattgcgctcggcgccttgacctggatcggtacgcataccctggatccgtatcgcaagatcgaccggctcggagccggtcggccggtcgccaagggcgcggaaacgctgcaggtgcaggtcgtcgcgctcgactggaagtggctgttcatctatccggactacggcatcgccacggtcaacgagctggcggcgccggtcgatacgccgatcaccttccacatcaccgcttcgaacgtgatgaactcgttcttcattcccgcgctggccggccagatctacgcgatgccggcgatggaaacccagctcaatgccgtcatcaaccagcccggcgaatacgaaggtttttcggccaactacagcggcgcgggattctcgaacatgcgcttccgcttccacggtctgagcgaggcggagttccggcactgggtgcagcaggtcaaggccgacggcggcagcctgcagcgcgccgactatcttgaactggccaggcccagcgaacgcgagccggtgcatcactacggcaaggtggccgacggcctgtacgacgccattctcaatctctgcgtcgatccgcagcagatgtgcgtgaaccggatgatggcgatcgatgccagcaagaacagcggtggtcatgccgacatggtgatgaacgacatgacgatggaccatgacacgcccgatcacgccgatcggcacccggaatgatggcgatgcaagaccgttctgatctgatgaacttcattttcggccgcctgagctgggacgcgatcccgttccacgagccgatcctgctgatcaccttcatcgtcgtcgcgctgctcggcggcgcgctgctcggctggatcacctgggcccgcaagtggacgtacctgtggaccgaatggttcacgagcatcgaccacaagaagatcggcgtcatgtacatggtgctcggcatcgtcatgctgctgcgcggcttttccgacgcgatcatgatgcgcatccagcaggcgatctctttcggcgactcgaccggctacctgccaccgcaccactacgaccagatcttcaccgcgcacggcgtgatcatgatcttcttcgtcgcgatgccgttcatcaccggcctgatcaactacgtggtgccgctgcagatcggcgcgcgcgacgtggcatttccgtttctcaacaacttcagcttctggatgaccacggccggcgcggtgctggtgatgatgtcgctgttcgtcggcgagttcgcgcgcaccggctggcttgcgtatccacccttgtcaggcatcgcctacagtccggacgtcggcgtcgattactacatctggtcgctgcagatcgccggcgtcggcacgctgttgtccggcgtcaacctgatggtgacgatcatcaagatgcgcgcgccgggcatgacgctgatgaagatgccgatcttcacctggacggcgctgtgcaccaacgtgctgatcgtcgccgcgttcccggtgctgaccgcggtgctggtgctgctgtcgctggaccgctacgtcggcacgcatttcttcacgaacgcgctcggcggcaacgccatgatgtacgtcaacctgatctggatctggggccaccccgaggtctacatcctgatcctgccgatgttcggcgtgttttcggaagtggtctcgacgttcagcggcaagcgcctgttcggctacgcgtccatggtctatgcgaccgtcgtcatcacgatcctctcgtacctggtctggctgcaccacttcttcacgatgggctcgggcgcgagcgtcaattcgttcttcggcatcacgaccatgatcatctcgatcccgaccggtgcgaagatgttcaactggctgttcacgatgtatcgcggccgcatccgcttcgagctgccgatgctgtggacgatgggcttcatgttcacgttcgtgatcggcggcatgaccggcgtgctgctggcggtgccgccggccgacttcgtgctgcacaactcgctgttcctgatcgcgcacttccacaacgtcatcatcggcggcgtgctgttcggcgcgttcgccggcatcacgttctggttcccgaaggcgaccggcttcaagctcgacgtgttctgggggcggatgtcgttctggttctggctggtcggtttctgggtcgcgttcatgccgctgtacatcctcggcctgatgggcgtgacgcgccgactcagccacttcgacgacccgagtctgcagatctggttccagatcgccgcgttcggcgccttgctgatcttcttcggcatcgtgttcttcatcgtccagctggtcgtcagcatccgtcgccgcgagtcgctgcgcgacctgtcgggcgatccctggaacagccgcacgctggagtggtcgacctcgtcgccgccgccggcctacaacttcgcgttcacgccgcgcatccatgatctggacgcgtggtgggacatgaagaccggcgggcaccagcgcccggtcgagggcttcaaggccattcacatgccgaagaacacggcggccggcttcatcctggcgatgatcgcgatggtctgcggcttcgccctgatctggcacgtgtggtggttggcggcgctgtcgttcgtcggtctgatcggctcggcgatcgcccataccttcaactacgaccgcgacttccacatccccgccgctgaggtggcgcgcgtcgaaaacgagcgcacacagcagctcgcccaactggcatccgtgtcatgagcacgacagtgacgaccgtggacgacgtccgcagcttctatctcggcgaagatcatcatcccgaaaacgggacgatgctcggcttctggctgtatctgatgagcgactgcctgctgttcgcggtcatgttcgcgatgtacggcgtgctcggcggcaactacgcggccggaccggggccgaaggagctgttcgatctgccgatcgtcgcggtcaatacctcgatgctgctgctgtcgtcgatcacctacggcttcgcgatgctggagatggcgcgcaaccgcaagctggcgacgctgacctggctggcgatcaccggcctgttcggcgcggcgttcatctatttcgagctgaccgagttcatccacctgattcacgaaggtgccggcccgcagcgcagcgcgttcctgtcgagcttcttcacgctggtcggcacgcatggcctgcacgtgagcttcggcatcgtctggctgatcacgctgatggtgcaggtgtccaggggcgggctgacggctgccaaccgccgtcgcctgagctgcctgtcgctgttctggcacttcctcgacgtcgtctggatcggcgtcttcaccttcgtctacctgatgggagtgctgcgatgagcgctgcacatgacacgcacgacgaccatccgctcgaagcgcatgtccacagccacgatcacggtcatggcgaggccgaaccgcacggtacgctgaagggctacttcaccggcttcatcctgtcggtgatcctgaccgcgattccgttctggatcgtcatgggcgacgtattccgctcgccgcagaccgcgacgctggtgatcctgatcttcgcgttcgcgcagatcttcgtgcacatggtgtacttcctgcacatgaacacgtcgtcggaaggcggctggaacatgctcgcgctgatcttcacggcggtgctggtggtgatcacgctcagcggttcgctgtgggtgatgtatcacatgaacgccaacatgatgccggcaatgagcgcgcatgacatgcgcaacatgccctgagccgtctgcaacggctgccggcgagcgcgagttgatcggccgtggtgccgcgtgcgcggcacacctcggcatcgcaggccatccgcggtactgacatgccgctcgccgccgcctcgagaaaggctgtcgcagcggacgatcatcgtgcgccgcgctccgttgcggccctgctgctgctggccctgctggcgctgacgctgttcgccggctttgtcgcgctcggcacctggcaggttcatcgacgcagctggaaactcgatctgatcgcgcgcgtcgatcagcgtctgcatgccgctgcggtttccgcgccggagcgcgggcaatggccgacgatcaaccgtgatcgcgacgagtaccgtcatgtcgtcgtcgacggcgagttgctgaacgatcacgagaccttcgtgcaggccgtcaccgagcacggaccaggcttctggctgctgacaccgctgcgcacgcgcgagggttccgtggtgctcatcaaccgcgggttcgtcgacgcccggcatcgtgcgccggacacgcgcgtggccgcgcagtttcaagggtcggtgcacgtcagcggtctgttgcggttcagcgaaccgggcggcgccttcctgcgccacaacgatccggccgcacatcgctggtattcgcgcgacgtcgcggcgatcgccactgcgcaaggtctgccggctgccgatgtcgcgccgtatttcatcgacgccgatgagcgtccgaatcccggcggctggccgatcggcggtctgacggtcgtgcatttccacaacagccacctgatctacgcgatcacctggtacacgctggcgctgatggtcgccggcgcagccttcggactcggccgctacgaatggcggctgcggcaggggggcgccggcgagtcctgaacaagcgccggcgacgctgcgccggcgctcccttagactggcgccaccatgacgccgacgatcgcc

SEQ ID NO: 2995 - DNA, 6797 bp, synthetic construct
  source 1..6797: mol_type = other DNA
  misc_feature 1..6797: note = Synthetic
cgcttatcgaatacgatggaagccgacttttgcgtttcagctttggaggatgcaattaagcgctatggcgtaccagatatcctcaacacggatcagggcagtcagtttaccagttatgactttacgaggtcgctcaaggagagaagtgggtccactttgttggaccacttctgggttttgaactcagcggaaaatcttcttctcttcttggacatcaaaagcctccttcgggcttcttacgtccaccttaaactgtggtccagtttcttagacccacttctttcttcggctacgcggtcctgaacggcgacatgatgaacgcggagtggggatacttctcgctggcggagctgaccgagctcaaggttgggccgttcgttgtctgcgtcgaggacggctggctggtgcgtgagttcagagatgtcatgtcggaacgacatgaaaggggatggcgtggctgacgggctcttgtgtttggtcgttcgtactagcccaattttggggtaaaataaaaggaggcccgtagacctccttttcatctggtgcatttttcagcttgttaacggcttgacctaaaagataactgctgaattccctactttagatgtctgctactacatccgcagcaaggttgcttttattcactctttatatatagatgactcttaaagtgtcaagtaaggagttgatatgaatagttggcgacttggactggacattggaagtaactcaatcgggtgggctgttatcgaactgtcccaacctgatgataattctgcttttactcctgccgggcttgtagatatgggggttagaatttttcctgatgggcgagaaccagcggccacagataagaaaacgggaatgccgaggattggcgaatctttggctgtcactcggaggatggcgcgaggaatgcgccggaatagggacagacgtcttcagcgcattcgtgcttttgccgataaattggtggagttcggccttgttgaacagcatggagttgctggtcggcatgaatacaaggtcggcatcattgatttaggaatcgatccttacgaggcgcgctcaaatgcggcaaccacacaagtgtcgaaagaacaattagcccgtgcacttttccacctgtgcaaacggcggggttttctctccaaccgcaaagccgacggcgaggacaaagaatcttctgaacgaaagtcagccatgaacgggctcgcggaaattctccaaaaacgtgaactcactctcggacaatatttaaaaaagcgtatagatgctggccttcatgtccggtttcggggtgaggaatttgacgactccgagaactccgccatttacccaaaacgaagcatgtatgccgatgagttcgctgccataagaaaagttcagggaaatcgtttttttcccgacgagcagtgggacgaattgttcgacatatttgcttttcaacgccccttgttgcccaaggaacccggagcatgttcttttgaacatggacgagatgggcgagagaagcacccgcgcgcatctcggcatctgcctatcaccaacagctttcgcatcctgcaagaggtgaacaaccttcgctaccagtcaaccgacggggaaatggagcttgatgccgatcagcggcaggtcttgtgcgaggccctggagcatcagaaggagatgaagttctccaaaattcgtactttgttgaaactcaagaaaacttccaagttcaatcttgaaagtgatcgcaggaaaggccttaaaggcaacgctacagcctgtgacatgcgcagtctatttgtagctcatgacatggtatgggatgaccttgataccgatattcagaatgacgtcgttcagacgattcttgacgccgacgaccttacggattttattgttgcaaaccgcaaaaatgaatggcttctgcctccggaactggttcgcgagctgtctcaaaaatattatccgtcctctcatgggcatatttcgcgaaggtgcatggagaaactgctcccattgatggagagtggcatgcagtactgggaggccgcgcgtgaaatttacggagaccacacagactatagccaattcgccacaggagaggttctggaagaattgccgtactatggtgaagtcctccgcggaacgacaacgcctgtcagagtaacgccgaccactcctgaggacgaaaagacgtacggaaaaattgccaatccgacggttcacgtcgctctcaaccagcttcgaaagctgattaacgcattagtcaagcgctatggttccccttatgaaattcaccttgaacttgcccgagaattgaagacagcgggcaaaagctatcaggaattgctcaagggattggcagataacacgaagaaaaatgagatgcggcggaaaatgtttgaggagtgttttccgggccagactccttccggcctcgacatggtcaagatgaggttgtgggaggaacttgcagaggacgatggtgacggcggttctcccgccatggcgcgcatggacgtttacacgggccgtaccattggattccgtcagcttttcagcgacgaaatcgaggtggagcatattctcccctatggtcgtacttacgacaattccatcgccaaccgcactgtaacgtttcgggaggtaaaccgacgtaagggtggagacaagctgccttatgactttgccaacgtggatacagagatcgacgccgaagacatgcttgcccgcgctcagaggctgccaagagcaaagcggtggcggttccagcctgacgcagcggaaatctacgaacgaattttgaccaagaatatgacagcgtccgagcggaaacaatatgatgcggacagcagtggagccttcattgaccgccagttggtggatacccagtatatttcccgcatcgcggcgcgatatctggttcctgtggtcggcgctccatccagagtcattccggtcaatgggcatgttaccaacctgattcgcaacaaatggcacatcaatgcggtcaaggccaagggaaaggaaaacgaacgtcaggaccatagacaccatgccgaggacgctttgattgtggcgcttgcggatcgtgggcttatcaaacgcattgccgacgagacccgtattcaacagaaagggcgcaaggactaccgagccaagctgcggtttcccgaacgcccggcatgggtgactgatgagcggattaaggaagtcgctgacaggatcaatgtatctttccggcaagatcatagccgcgaagcaaaattatatcaggaaaccgcctatggtttgctgcctgagggagatcgttggtggaagaaagggtataatgctgtcatgcgccgctccattaccagtttgaaagagtccgaaatcaatcagattcgggatgatgccgtgcgcaaggctgttgtggattttctgtatcgccctgaggtccagtcgattaaaaaatgggaagatcggcttgcgcttttggctcgaaccaagttgcaaatcggctcggcggttaagaaagtgcaaatccgtagagtacggattgtgattaaaaaccaatcggtccgacaaatccccagtgctccgtataaaggatatgttcctgattcaatagctttttgcgatatctggcatgcccccaagtacaacaagaagggcaaagccaacggcaaatggggatatgtgggagcgtttgtaaactatgcggatgctattcgttttgaaggagaggaagacagcctgcatgaaaaatacaagccacatccggctgcaaaaaagattatgcgcctgttcaagaatgacatggttatgctctcagactctcttggtgtggaatcacctttccgtgtcgctggctacgcaacgactgccaacaagattgatatccagcttcatactgaaagtgctggcaaacaaaatttcaaggccattcctgttcttatggagaagatgttcatgcgaaaagtgcatgtcgatgttgatggacggttttcctgatttttattgacctaaaccacttcaacaagccttccgatatagattgtcggagggctttttcatggtcgaaggcattatcgaaatagcagaagacggacgctacctctccaagtatcatggatttcttgttgtgtccgacaaagaaacggaactgggccgtgttccgctggccgacgtttccgccgttatcctctccgctcatcaggtaagcatctccaagaacattctcacagcgttgtccgagcaaaatgccgtggtcatttgttgtggcaatcgttacctgccgacatctctcacgctgccttactctggcaactttgaatccgcacaacggatgcgccagcaaatcgacgccggtcgtccgctgtgcaagcaggtctggaagcggctggtggtggaaaaagtcgctaatcaggcgaaagttcttttatggcgcgggcgtgaaaaaacgggcaacactatccgtgccatggtgagcaaggttcgatccggcgatcctgaaaatgtggaagcgcaggccgcccgatactattggcccagggtgtttaaaccgggctttgttcgtgaccgaaacgccgcagacgaaaatatcctcttcaactactgctacacggtccttcgttccgcagcggcacggtcggttgtcggggcagggcttctgcctgccttgggagttcaccaccgggggcggctcaatccattttccctggtggatgacatcatggaaccgtatcgcccgcttgttgacagtgtggttttggaggttgcggaggatttgggggaagaaattgaattgactccggaggtcaaacggaagcttgcgcgggtgttgcgtctggaccttgaaacaccgaaaggaaaatccccgttggcagaggtgctgcactccttggcgtattctcttgtacaaagctatgaagacaggaaggaacggttgcggtttggaaaaatgatcctgccataaacgttgatgggagttttggcatgagaccagagataagcgggtacagaattatgtggatgcttgtcatgttcgatttgcctgtgggcacaccaaaagagcggaaggcggcaacaaaatttcgcaaattcctgctggatatggggtacgaaatggcccagttttccgtgtattaccgggtgatggggagcaaggaagtcgcggcccgatatatgcgggccatcgaaaagaaagtcccttccgacggcagcgtcaacatcctcaccgttaccgacaagcaatacgaaaacatggtttgctttctcggcaagcaaaaatcagagccgccggaagttcaacaactgacattgttttgaaaaaaacgtcttttctgcgttgttttattccggattttaaccgttttcctcggctagattaggactaatcgtcaaagaaatcaggatattatttcatatctagcgtagcagatgaggaaatgaggtcaagccgcaaccgtccaaagagattctactccttgactggcagcgtagcagatgaggaaatgaggtcaagccgcaacagacgctgtccagagaacgagactgtcggtagcgtagcagatgaggaaatgaggtcaagccgcaaccggacgtcgcctctaacgcattctccgttgagcgtagcagatgaggaaatgaggtcaagccgcaacacggcaccctctcaatgagtgctcgaggggagcgtagcagatgaggaaatgaggtcaagccgcaacacgacaatcaggcggccatcgtcaaggcatagcgtagcagatgaggaaatgaggtcaagccgcaaccacccggtagtcgttgaggtcggggtgcggagcgtagcagatgaggaaatgaggtcaagccgcaaccagtgccaagaaaacaacgtcgtgaggatcagcgtagcagatgaggaaatgaggtcaagccgcaactcgtggacacggagggggtgtatgtatcgtagcgtagcagatgaggaaatgaggtcaagccgcaacaagatgaagtggtttaaacatttctcaaacagcgtagcagatgaggaaatgaggtcaagccgcaaccgggaagtgctgcgtttgcacgagctgtggagcgtagcagatgaggaaatgaggtcaagccgcaaccatggatatgcggtatgcggatattctccaagcgtagcagatgaggaaatgaggtcaagccgcaacaagaaggtaagacggccgacgaggagcgcgagcgtagcagatgaggaaatgaggtcaagccgcaacaagaaataattcattaaaaatgggtgttcaagcgtagcagatgaggaaatgaagtcaagtcgcaacttgtgtagtagtctcccgacccaatataggagcgtagcagatgaggaaatgaggtcaagttaagtaaaatgttttcaggcaagggggtatacattccggccacctcagtgcatccccttgcactcaaatgtataccagcctggataccaaggcacaaaaaaaggattcaacgcgactcgttttactgagttaaactggtgaatccttatttggtagacgctgtgattccacgactacttcctgaaacaaaaatggccttccggaacttcccgggaggccgttttcgtttgtgagcttcggccaggggaaactgtaaaaggctttcacatactgcaacgcgaaagggggcccaattatcgcgcggcgctttaggtccggagggggaatttttttttaagttccccctccgtttttttattctttctctccgcggccgccgtggtcgaacccgccggttaccgtggcttgggggtcgtggtggatgtgattgtgcttgaa

SEQ ID NO: 2996 - DNA, 15382 bp, synthetic construct
  source 1..15382: mol_type = other DNA
  misc_feature 1..15382: note = Synthetic
ggggggcgggcatcctgcccgcctcatgggtcgaagcacgagactcctggacggaaaagggcagtgaccccgcgattttcagaatacgggcatttcccgccgccctctcattgcccctcatcccccaccgtaaacgaatacaaccgcccataagacccccccttgaaccgcaatcgaattgctcccccggcccccaacagccccaggctcttgccgccaaaccgcacgcgatgcttcagcgagtcgccctcaatcgccgcttcgccaagcacccgctcctccgcgtccagcactgcgacctcaatggggccaactccgttcacgtacaactcattgccctcgcacgccagcgggcgcgtggtcagggtccccccactgacggaaacgaagccatccggccgtaaccgggcccggaatatgccaccccccttcacgcgttgcgacgccggcaaaacgcttcgcccccaggaggtcgaggaataataaaacactagctcgtccccgatccgcaacggcccctggctgaacatgctcatgtaaccgccgtcattccggccgtggttgccgccctcaatcccgttgggaatgaacacttccgggtaaccccactcgttccgaaaaggaaccttcttccagcggacgccatcccggctgaccagcagcttcataaacgcggcccccgccttggaccacggataatcgccctcgaaatgaatgaccttgagctcgcccagccacagcggcccataccgccaggccgtcgaagcgtaatactcgtcgtggcgtgtgtccgccccggtgtccatcagcggcggcagaagctcgatgtgctcaaaccgcttcaggtccaccggctcgtccagccggttgagccgcagatacgtccggctccgcaggccgttgctcactcccttccgtggatcgtagaacttgaacaacccgacgaacgtgcccgtttccgggtcaggcgccatcagagtcacatcccccgggccccagaccgtttttccatcctgtcgaatgcgaacgcaactggtgtccccttcgccggcataggcattcaccacctgcgcgcctacctcccaactgatcccgtcgggtgaccaggtgtaatagaccccctcacgatccaacccgtaattggccaggtaaatccagcccttataaggcgcctttggatccttggcgtcatagtaaaaactgaacagatcgaagcccttgcgaccttcgtgccccgcttccggctcaactgaaacattgaaacccagacgctcgcgttcctcaggcgaggagttttcccattgcagcccgtctctggagacataccggcacaaccgccccgccgggaccttgccccgctcgaaaaacagcatcacgtatttctcgagcttgcgatcatacacgatggaaccataggcaatgtaggtggtcccctcaggcgcctccagcaccggcacgttaccgccctggtccttgatcggcgtgtgcaacgtgcgttccagttggtcctgcgtcgcgatcaactcgtcgtccacgaagagctgagcctgcccggccggaatacgtaccggcgcctcgtcggccaaccctgtgagcggattgaacgcccaaacgccaatgatcaacagcattgaagttcgcatcgggtaatgcccccagcaggtaaacggtgcagaatcatcttccagactgcgtgcggcccatctcctgagcctaccgccccggccacaataatcaattcaacgacccggcgcaaatacgcgacaaccaggagccgcaggtttcagcacgcaccaccgtccacccggaagaagcgcccccccatgaggcgtcgcggcaggacgaaacgcctccgcccgtcctgccgacaacccagcacaatcaattagacgacaaatccttacgcgccccaaaccatctcatccacggcatgcctgcctccttccaccccgaccgttcagactgtagaacttaccactcccggccgcaggttggacgtgccggcttatcgcctctaccatgctcgcaggtggccggcgcatgagagtcgccggcgggaaaggcattggcagcccccggaagacgacaatccgtcccccacgaaaggcaagaaccatgagatttgcgacctgtaacgaaccctggaaagaaacccccatcgaagaggtcttccgcatcgccgctcgtctgggcttcgaaggcgtcgagttggcgccctttaccctcgccgagcgggtcgagaacgtgccggccggccgacgccgggaaattctccaggccgcccgtgacaccggcatccagatcgttggtctgcactggctgctggtctcgcccaaggggctgcacctgaccactccggatgcggccgtccgccaacagaccgccgattacctcaaggctcttgcggacttctgcggcgacctgggcggcaaggtcatgattttcggctcgcccaatcagcgcagcgtcgaggcgcccaccagcttcgatgaggcctggaagcgggcgcgcgacctcttcgcctcctgtgccgatcatttcgcctcccgcgacgtcaccctctgcattgaggcgctcagcacccgcgagaccaatttcatcaacactgccgctgaggccgcccgcatggccgatgaaatcggccaccccaacatcgacattatgctcgacatgaaggccatgtccgccatgcccgacggcgtcgaaggcaccatccgccagttcgcccgtcgcgccaaacacatccatgccaacgagccctccggcaagagcgcgggcatgccccccgcccagggtgacccgcccggcgtggacttcaaagccgccctcaaggccctggccgacaccggctacgaccgctgggtctcactcgaaccgttcgactacaatcccgaccccaccaccgtcgccgagacggggctccgaacgctcaaggaggcactgcgatcctgaagtgggaaccctttcccgccaacaacaacacgcgggcaaccgcggggagactgatatgaactttcatgctttcatgatgcgtgtttctcttctggccgccggcgtcgcgtccgctaccgccctcgccgcggaccagaccttgacgatccgcgacgttccggttcccggcctggtatccttccagccggacaagcccctgaatagaacaacgccgctcgtgctggacgatagcacgcgcacgatccccgtgcagttcgatatggaccgcatgtggtggtaccagcccgaaagctgcgacgcgcgcggccgcacctacaccctgcaggcgcgcaaaaccggtgaggcggacgaggcgggcgtgagaattcaagagaaagagggcgtcctggaggtcacgattgacggccggcccttcaccgccttcaactacgccaaggacctgcccaagcccttcctctatcccgtcatcggcccgaccggcgccgccgtcacccgccactatcccatgaaagaggtcgcctccgaaccggccaagcgccgcgaccatccccatcaccgctccatctggacggcccacggcgacgtgcgcaccaccgacttcagcaaaccgggcaccgattactgggccgaggacaagcccggaactgagaaaccctctaaaggactccagaaggtggcccggatcgttcgtgttcacggtggccccgtcttcggcctgatcgaagcggatatcgactggatcacgccggccggcaaaaaggagctctcggagacgcgcacctgtatcttctacaagacccccgacgatcagcgcatcatcgacgtcaaagtcgtcctcaagttcaccgagtccgacgtgatgttcgccgataccaaggaaggcggcatcctgtcgctccgcgtggccaccagcatggatgaaatcggcggcggaaagatggtgaacgcgcgcggacaaaccggcatgaacgaatgctggggccagccggccgaatggtgcgattacgtcggccccgtcgatggccggaccgtcggcatcgccgtcttcgacggcccaaccaacctccgccatcccacccgctggcacatccggaactacggcctctacacggccaaccccttcatggccggggccgtcactcgggagcagaagaagaaggaccccaacgtcaaactgctcgacgaatcgcgaacctggaagaaaggtgaaaaagccgagttcaactaccgcattctgatccacacgggcgacaccagggccgcgaaaatcgccgagcagtacaagctctacgcgcagccggcgaaggtaacactcaactgaatgtgtgccacggctcttgaaccgtgccggaaagggtaacagcggctcgcgcctggaaccgaggcaaacaacccgccggcgcgtgaagccggacccgatggcacaggccatagaaacacaagcggcgcggggcgagtctcaaacccacctcgctcctcactcttcgaagccctctcctgcgcaatccgccgggaatacgaacggaatctgccactcactgcgcgggcacatcgcaggccggatcggccgccaccccttcgccgctcagacagcgctgggcaagcccgaaatcatcctgatctacgtccccatcgccgtccagatccctgctggcgcatcccttcatcagcggaacggcgggaccggtcaaacagatgtcgaacagatccagatcgttcagatccacgtcgccatccttgtcccagtccgcccgcaccagctccggcagcgatgtgcgttcaatcacgcccagataacgctcgctgatgggcctgtcaacccacgacttgaaatcgccccaccaggtgtagaacagcatcccattttccaagatgcctccgttcggttcccccgctccccacctggtatagagaaccggctcgcccgaggtccaggaccagacgccttcgctgatcacgtcattgaagcccgaccacaggttcgtttcaaaccccagccggctgatcagccactgctcctccgccgccgaacgcagggtcaccagatgcccacccagccggcgcgcgctccgttccgcctcgctccaggtcatgctccagccggtcaagcgataatagtgcccgttgatcggcgagcgtttccaccctcgcacgtcctcatcttgcggaagactttgaataccctgggacacgctcggccagattagatcatagaaatcgtcgtcgaaggtccatccccacccggcgaaaaaggtgcgcaggtccgtttccgccgccgccgacatgatgcagaacaacaggctgttcttgcgcaacggagtgtccgcaaagtcgtacacaatggcggcaagcccgtcgattcgcagggcccgtaacgtggtttcgagcatgccgggatagccacgctccagtgtccggcagatccactcccacgcgccggtgccgtcgccgaaataagtctcggccgtcccaccctggttcagccattgaatgtaatcctggctgcggcttgccgcgtccgcctcacggctctccacccaggactggaagccttccagccgctgcccgctcagaccaaacgtatccgggtcggccagggcgcgcgtctccaccaggatgcgaaccatccccgttccgccgttgaagaaacggtcggcccagttgttatcggtgattctgccgatccgcgtgcgggccaggaagttgtcgctgacccccaccaaccaattgcccaaaccccaccccaggatcgggtcagcgctccacagggcggcccccgtctccacaggattgccaccccgggcagtgctcacgctcgacgtgtagcgcacgacctgctttccatccagcggttcctggcccagcacgtcgcgcatgtattcccaggcgccatccacatagcggccgaccttccagccggtcatccactgtatgaacggctcgggggcaacgaaatccacgtgggtcgtcgagtacatgtgtggatcgccgaaatcattcggcaccacccgcagaatccattccacgtaatcctgcccctcgaaacccgtcgcgcacaaggtaatcggatacacaccccgcaacggctgttgccatgtgatttgcccggtccagggatcgatcaccattcccaccggcgcttcgaagatcgaccagtacaccggcaacgtccccccggccagccgaggcgccgcggccgcaaacggcacccactcgatggccgtctggcagggataagaagccaacgccggagcatcatcagcccgcccaataaccggccacaccgcgatcagtgcggccacgacccccgtcgcgcgtgtgatcattccaacccctctgtggcttagtggccaaccaaatagattaagtgtccggcttaacgaggaatgatatcagcccccctctggatggcaagcaaaaaatcacgtaactccttaactaacaaaaccctatgaaaatcacgcagcaggcaagagttgcgccaggtattgcccgccccgccatgcgcccggcaccgcaccggccgccccctttgcacgagaaaggcccatggacaggtcgcaacctgcccatgggcctcagaattcaatgtctaatccggcgatccgaatcgcttactcgcgggcaaactgggcgtcaaacacgatggctgacggcgggaaatcgaccttgcggacaaacgcgcaagcttccgtggcgccgtgctcgcggtccatgccgccgtcctcccactcgaccgaaagcgggccgtcatactggatctcattcagcgcccggataatggcttcgaaatcgatccgaccgtgccccagcgagcggaaatcccagaaccggtccggatgcccaaagtccatgtgcccgccgaatacgccggccttcgtcggcgtcggggaccagtacacgtccttcatgtgcacgtgcacgatgcggtcacggaactggcggatgaactgcacatagtcgacgccctggtaacccagatggctggggtcatagttgaagcagaaccgcttgtggccaccgacggcctcgatcgccttctgcgtgctggaaatgtcgaatgcgatctcggtcggatgcacctcaagggcgaaatacacgtcctgctcttcgaacacatccaggatcggcttgaagcgcttggcgaaatcctggtagccgttggcgatctggttgggcaggttcggggggaaggaatacaggtatggccagatgctgctgccggtgaagccgttcaccacgacgcgcttgagttgcttcttgatgccggccggagcggcgtcgaagaacttgcgggccgcacgggcggtatccatcatctccgccgccgcacggctgcggacgccttcgggcttgccgtcgccccagatgcggggcggcagaatgctcttgtgccgctcgtcgatgttgtcgcagatggcctggccgaccaggtggttgctgatcgcgaagcagcccaagccatgcttctcgagcaactcccacttgcgcttgcaatagctttgatcctccagggccttgtccacctcgaagtggtctccccaacaggccagttcgagcccgtcataaccgaatttcttggccttcttggccaactgctccaacgggagatccgcccattgcccggtaaacatcgtaaccggcctagccatagcagcgtccttcctttcgcaagtaacccagatgaaagcggtcaggccgccagcctgacgatgcgagtgtcaatggaggcgaatcttaacgcatcggatcgggagaggcaatatgccgcgcaagttccgattgatacatagcttgcaaccccgacacaccccgtcacctgtgcgccacggctcttgagccgtgcaagcccaacgccgacgttcggcacgacccaagcgcagggtcacacacagcgcgtccgcgcccccggggcacatggtgcagggtcgcccaagctcattcagaagccatgagctcaaagaggccggtaagattctcgaccgtctccaggccccagatggcctcctggaggcgagccctggccgggaccgccaacctgagactggtcatgcgcacgaacttctcgcggacttcctcgtcggtcatggggttgccggcatggccgcggggatacttgatctcgtgggcgagggtctggccatcgcgcagggtgacgcgcacccgcgtgggtgtgccgtccgggtagccgtggttcatgccggggtcgcgatggaccgccacccggcggatcagttcgcgcaactgcgggtcggcccggcggcggtcgttgaagctctccatggagacatgggcatcgagcaaggcggcggcgacgcaatagggcatggaatggtcggccgtctcacggctggtgggatcccacttctccggctcggagccggtgatatccacggcaacgtcaaaggtatcgacatccacgcgggcaatggcggcggtgtcggggatggcctggcgcaggcagagggccgcttcgatggcgctctggcagcagtagtcggcggggtaaaacttgatgtaggtttggaggatggcccagtcctcgccttcgggcaggtatatccggaacgggccggtgacctgcttgaaaaggcccatggcgccggtgaagggatcagcggggccgatcatcccccggcgggcaaggtccgcgccgaagatagcgttgcgcgcggcgttggcgaaggcgcagcccttccagtgcgagagctgacccacgcgggtctggcgcatggcgatgttggagaccacgccgagcgagatggcatggccgagggcttcgccgcgcagaccccagagccagccggcggtggcggcaaccgagatggccccgtagaccacatggtcccagcccttctcgcgaatgcccgcggcgtcacagaggcggcactggatctcgtaggcggcggcgatcgcggtcctgacccgccggccgtccaccccggcagcctcccccaccgccaggcaggcggggatgttgtcgctgggatgggcgggttctaacgagaggtacgtgtcgttgtagtccaggtagcgggcctgcgtgccgttagcgaaggcggccagtgcggccggcgcccggtgccgcgtgccccagacggtggctcccccgtccagggcctggacctcctgggcctgctcgcgggtaatccggcagggctcgccgtcccatccggcgacggccacaccaatggtgtcgagcacacggcgcttaacctcgtggctcacgggttcgggcaaggggcgatgatccagttggccgagccagtcgcaaagttgtttcgtcaaggcgtccattcattcattgtcagccgaccagggatagcgagcaagtcaacgaggcatgggggaagacggccgggcgcatcaggagggcgggcatcctggccgcctcaaaggcgtgcaatatgcacgccctccggggcttcgcgctaccccgccccgaagaattgccacacccggcggccggggctggcacaacaacggccggcagaggtagccccgggcaagcgacgctcaaagcaaaaaaagaccgcaggtcgtgggctgcacgagctgcggcggtcgcccgaaggcggtgcctgcgaattttctcttgttgcgaaaaaacgcaggccggggtcgattacactgcgtttattgtccctcttcccgcgccactgtcaagacacaattgcgaaaatgcgcggatcatgatatcaaagaacactcgatatacacatcgcacccgctacatagggagaacaacctatgatcagtcttggtctggatattgggtccaattcggtaggttcggcttgggcggatactgacaagcgggaagtccatcttgcggtcagcgtttttcccgccggcgtggacgagcaggagagcaagcgcggcgcgcccaagaaccaggcacggcgcgagaagcggtctcaacgacgcagcctggcgcgccggtcggcgcgtaaacgccgggttcgtcaggttttaacgcaggccgggctgctgcctcaggacgtggaggaattgcaacggctgtttgatacgaacccgtgggaactgcgccgggcgggactgacccggaccctgacgccccacgagttcggacgggtcctggtccacctcaaccagcggcgcggggccctcggcatcgaaaccaacccggaggaccccgaggagggcaaggtcaaggaaggaatcgaccgcctcaatgcggagatgctggcccggaaagcagagacggtaggccagctcttcgccgacctgatggatgaacggcgagcggccggcaagtgcgcatccaatacggccgtcagccggcgcgttcagcagatccggcggaaacgcgaggggcgcggcgaggcaacggaattccagtttcacggtccggttcgcaaccggcaataccggatggacgaacggcagcagctttacgcagaccgccggcgcgtgcgggaggagtttctgctcttgtgggagcgccagaaatccttcggcggcccgctggcggagttgctgacagatgatctgaagcggcagcttgacgacccgaccgggaacgacgtctggcggcaccaaggcgcgctgttcggacagcgccggaccttctgggacaccggggcgctcggacggtgcgttctcgaaccaacagaacgatgcgtgcccctggccgaccgacacgcaagctatttccgcgtagtggagacggtaaacaacattcgaatcatacagggcggccacagccctcgccctctgaccgtcgaagaacgtgagcgggtcatgcgcgttcttcgaggcccgctgttcaggaagagcaagggcaagctgataccgaaatcaaccgccagcgtgacggatatcaaacaggcgctgggaatcaacccgcgagacaagctcgtccggctgaacatcgaagcggatgaagaacgcgagatcaacaccgactggttccaccgtgagattgtccacggtgcgtttactgaagagcgatggaaccaactggacgaacggcagaaggaatcggtcaaccgcgcggtactgcggttcgatcctgacgatgagcaggatcaaaagacgctccgggagaaggccggccgctggtggggattagaggctgaggcggtcgaacggttcatcgaggcgtggaagacgcggcccaaactggagaagcgcctcaacctgtcccgcaaggcgattctgaacctgctgccttacatggagcgttttgacgaggagcaccagcgctggccgacccagcaggaggcccgaaaagcctacgcccggacgctccgcgaaaaatacgagcaaaccggcgtcgacgccgaccggatcgcggccgatcgatacgacaccggggcgctgggcctgacggcgcgagaccgctacttcatgaagctggacaagcaccgcatcgcggaaggcgtgccggaattgccacccgccccgatgctgtccaatcccgtggtgcgcaaagccatccatgaggtccggcgacatttgatggcctacctgcgcaagttccacaagacaccggatcagatcgtgatcgaactggcccggatcaccaagcaatccgagcggcagcggaacaccgccctggcccgcaaccgcaaccgcgagaagatccgcaaggcgatcattgccggaactgaaaacgagccaggcgtgctggtgtgcgcctttggtgccgaaggcgcgcgacgcctgtcgctcaaccagcagcgtgcggcggtggatcgcgtgattctggcgattcaacagcgggagacgtgcccctactgcgggcggaacgggctgaccccggtggtggcggcgaaaggcgatgacctcgaagtggatcatatcgtgccctacagccggtgcggggacgacagcctcaataacaaggtgctcgtgcatcgaacctgcaaccgcggcaaggccaacctcacgccccgcgagtggtggggaaccgagttcgaaacccgcatccaggttgccgagaagttgttcaacggcgtcaagccggccaagggcgactacttcgaggcgcgggactacaagcgcaagtgggagaatttcacccgggaggtgcgggaggccgacgagtggaaaaactcgcagttgacggacacggcttacgcggcccggcaggtggccgcctacctggccgatgccctgttcaacgggcgcggcctgccggaacggggcgacggcggaaacgagcagaagatcttcttcaccatgggccggttcacggccatgctgcgccgggactggcagctcttcgaaacgctcaaacccccgcaacgggagggccgacacggcgagctgaccgcggacgaggaggcgcggatagcggagaaggaccgcggcgaccaccgccagcacgccattgatgccgcggtcattgccctgaccgatccaaagatcaaacaccatctggccaactgggcggcctatgccgcggagtacaaggagaagcgtggcgaatggccccggcgagagccgattgagcctccctggggcgacgtgcccagcttccgccgggagattctgtcccaggtttatgcgcggttcgattcgagtgaattcgaatcaggccggcaggatgaggcgggcgcttcggacctgctggtggtgtcacaccggccggtgaagcgccggctggtcggcgcgttccacgaggagacggcctatggaccggtgatcagccccctgccgccccaccgccgcgagaagccggagaccttgttcaccaaccggatccaggtggccggtttgacgccgaaccatctgcgcgtgccggagggctgggacgaactgtccgcccggctggaggaccccgcgctgacggaaggcgaaaagaaagccgttcgccggcagttggcggcgctgaccgatcccccaccgggcaagagcgggatcgtccgcgaccgggccctgcgcgactggattcgaaagtgtctccgggccaacggattgaatccggacggcttctccaaggcccagatgcgggatttcgccgccagcggcaagctggtcatgcgcagcggcgtgcccatcaagagcgtgatcctgctgcggaccaacaccgatccggtcatcatttcgcggaaacggtgggatcccgcagccaaccggatgattgtcgatgaggacccccgctccgcgcgggtctacatcggcggcaacaatcaccatatcgagatccgcgagcgtcaagtgacccgccagggcgccacggtcacggagtggacgggccgggtggtcaccactttcgaagcggcgcgccgcgttcgtcttgagggtcggccggcggtcgatcgctccgataacgaggacggccggtttgtcatgtcgctggccgaaggcgaaatggtcttcatgcgccatccgaaaaccgggacgccgggctatttcgtggtgttcaagctggacaagcccaatacgatccacttcattcatcattgggatgcccgcccgtcgatgccgcggaaggacgagaacgggaacgagattcccggcagcgcgcgtgaggatatcgccgtggtcgcttcgaaactgcggtttctgggagttgaagacggccagccgccctataaagtgcgagtcgcgccactcaggcgacccaagcccgtgatgggcgattaagcgctgcccataaaaccaagtgtggcaccggcgtcccgccggtgtaggcgagggtgtctcgctcgagccaagctcattttgttcagagcccaaagtcatcccggcattcatccgataccgaaatcgggggatgccgggatgatcaaacgcaccatcgaaatttcgcgcgagccggcccatctggccgtgcgtttggaccagctccatatccagcgcaacgtccgcgacgagtggaactacacaagcattccctgtgaggatatcggcgttttattggtcgatcacccgcaagtgacctactcgcattacgcgctggcccggctgatggagttcggggcagcggtggtggtgtgcgggcgcaatcatctgccggtgggcatgctcatgcctctctccagccacaccgaggtggtgtggcgcctccaggaccagctctcggtgagcaagccgctcaagaaacagctctggcggcaactggtggttgccaaaatcagagcccaggcggccaatctggaagacaagacgccggcccggtcgaaactgctggccctggctcgggaggtgcggtcaggggacgcatccaacgtggaggcccaggcggcgaaggtctattggtcggcgtggctgggggactccggcccagagggaggcttccggcgcgacccggacggagatggcataaatgccttgttgaactatggttacgccgttttacgggcagccgtggcccgggccctggtgtcggccgggttgctgccggcgctggggatccatcactccaaccggtcgaacgccttctgtctggcggacgacttggtggagccactccggccaatggctgacgcccaggtccgggaactgtaccgccaggggcacacggaactgggacaaccaacaaaggccaaactacttgcattgttgacccaggaggtgctggccggggagcagcgcggcccgctgatggtggcgttgcatcgtatggcggcatcactcgtggcatgctaccggggggaggcgaggcaattgctgataccgacggccacgggcgaggcaattttgtagcgtggggcaacgcggaacccagagggcgtgcatcttgcacgcctttgcggccggtaggatgcgccccctgctgggtcctgccgattccccctcatccgttgccactgccgacggccacaacggccgcgggccaggccccaacggcttgtaattgagggcggatcatggtaatcagcgggtaccgatgcatgtggctcatcgtcatgttcgatctgccggtcgatacgcccgcggcgcggcgggaatacgctcaattccgcaaaaagctgctgcaggacgggttttcgaaaatgcagtactccgtttacatccggcactgtgccagcgaggagaacgcggaggtgcattacggccgggtggagcgcagcgtccctcccgacggggaggtccgcatcctcaccgttaccgacaagcagttcgggcggatgcgtgttttctggggaaaacggcgcagaccacccgaacaggcccctgcccaactggaacttttctgagccggttctgcctccaagtcgtgtctgcggcgtcgcttaggtcggagctagtgtaatcgaccccagcctgcgatcaatccgcaacggctgtggaaaggtgcaatccagaggtacgagtgtaatcgaccccagcctgcgatcaatccgcaaccttcagtgcaatgaagaactgaacgagaagagtgtaatcgaccccagcctgcgatcaatccgcaacgcggcgacgactacaccggcgacagcgcgaagtgtaatcg

SEQ ID NO: 2997 - DNA, 15134 bp, synthetic construct
  misc_feature 1..15134: note = Synthetic
  source 1..15134: mol_type = other DNA
gctcttcggcgcggtcctgtccgcgctgcgccggcgaccggcctgtcgtgtcgtcataatgacactcgcggccgcgctgggcgcgattcatgcggcagagttcatcttcacctcccgggccatgaatcgaatggacgcgcgggagaccgggatctggaacaatgccgaatcgcttgccacccgtctcgaccgcgaaacacctgcgggcacgcgcctcctggccgtcatcccgtcggcccacggcgacaaggtcctgctcaccgccgcggcgtacctttcgcgccgggatctatgcgagtggtttgaggttggaaaaacacgatgcattccggcccgcgccgcgaattgcgatctcgccctggttcattccgaaatcgtccgcccgcccgatgaactgatcctgggtgagaagatggccgatctgcccggcttccgaatgtacgcgcttcccggtgcctcggcaccgacacagccctagccggctgccccccgtttccgaacgcgctccgcgtgttgctgccgcacgacgggagcgtaccggccttcttgcgtcggtcggaatgtatccctgcagcgacgggtgccccgccgccgcccccctcagatcgctccctttatcccgcttccgggaaccgcgccggcgagcacgaccgagcaatattacccaaccaatatgccaggaacccacattgcacacatggaaagcgcattttataggacattctcggttggcacgctcgctgccttctttctctctggccgcccggcacggggtcgggcggatgtgcacacggcgggctcacgaaaaagaggagacctctttcatggcctttgatttcaacagtttgtttggtccgttccagtcgatcttcgagtcgctgttcggatggctgggccagcttctccagtccattctcggcgtcgtcggtatcggcggctgaccgattgcggacccggccgccggcagcctgcacggctgacggcggccattgttcgttcttccgagggcgtcgcccgtgcctggccggcaagcgcggctttccccccgcgcggcgcggcgaatggcccggcgctggcccgattcacggcctcccagggcgcagcgcgtccaaccgagatgccattcgtacgacaccgacggccctgccggcggcgcctcggatttctgccggtgattcgcctcggattagcgacgcgcccgcccgcggccacgcgatgaccgccgcgccgccccctcgcccgtcccgcggcgacccattgtcccgcgcggcgctttccgcacaacgctgcgcggcgccagcgccgcggcaagcacctcgtccactgtcttacagagcacgaacttgatctgcttccggatttccggcgggacctcgaccaggtccttcttgttccgcagcggaacgatcaccgtgcggatgcccgcccggtgcgcggccagcgtcttttccttcagccccccgatcggcagaaccagcccccgcagggtgatttcacccgtcatggccacgtcgctgcggcacgggcgatccgtcagcagcgacaccagtgcagtaaacatggccacccccgcggagggtccgtccttcgggatcgccccggccggcacgtgaacatgaaggtccagctcggtcagccgccgcgaatcgatgccgtacttcatcgccgaggcccgcaccacgctgtacgccgcctgaacgctctccttcatcacatcgccgagctgccccgtcagttgaaacgtccccttgcccggcatgcacgtcgcctcgacaaaaagaatatctccgcccgccggcgtccaggccaggccggtcaccacgcccggcacgctcgtgcgcagtgccagctccggctcgtacttgatcggacccaggtacgcgccaagcagggatttcgtgatcactttcgggtgcttccgtccgcgcgccacctgcgccgcgaccccgcggcacaccgcgccgatctcgcgctcgagattgcgaaccccggcttcggccgtgtaggactcgatgatcgtctgaagcgcctcgtcggcgaatcggagctgctcgggtttcaggccagactgctcaagctgacgcggcaccaggtacttcttgcagatgaacatcttgtccagccgcgtgtaccccgggatccagatcacttccatgcggtccttcaacggaggcgggacggcttccatgtaattcgccgtgcagatgaaaaacacccgcgacaggtcgaacggaaccccgagatagtgatccacgaacgtgttgttctgctccgggtcaagcacctcgaggagtgccgacgacgggtcaccgcggaagtcggctccgatcttgtccacctcgtcgatcatgaacagcgggttgttcgcccccgccttgcgtatctcctgaatgatccgccccggcagcgccccgatgtacgtccgccgatgcccgcggatgtccgcttcgtcgcgaacgccgccgaccgacatgcgaatgaactgccggcccagagcccgcgcgatcgatcgacccagcgacgtctttccgacgcccggcggcccggcgaaacagaggatcggcccgcgcccctccggcttgagctttcgtaccgacaggtattcaagaatgcgcttcttcaccttctcgaggtcgtagtggtcctcgttgagcaccttctccgccttcgagatgttgaggtgatcttcggtcgatttcgaccagggcagttcgcacaaccagcgaaggtaatcgaccgtgccgctgtattccggcgacgcctgcggcgtgcgtgacagccgctcgagttcgcggtccgcctccttctgcaccggctccggcatcttcgcctcggccaccgctttcttcagctcttccagctcgacgtcgcgcccgtcgctctggcccagctccttctggatcgcccgaagctgctcgttcaggtagtactcgcgctgcgtcttgtcgatctcgttttttacctgctcctggatcttgttagacagctccagcacttcgagctgatgggccagcgcccgattgatcttccgcaggcggtccggaacgtcgaacgtctcgaggatctcctgcttctcgatcgtgctcagcgacaggttcgccgcgaggaaatcggccaggctgctcggcttcgtgatgctgttcaaaacgacaagggcctcgtcgggcacgccgggagtcatctcgatgacacgcgtcgcctggctcttggccgattcaatcagcgcgtccagctccgtcgtcgacgtgtacgtgtcctcgcgcgtgtgcgcccgcgccaccaggtacggctccgtcgagacgaaatcctcgatgccgaaccgcaggagcccatgaacgatgatcgaaacctggccctcccccaggttcagcagcttcaggatcgaaaccaccgagccgacccgatacaggtcgtccagccccgggtcctctgtcttcgcattgcgctgcgtcaccacgccgacgatcttggtgccggtcaccacgtcatcgatcagcttctttgacttcgcgcgcccgacggtcagcggaacgatcgtgccggggaatatgaccgtgtcccgcaccggcagcacgggcagaagctccggaatgaccagcttgcgctcgccctcttcggaacccgccgacgaaatcgccaccatctccggcgcggtcggccggtttgaaccttcgccgaccgattcaccgtcgtcgtcgaggtccggcattccatcgagttctgtcgaatccatcgtcatgacgagttcatcccgctttgatcgcacaaaccggccgcctccgccccgcggtcggagtacctcgcgccggtccgaggccgggcggcgcagcccacgctacttgacctttggcagtgtgacccaaaggaggccgtcgcggtaatgcgccgtgaccgcgcttcgatcaaccggtgtcggaagctccacctgccggcagaacacgccggtatcgatctccatcaggtgcacgccgatctccgaggcccggctcggcattggcgcggagcgctcgccgcgtatggagaaaatattgccgttgacgtcaacgttgatttcttcaggcttcatcccggcaaggtccacgcagatcaggaacgcctgccgcgactcgtagatgttgagattcggcctccacgcatcggtcggactgaatcggatatacggcccggacaggagttcctcagcgctcgtcttttcgcggatgaccagtcgctggaaatgcgaactttcggagaggcgatggtacatgatggacacccgagatgaccaggaccccgatgctaccgcgtggagtctatcaccgcgcatgccggcgtcaacgaacccaggtccgccgcttcgcgtttgtccgtgcacacattcaatcggccagaagccttcgcacacgcgccgcggtctctgccgcggcgggcgtttcgcacggcgcggtgacatgaatcatgcccttgtagcgaatccgacgaagcgcgtcgcgaattgcgggtcgtccggcgtccgccgccgccgtgccctccgcttcacccagtatttccggctcgccgacgcggatacaggcgattcggtgcgtcagcgtaagaagccagtccgccgggtctgcccgctgtgtcgtgcgcgagatgtcaagctcaaccccgacatgcggtgaatttacttcgtcgaggaatcgccgcgcctcagtgggagtcggcagcagtccgacatcgtccggatcgatcgcgagcgtgattccatggtgcgccgcggcgaaccgaatccccatcagtcgcgccagtatcgccgccagccggtccgcgtgtcggcgtggtgcgcccgacataccatacagcgtattcgcgccaacaacgaccagccgtgctgcgcacgtggcggccgccgcaaacgcggcctccagcggttcgtgcccgtttaagtgccctgccgaaggcccgcgcggtacgggtgcctccagcgttccacagacgcgcacgcccgagacgcacaatccggcccgtttcacagtttcccccgcttcgcgccagatatcctccgcgccgcgcgatgtatctcccgcataccaacaaaggtcgatccctccggcgccgagccgcgccgcgtgaccggcagcctcggcgacatcccgaaagcgcgcgggatcaccgtgataagcgaccgccattttcaggtcacatgtagtcgtcgaagcactcatggggctcgcgcgcaacggataatgacaaagatccgaacgtccacaggacgccggccacgcacgcacgacgcgccgtaatagtccatcatacccggcaagtctcatggccgccctgtgtgcaggcggcataagtgcccgccgcgagccgcacagcctgccgctgttccttgcccatcgatgcggcccgaactatcatccgcgagcttttggtgacacttggcccctcgcggagcgaacgacccatgatgatttccaaggcaatgaacaccagcctcaaccggcagatcgccaacgaaatgaacgcctcccacaagtaccttgccatggcctactgttttgaggacatgggactgaaaatcttcgcccggcgcttcaatcagcaggccgacgaagagcgcggacacgcgctcaagatcgcccggttcattcaggacgtcggcggctcggtcgtctttgagggcctcgacaagcccaagagcgactacaagacggccaaacagatcgtgcaggccgccgttgacagcgagctgacagtcaccagccagatcaacgacctcgtcgcgcaggccgaaaaggaaagggactacgccacccgaagtttcctccagtggttcgtcgacgaacaggtcgaggaagtctcttccatgaccgagcttctcaagctcgtcaccatggccggcgagcagtatctcttccagcttgaaggacgcctcatggcgatgatgtccgccaagagcgattagaaagcgagcgcgccgtggctcccggtcgcgacatccgattgaccgcctacgcctcgtgcgccggctgagccggcaaactgcccgccggggcactctcgcaggttctgcgggaactaccgccgatggcgcatcccgacctcctcgtcggagccgagcacttctccgatgcgggcgtcttccgtctgcgcgacgatctcgccatcgtccagaccgtcgatttctttcctccccttgtggacgacccattcgtcttcggccagatcgccgccgccaacagcctctccgacgcctatgccgtcggtgcgacacccgtcacctgcctgaacatcgtctgcttccccgacaaggaactccccgtcgacgtcctcagcgccattctcgccggcggcgccgacaaggtccgcgaggccggcgcggtcatcgtcggcggacactccctccgcgatgccgagatcaagtacggcctctccgtcaccggagtcgtacaccccgatcgcttcttcagaaacgaccgcgccgcccccggcgatatgctgatcctcaccaagcccatcggctccggcgtcctgaccagcgctgccaaggccggcaggatcggcgaaggagatctcaccgaagccattcgcgtcatgatccagctgaacttcaccgccgccgacgtggcccgcgagtttgccgcaaacgcggtgacggacatcactggcttcgggcttatcggccatgcctgggaaatggccggcgcttccggcgtcaccatcgaactgcacgcccacgcggtccccctgataacgcagaccctcgatctcgcccgcgccggcgttctcacgcgcgcctggaagagcacgctggcatccatcggcgaccgcttccggaatcgcggcgtcgaagaagccctcctcggcgttctcagcgatgcccagacgtctggcggacttcttctctcccttcccgcgagtgtcgccgacgccgccctcacaaagcttcgcgcccgcggcgttgcagatgccgcgatcgtcggggctgtgaaatcccgcggcgacgccgagatcgtgctcgtcgcctagcgcgtcgtttcgcctctccttgacaatcctcctgcatgacccgcgtccaatgtcacgccgcagcgacgcaggcaaccgcccgccccggcgcggataaatgattgcaaacagcgcggaactcgttatccttcaatcacgtaagcaacccaggcaacaggattcgccgcaacacctgcgccttatctagggatggatgcatcatcgtgaaaccttccagacgaggaccgagcctttttgaggtaatgaacaaggccccggtgacccagcccccacggcgaagtttcgggctgttcggtcgccggcggcagcccgacgcccacgtacttcccgtcgcgcagcccctcaccgaagaagaagccgccgccgagctcgcccgcgcacgcgccgagcacgacgccgaacgacaggcccgcgaagaaaagctccgccgcaaggaggccgaaaaggccgcgcgcatcgccgcgaaagaagcccgccgcgctgcgcgccgcgccgccgaggcggattcccccgccgatatgccccccgttcaggccagcgggaaccgattcatcttctctttgagcacggccgcctgtatcggcgctgtcgggctcgtgtgcgctgcgatcctcagcgcctatgtcatgggtcagcgcgccgcgcgaaagggcggccgactcgcaaccgtcgcagctacttcgacccccgtcgccgagtcctcgtctccgctcctccccggtcccgcctcgcctcagaccgcgagcctctcgagtgcggattccccggcgtcccccgcgccacaggcccccgccgacgagccgattaccgacaaccccgaccttgcgcacctgcttaagcgtccccagatggcggaaccccaggtcaaccccaaccagccggtccgcctcgacgcctcggcccccgccgccggtgctaaacccgagagcctcaactacttacagatcgagtccttcctcgtcagccgcgaccggacgagcgagcagctcgcccgggatgtagccgaggtccgcgccttcctggctgagcgcggggtgcggacatttgcccgaaagcgccacaacggttatgttctcttcgctgaagagggcttccccccagggaaggagacgcgccgccagcgcgaggcgttcatccgacacgtcgagaagctcggcgcggagttccgccagctcggggggcagtaccagttcaagggttgtttcttcgtcagctacggctcgacgcaggccggggacccggtctgaccgttttgcatcccggagttttcaccatgtcgatggaccgttcactcaagagcaaggcctccctgtcgcgtcaccgcaacgtccttacgcgaaccgagcgtatcaagcgactccgcgatgaggagcgcttcaaggacgggatgacgccggtcggcctgcccaaggtcgcgaaccgcaaggcccccgtcgccggcaagggcaagaagggaccggccaaggaaggcgaagctgctgctgccccgggcgcaccggcaccggctgccgcccccgccgcgaagtccgctccggccaagaaataaatagtctccacgcatcccgcgcggccggcaccttcagcggtgcaatcgaaaggggcgcggctgcgcggcgcttcgcgatccagcccggccctcgcccttttcgccccgatataatggacacctccagactcctcgccggccgcacgcgtaaagtcgagttctccggcatccgcaagttcttcgacatggccgcgcggataaagaacccgtgcgacctctccatcggcctcccagactacgacgccccggagcctgtcaaggacgccgcaatcgccgccatccgcgccggaaagaacaggtacacacccagctccggcatgcccgaactccgacagcgcctcgtcgatcagctcaagcgcgctaccgggctcgaccgctcgatcctgattacctccggcgtgtccggcgggctgacactcgccctgctcgccacgatggaccccggcgacgaggccgtcttcctggacccctacttcgtctcctaccttcagctcgttcacatggtcggcggcgtgcccaggcccgtcccctcctacccggacttcgcctttaaccccgaaagagtcgaagccgccatcaccccccgaaccaaggtcctcatgatcaacacccccggcaacccgaccgggcgtgtcatgacccagcccgaggtggaggcggcggcggccctggccaggaagcacaacctcgtgctgatcgcagacgagatctacgacaagctctgctacgacgggccgaaccccagcccgatggccctcgccccggaccatactgtcgtcctcggaggctacggcaagacctacggcatcacgggctggcgcatgggctacgccgcgggcccggcgtggctcatcgaggagatgacgaagtttcaccagtacacgtacgtctgtgccccgtccatggcacaggccgcgaccctcgccgccctcgacaccgacgtcagcggccaccgccgcgactacgccgccaagcgcgacctggtatgcaggctgctggccccccgcttcgccttcgagcgcccctccggcggcttttatgtcttcccggaggcccccaggagctaccccagcgccaccgccttctgcgaagcctcactcgcagagggcgtcatcgtcatccccggcggcatcttctccgggcgtgacacccacttccgcatcagctacgccaccaccgacgaaaacatccaccgcggctgcgaagtcctctcccgactcgctcaacgctgaacacgctacacgtgcatttagtacaattcaacgccgcccccgtgcgcgcaacaaaaaagccgcaggtcgtttgtgcgagctgcggcggtcgcctttcggcggtgcctgcgaatctttcgtcttgttgcgaaaaaccgcagaccggggtcgattacacttggcaagaccgtaacagatttggataatctcgtcaagggttatttactactaatcggtagcggggccagcgatgatcgtcttgggtctagacatcggcagcaattccgtaggtagcgcctgggtggacactgaaaacaaggtagtccgccttgcggccagcgtctttcccgccggggtggacgaacaggaggacaagcgcggcgcacccaagaaccaggcgcgtcggatgactcgttctcagcggcggaacatccaccgccgtgcgatgcggaagcgccgtatcgtcaacttcctgatggaccaaggactgctcccgcgcgaaaccgcggcgttgagcggtctgtacgattccgatccgtgggcggtgcggcgaaaggcgctgaaagaaccgttgacggtgcacgagttcggccgcgtggtcgttcatctttcgcagcgccgaggagcagtgggtgtgaccacggacccggacgaccccgacgaaggcaaggtcaaggaggggatggatcggctcaacaagctcatgcaggagcgggacgcggagaccatcggccaattgatggccgacctgatcgacgaacgtcggcgatcgcatgtcggcgtctcatggaacgagccagttcgcaatcggcagtatcgcatcgctgaagcagatcagctcttcgccggacgtgagttgatccgcaaggagttccacacgatcgtcgagagacagcggtccttcaaaggctccgaactcgctgccatgctgactgatacgttattcagagaattggacgatcctcggcagaccgatgcctggcgtcatcgcggcctgctcttcggccagcgccgcacctattgggacaccggcacgctgggccgatgcgacctggagccgacggaacgctgcgcgcccattgcggatcgccacgccagttattaccgcgtggtcgagacagttaacaacatcattattcgaacacttggacaatccgataggcccctgagtgagcaacagcgcgaagatgtgaaaaaactgctccgcggtcccctcggcgagcgaaagtctaagggaaagttgattcccaagacttcggtttccgcgtctgacattcgccaggccctcggcctgggtaaacgcaaaggcaagagcgatccagttcaactcagcatcgaggccgacgaggatcgcgatatcaataccgactggtttcaccgcgaaatcgtccatggcggcatcggcgaagtcgtgtggaacagttgggacgaatcccgaagagaaggtgtcaatcgcgccatactcaagttcgacccggacgaaccggacgacgcatcccgactccgcaaaggagcaatggagtggtgggaattggacgccgctgcggcggatcgactcgttgaggcgtggaagaatcgccccaggcttgaaaaacgcctcaacctctcacgccgtgcgatccggaaccttcttcccttcatggaagccttcgacaatgccaccaaccgctggcccacgcaacaggaagcccgaaaggctttcgccaagaccctgaccgacaagcacgcccgccggcgttatgagaccgccgcgccggggctcactgcgcgcgaccgctactacatgcgccagaagaagcaccagatcacggaaggcaccccggcattgccgcctgctccgacgctctctaacccggtagtacgcaaggcgattcacgaagtccgaaggcacgtcatcgcgtatctgcgtcagtacggtcgcaagcccgaccgtgtcgtcattgaaatggcccgcgtcaccaagcaatccgagcgccagcggaacgacgccctggcgcgaaaccgcgcgcgtgacaagattcgtaagaacattattgacgaagtcctgccgacggccttcggcactgctgtgtctcgattgtcgctcaaccagcaacgctcggccgtcgagcgcgtgatcctggcgcggcagcagacccagatttgcccctattgcggaaaagccggcctgaccgagaagatcgccgcaaagggcgacgaccttgaaatcgaccacatcgtcccctacagccgctgcggggacaacagcctcaacaacaaggtgcttgttcaccgcgaatgcaatcgcggaaaagcgaatcatactcctcgtgaatggtggcgcgctgaattcgacgagcgcattcaattcgcggaaaaactcttcaaggacgcggagcctgaaaagggagattacttccgcaagcgcgatttcgaccgaaagtggcagaacttcacccgcgaaatccgcgaaggcgaagagtggaaaaactcgcagctctccgacacggcctacgccgcccggcaggtcgccgcctacctcgccgacgcgctgtacgacggtcgcggcctgcccgagcgcggcgacggcgcagataggcagaggattttcttcacgatgggccgtttcacgtcaatgcttcgcagagactggcaactcttcgaaactctgaagccggactccggcggcatgagcgctgacgaggagttgctgctggccgaaaagaatcgtggcgatcaccgacaacatgccctcgatgcggttgcaattgcactcaccgagcccgacatcaagaaccgactctcatcctgggccgcgagcgctgcggaataccatgaaaaattcggaaaatggccgcgccgcgatgcgataatccctccatgggccgacattcccacttttcgccgacagatacttgcgctggtttatgatcgattcgatggtatctcatcagaatcagcggtggagcacaagcgactcacggtggcccatcgaccggtgaaacggcggctcgtgggggctttccacgaggccactctctatggcccagtcgtcgaaccgttgccgccgcaccgcaccgagaatgccgaaacactctacacgaatcggataagcgccgatcgactcaagcccaaccaccttcgtgttcccgaaggctgggatcaacaaagcgtattgttggacaacaaatcactcccactgaacgaaaaccgccgtattcgccggcaacttgcgtcgatgccagatccgccgcccggaaagtctggtatcgtccgagaccgcgcactgcgcgatcggctgcgaaagtgtcttcgagccgacggtctggacccagacgacttcaccgctaaccagctgaagcctctcatcaaagaaggtaggctcacgatggccagcggtgtacccatcaaaggcgtggttctgctccggaccaatactgatccgataatcatgccgcgcaagcgctgggacgccgcaaccaaccgaatggtgatcgatgaagacccgcggacgaagcgcgtctatatcggcggaaacaaccaccacatcgagatccgagaagacgacaggggaagatggacgggcgccatcgtcacaacctacgatgccgcgcgacgcgtccgcatccacaagcgcgacgccgtcgatcgatccgacaatgccgacggacgatttgtcatgtcgctcgccgaaggtgaaatggtccacatgaagcacccgcaaaagggctacatggactactttgtcgtcttcaagctcgacaagcccagaactgtccagttcattcatcactgggacgctcgcccaagcggcgagcgcaaggacttggacggcaagccgattcccggctcggcccgtgaagagattcccatagtcgttggcaagctcaaggacctcggccccgaaccgggcaaaccacccctaaaagtccgcgtcgggccgcttggggacgttactgtgcttgaaaaggactgaaagccgcgcccttttcggcccgatatccgaaccgccggagcatcgggccgtgatcaagcgaaccattgaaatctcgcaacgggccgcgtatctggccgtacgaaacggccaactgctgatccatcctcgcgacggggaccgtgacgccctgcttggacagacgccatgcgaggacgttggcgttctgctcgtcgatcatcccgccgtcacttactcccacgccgctctggccgcactgctcgaacacgatgccgccgtcgttctatgcggccgcgaccacctgccggccgggctgttgcttccgatcggcgagcattcgcaggtcgtctggcgcattcgcctgcaactggctgcgaaacgccctctccgaaagcgcctctggcggcagatcgtccgggccaaggtccgcgcccaggcgctcaacctccccagcgggtccgacaccagatcgaagctcctcgcactcgcgcgaaacattcgctctggcgaccccgagaacatcgaagcgcaggccgcccgcgcctactggaacgcgtggcgaagcgcgctgggcgggacggacttccaacccgcaaacagctccttccggcgcgaccccgacgggccaccacccaacaacctcctcaactacggctacgccgtcctccgtgcggccgtggcgcgtgccatcgtcgctgccgggctcctgcctgccatcggcattcaccaccggcaccgcgccaacgctttctgtctcgccgacgatctcgtggagccgctccggccgatggttgatgtgcgcgtggcagatctcgtccggggcggggagacggagctttcacccgacgccaagcgcgggcttctggaattattgacggtagaggtccgcgccggcgaccagaccggccccctcatggtcgccctgcaccggtacgcggcgtcctttgtgaagtgccttgagggcctgtctgagcgcctggagattcccatgcgcgccggcgagaacgattgagccatgttcatcagcgggtaccgttgcatgtgggtcgtcgccatgtttgatttgccggtggacacgaaatcggcgcggaaggcctacgcgcagtttcgcaaggctcttcttaaggatggcttttcccgaatgcagttctcagtgtatattcgccattgcgcaagcgaggagaacgccgatgtgcatgtgcagcgcgtgcagggatttctgccggacgacggagaggtgcgcgtcctcaccatcaccgacaagcagttcgagcgcatgcgcgttttctggggaaaacgccgcaaactcccggctcgacctccccagcaactcgaacttttctgactgggcctgctcgcaaatccttcgcggaaagccgtttacgccggagctagtgtaatcgaccccggcctgcgagcaatccgcaactccgcacgcgatgctatgatt

SEQ ID NO: 2998 - DNA, 8566 bp, synthetic construct
  misc_feature 1..8566: note = Synthetic
  source 1..8566: mol_type = other DNA
cacttctcaccggccgggggcacctccgcgtaagttatgcttcagcgtaacacggagggagttggtgccgcggctcgaagggcaccctacgacgactacctcttccgccgtctcttgccggaatcgagccggccggggaggtcctcggagctgcaagccccgcaatagtacttgccgccctgccaggaatatccgccttccccaagcacgatcacgctgccgcagccggcgcagcgggtcggctcgtaggtcggcgggttctcgagtttctcgaagttgtactcgttcgtgccgtagtagacgtgcatctccgtctccattcccttagggcaccgggagcagtccttccagtgtccctcgtgcccttcggcatgatgaaagccgcagagcgtataacggcggtgattgcgatggcaactgttccgggcgtaggagaacaggacgtaggagtcctcatcgtcacagatccagttgccgcagcattcggtccgtgtgaggttcttggtcctgccgcacagtccgcaccgcggcacgcccgcgccgcgggcaggcttggctcgtttgctggttttccgtttcatgctcgctttcctccctggactgcacaggccggcccgcgaggtccacgtcccgggccgacaggacttggagtaccacgtcctcgcctacatctcatagccctgggcgagccagtagtgccaatcggcgacggcttccctggtgtccttgtcggccttcgccccgggcttcaattgcgacagcgggacggccagtttccggccctcccagcgcagggcgacgaacatctcgtgcccgcactccctctcaggcgccatggcgacgacttcgaccttctcgcccttgcgcaggggcgaaaccgccctctcgccgatgcaggtcgcgaggaacggaaagccgagcttctcctcgaggtagtagtaccagcccatggcctgttcttccgggccattggcatcgaccacgatctcctcagaaatccgctcgtcgcgcttggaatctctcctgggcctcgccataccggctcctccgatcttccccaacccatcctacacgctgccgaccgcccaccccagccgcaaaacaaaaacgccgcaggtcgtttttgcgagctgcggcggtcgccgctgggcggtgcctgcgaatctactccccacaagggggagtcgccttgttgcgaataaccgcaggccgggatcggttacacttgaagtcaagataccgcccggctaatctcatgtcaagcactcgtcagttgcgatttctgggagggcctcgcatgccagcctacctaggtctcgacattggttccaactcggtcggcagcgcatgggtagacaccgatggccaggacgtgcacttggcggccagtgttttcccagccggtgtggacgaacaggaggacaagcgcggtgcgcccaagaaccaggcccgtcggcagacgcggagccagcggcgcaccatcagccgtcgggcatgccgcaagcggaaacttgcccgtttcctcatcgaacgccatctgctcccggccgatccggcagaactgcaaaaactctttgatcttaacccctggcatctgcggcggaaggcgctgagcgagcccttgtcccggtttgagttcggccgggtggtgatgcacctggcccaacgccgcggcgccgtgggcgtcattaccgaccctgatgacccagacgaaggtaaggtcaaggagggcatggaccgactagccaaggagctggagcaggccgggccacagaccaccgttgggcagtttatcgcggatcgcatggaccagtcccgtcaaccgatccagcgcaccccggataaggaatgctcccgcgggacccgtcgtcgccgcaagagacaggcgaagcggtgggcagaacgaggcgagaagccgccggagccgcactatctggcgccgatccgcaaccgccagtaccgcatgccggaagatcagtacctgttcgccggccgcgagtcgattcgcgaggacttccaccgcatcgtcgaagtgcagcggtccttccaacactctgaactctctgccatcctgaccgatgaacttgtgcggcaactcgacgacccgacgcagaccgacacctggcgtcaccagggcctcctcttcggccagcgccgcacctactgggacaccggcaccctgggccgctgcgtgttagaaccgaccgaccgctgcgtccccatcgccgatcgccatgccagctacttccgcgtcatcgaaacggtcaacaacatccgcatccagaagcgcggccatgacgaacgcccgctgaccgccgcggagcgcgaacaggttatccggcttctacgggggccgttgttcaagaagcgcaagggcaatcttgagcccaagtcatcagccagcgtcaccgacgtcaaggaggcccttggcatcaaggcgcgcgacaagggtgtgagattgaacattgaggctgacgaggagcgcaaacccaacaccgactggttccactgcgaaatcgtccacggtgcgatcggactggacatctggtcccgctgggaggaggccgagagacgcgaagcggatcttcctaagccacagcgcagcccggaagctcagcgcccggaggcggttaatcgagccatcctcaagttcgatccagacgaacccgccgacgagaaaagactccacgagctcgctacgttacgctgcgggctagattcagccgccgcggaacggctgattgcagcctggaagcagcgccccaaactggaagaacgcctgaacctctcgcgccgggcaattcttaatctcctacccgatatggagcagttcgacgaccaaaacaagcgctggcccacgcagcaggcggcccggaaagcctatgccaaggtcctccaagagcgatttgagcagaccggcaaccaggctgatcggatcgccgcccagcgctacgacaccgccgcgcccggtttgaccgcacgcgcccgctactacatgtgcctcgaaaagcaccagatcaagcaaaacggtgaagtcgtgcgcgacggcgaaggccgaccgctcgccctcccgcccccggcccccaagctctccaaccccgtcgtccgcaaagcgatccacgaggtccgccggcatatcctggcctacctgcgcaagttccgccgcacgcccgaccgcgtggtgattgaaatggctcgcacaaccaagcaatctcgtgtggtccgggacgaacaacttgcgctcattcgcggccgggaagctgagaagaagaagatcattgcagaacactcgctatcaggtaagtccttaaaccaacagcgcgaggcagttgcccgtgtgctcctttccaagcaacagcgtgagatttgtccgtactgcgggaaagccggccttacgccgcgccttgccgctgaaggcgagggcctccagctcgatcacattattcccaagagccggggtggcgaagacggtctgagcaacaggctcttggtccatgcgcactgcaaccagggcaagctcaaaaagacgccaaaggaatggctcggcgaccgcttcgaaagtgaccttgtccctcgcctcgaagatttcaagaaagcgttcaggaccgtgcaagcggcaaagtccaggccgaagaagcccaacgcgcaaaagcgcaagcgcaagccaccgctggggcccgacggctacttcacacttcgcgagtatgcgcgaaaatggcagaacttcacgcgaacagtccggccggaggatgaattcaggaattcacaactgaccgacacggcttacgccgcccggcaagtggccgcatatcttgcggacgccctctttgacgggcgcgggctgcccgaacgcggcgacggccaagcaaaacagcgcatcttcttcaccgtggggaagttcaccttgatgctgcgtaaggattggcagcttttcgagaccctgaagccaccgcgccgcgatggccgccacggcgagctcaccgctgaagacgagtccaaactcgcggagaagaaccgcggagaccatcgcgaacacgcgatcgatgcggtcgcaatcgccctcaccgctacggacataaaacagcggctcgccagcgaagcagccgaggctgcggaattctacgacgaacaccgacattggccgcaaagcaaggacaaagaacactgccgcaagtgcctcgattacagggcgaaaaacggccgctggccgggtaagggtcacatccccattgatccggagtgggggaccgtgccgcgtttcagggcgcaggtccttcgaatggtgtacccgcgcttcgactccagtgagcacgcctcaggaaggcgcgaccaacccggagggcctgacctgataatcgtctcccaccgcccggtcaaacgccgcctcgtgggccacttgcacaaacaaaccctttatgggccggtcttcgatcagaacggaaaccggatcgagaatcgaacttccatcaggcagccgatctacgagagcccgcaatcacacctcacaccgaaacatgtaagactgccctgtcccgaaacccgcgagcaagccgtgaagaggatcacggatgaacttcgcaaggatggaatgaaggcgcgcgatgcgaagcaacgagctctggaaatcgtcgctgggccaaccttcaagcttcgcgcggttgacccgccgcccggcaagagcggtattgtccgcgacttggcgctccgtatggttctgcgcaagtctttggaggatcgaggactcaaacccgatgactttgcgcccaaggagctgaaggcagtgctcgaccgcgatggcccgctttgccagcccagcggcgtcccaatcaagagcgttgtcctgctctgggccaacaacgatccggtcgtcttctatcgccgcaatcgcaaagcccccgacggacagacggaggaggacgaggatccacgccgacgagagcgtgaagtccggatctacgacagccagaacaatcaccacgttgaaatccgagagaacgcaaggggcgaatggaccggaaaggtcattcccgcacaccaggccgcatcaagattgcgagcacggctgcgagccctgggcgcgctggagaagccgttccggcacttgcggcggaagttgcccaaacgtcttggcctgggcctatctgaagaagcccgcagagagcttcgatccaacaagagccgggcgaatctggccgagtggaagcgcaagatgcgtgacctgaagccggagcgagcgcgcgtcatcgccgagcatccgatcgtggaccgatccggcaacgaccaaggccgctttctcctctccctggctgaaggcgagatgatctacgcccggcgcaaggatcgacctgacgaaccggccgagtattacgtcgtctgcaagctggacaagtccggcaactcgtcgcgcattcacttcgccccccactgggatgcccgcaaggccagcgaacaggaccgctgggatgtcacccccggcgatctcaaggactgcggccccgaacccggcaaaccgccgcaaaaagtccgcgtgggccccttgggaaacgtcgtcgtgctccagaacgattagaacgattagccggcatttcatggctggacatgcccgggcgtggtgattacactatagtcattcgcccggatgcgcgttcggcccccacggacggtcccccaaaggacccgttgggtaaagccgtcggcagatgatcaagcacaccatcgaagtctccagcgaacccgcccacctcaccgttcgcctcggccaactcctgctgaagaacggggaccgtatcctcggcagcatcccctgcgaagacgtgggggtggtggtggtcgacaaccccgccgccagctactcccacgcggccctggccgcgctggcccgctgcgacgcggtggtcgtcgtctgcgggcccgatcacctgccggccgcggtgttgttgccccttgccgatcactcgcaaatcacctggcggatcggcgagcaagtggcggtgagccggccgctgcgcaagcggctctggaagcaattggtccaggcgaagatccgcgcccaggcggccaacctgcccgcggactggcccgcccacgcgaagctcctcgacctggcccggcaggtccgctccggcgacccttcgaacctcgaggcccaggcggcccgggtttactgggacaattggctcccggaaaccgacttccgccgcgaccgcgacctggccggagtgaacgcgctcttgaactacgggtatgcgatcctgcgcgcggccgtggcccgggcggtgattgccgcggggctcctgccggccctcgggctgttccactccaaccggggcaatgcgttctgcctggccgacgatctcatggagccgctccgccccctggtggacgatcgggcccgccaactcttctggcaggggtacgaaacgctgacccaagagaccaaggcccggctgctggagctcctcagcgagccggtccgtttcgccgaccgccgcggaccgctgatgggcggcctccatcgcatggtcgcgtccttggtgcgatgctaccaaggggaggccaggcacctggagatccccaaggcgtgctagtcaacgggtatcgctgtatgtgggtcgtggcgatgttcgatttgccgacgaagaccaagccagcccgccgcgcgtatacgagcttcgtgaagcacttgcggcgcgacggtttcacccggctccaatactcggtctacgggcggcactccgcgagcaaggaaaacgcggaggtccacatcaagaggatcgagcgcaacctcccccccgatggagaggtgcgcatcatcaccgtcacggacaagcagttcgagcgcatggccattttctggggaaattcccgcaaacctcccgagaaacccctgtgccaattgcagcttttctgatcgccgtcttgccgcaagtcgttgcgcccgcggaggttcgggaccaagctagtgtaaccgatcccagcctgcgagcaagccgcaacgacatgtcgaacagcgtgttcgcgcagaccagtgtaaccgatcccagcctgcgagcaagccgcaacacattggagcggctggccgcggcactcggcagtgtaaccgatcccagcctgcgagcaagccgcaacagttcctgatgaacgatccccagggcagccagtgtaaccgatcccagcctgcgagcaagccgcaaccagtagttcgtcccatcgacgctgggcaggagtgtaaccgatcccagcctgcgagcaagccgcaacgcgtggtagcgaggtgacctggccttgactagtgtaaccgatcccagcctgcgagcaagccgcaacgcagtcggtggacttgaagtcgtggaagatagtgtaaccgatcccagcctgcgagcaagccgcaactcaccacagatggtttgtcggaaactacaagtgtaaccgatcccagcctgcgagcaagccgcaacacgtcgcacccgtactgtgcccggatgctgagtgtaaccgatcccagcctgcgagcaagccgcaaccgctcgttctgtcggtgggaagcggctcatagtgtaaccgatcccagcctgcgagcaagccgcaacaggttgacaggtggtctgaagcactgacccagtgtaaccgatcccagcctgcgagcaagccgcaacatcgcgggcatacgccgccgggtcgaggatagtgtaaccgatcccagcctgcgagcaagccgcaacacattcgctggcggatgctgacgtgggagaagtgtaaccgatcccagcctgcgagcaagccgcaaccgagtcgaggcgggttgacaacccgccctacgtcacacatccagattcctcgcctccagctcgtgtttctcgatggattcccggcgaggctcgacttggtcggcgatcaggggggaggagggaaagaaggctcattggtccttctcttccaggttgaaggcgattcgcccgctggggttgcgggtgcgggtgaggcggtagcgggcgttgagcacggaggagtattggcagccgtcggggtcggtggggacgggctcgtacgcggtcgggccgcgacggtggagctggaattgaaggtccggggcgcgggcgtcgatcagccagaactcgccgacgccggctcgatggtaggagacgggcagacgctgggtgtccttgcccaccgaggcgtcgctgacgatctcgacgatcaggtcgggcgggccctcgaattccaggtagcggtcgggctcgcgggaggcccggggcaccagccgcacccggccgctgtcgagcgaggtctcggagacgaagagaacgtcgggctcggccgatagatcggcgtcggggcaagagactcgggcccggtccgtgtagagctcgccgaggctcaactctctgacccggccggccaggacgcgaacgatctcaaccttcaatttcccgtgggtgtggaggtcttggggagacatgtcgacctcgattcgacgggagatgtagtcaatccggccgctttcggggaagtcgtccgagaaggcctaacggcggaaatcggccagcgaccggatgtcgagcgggat

SEQ ID NO: 2999 - DNA, 7178 bp, synthetic construct
  source 1..7178: mol_type = other DNA
  misc_feature 1..7178: note = Synthetic
ctacttctggaacgccagcaccgcgatctactacctgctgcgccacgacgccgacgccacggagtcggataaagtctgccccgaggaagaaccttccccgcagaccgccgaggccaagacttcggccgctccgacagcccccgccggtttgccggaaagccaggcggagtgagcgtctatcgtccgggcggcgtttctcgcccaccgccccgctgacacccagccgtcgctcgtttccgtggctgacgcctgcgcccatccagcacccatcgcgcgtaaaaatgccgcaggtcgtggttgcgagctgcggcggtcgcctgttcggcggtgcctgcggatttactcccaaaaataggggtcaccttgttgcgacaaaccgcaggccgggatcggatacacttgctcgaagcctaaccggtagttagtctcgtgtcaagaggctgcccgttgcaaatccttggggggcgaccgagatggctgtatacttgggaatcgacatcggttcgaattcggtcggcagcgcctgggtggacaccgacacgcagcgcgtccatgcggcggcaagcgtctttccggcaggcgtcgatgaacaagaggacaaacgtggcgcgcctaagaaccaggctcgccgccagacacggagccagcgtcgcacgatccgccggcgtgcccgccgcaagcgtgtgcttgtccgttttctcgtccatcgccgactgctcccggcagatcccgcggagctgaaccgggtgctgaatctcaacccctggcacttgcggcgaaaggcgctcgccgagccactgtccccgtttgagttcggccggatcgtgctgcacctcgcgcaacgccgcggcgcggtgggcgtcaccaccgaccccgtcgatcccgaggaaggccgggtcaaggaaggcatggaccggctggccaaggcgatggccgaaacccaggcgcagaccgtgggacaattcatcgccgaccgcatggacgagtcgtcccaaccgatccagcgagtccctgaccaccaatgcgctcgtcgcacgttgcaacgtcggcgccgccaagcgcaacggtgggctcagcacggccaaaaaccgcccgccccgcggtgtcaggcccccatccgaaatcgccaataccgcttgccggaatccgaactgctttttgccggccgcgacctgatccgccgcgagttccaccgcatcgtcgaagtccagcaatcttttcgggagtcccagctttcggacctcctcaccgacgaactcgtccggcaactcgatgaccccaccccgacgcgcacctggcgccatcgcggcctgctgttcggccagcgccgcacctactgggacaccggcactctaggccgctgcgttctcgagcccaccgaccgctgcgttcccatcgcggatcgccacgccagctatttccgcgtcgtggaaacggtcaacaacatccgcgtccagcggcgcggcgaggaggaacgtccgctgacccccaccgagcgacacgaggtcctccgccttctccgccgacccttgttcaagaagcgcaagggcgccctggtggcgaaatccgcgcccaccgtgagcgacatcaaacaggcgttgcagatcaatccccgggacaagaccgtgagattgaacatcgaggccgatgaggaacgcgaaatcaacaccgactggttccatcgcgaaatcgtccacggcgcgctaaccgaggcccgttgggatgcgatgagcgaggtcgatcgggaatccgtcaaccgcgctatcctgaagttcgaccccgaccagccggaagacgccgagcggcttcgcgcgggagcggtcgcctggtggcggctcgacgacgcggccgccgaccggctcctcgccgcgtggaaacagcgcccgaagctggagaaacgcctgaacctgtcgcgccgcgcaatcctgaacctcctcccctatatggaacaattcgacgagctgcaccagcgctggcccacccagcaggaggcgcgcaaagcccacgccaaagccctcgaactccaggcgctgacgaccggcaacgcggccctccgcctcgccgcccagcgctaccgaacgggcgctccgggtttgaccgcccgcgatcgctactacatgcggctctcaaaacaccagatcaaacaagacggcgacatcgtccgcgacgccgaaggccgtcccttggccgtccttcctcccgcccccacgctctccaatcccgtggtccgcaaggccattcatgaagtccgtcgccacttgctggcctacttgcgcaagttccgctgcaagcccgaccgtgtcgtggtcgaattggctcgcgtcaccaagcagtccgaacgccaacgcaatgcgatgctcgcccgaaaccggcatcgcgaaaaaatccgcaagcagatcatcgacgaagtcttgcccgcgcccgacgccttcggcaaacagggcgccgaaagcctctcgctccatcagcagcgctccgccgtcgaccgcgtcattctcgcccgccagcaaaaacagatctgtccgtattgtggacaagccggactcaccgatttcgtcgccgcacgcggcgacgacctggaaaccgaccacatcgtgccctacagccgctgcggggacgacgggctgaataaccgcgtgctcgtccatcgccgctgcaaccaaggcaaggccaaccaaacgccgcgcgagtggtgggggcccgcgttcgaccaacgcatccgcttcgccgaacaactgttcaaggacgctccgcccgacaaattcgactacttcaccaaacgcgactatgatcgcaaatggcaaaacttcacccgcgaagtccgcgaggaagacgaatggaagaactcccagttgaccgatacggcctacgccgcccgccaggtcgccgcctacctcgccgatgccttgttcgacggccgcggactgcccgaacgcggcgacgggcaagaccaacaacgcatcttcttcaccgtcggaaaaatcaccctcatgctccgaaaggattggcagctcttcgagaccctcaagcctgaacaaaccggcttgcccgaaccgctcgcggccaaggaagaactgcaacttgccgagaagaaccgtggcgaccaccgccagcacgccctcgacgccgtggccatcgctctcaccgaccccgcaatcaaacacgccctagccacttgggccgcacgcgccgccgaatacagggaccggtgcggaaaatggcccaagcgtgccccctttccccctccttggggcagtgtcgcgtctttccgacgccaaatcctggcccaggtttatcaaaacctcgtggtcgcccatcggcccgtcaagcgccgacttgtcggcgctttgcacgaggaaacacactacggaccggtcatcccgccgctgccccgccatcgcgccgaacatcccgactccttgttcaccaaccgcattcccgcagtccgcctcaccccgaatcacctccgaatgcctgaccagtgggatgaatggagtcgtcggcttgaagaccccaacttgccctcccacgaaagacgagccatcctcaaacgactcgccgccatggaagacccctcgccgggaaaaagtggcatcgtccgcgatcgcgccctccgcgaccgcctccgcaagtgcctgcaaaccaacggcgtagaccccgatgactttaaccccccccaaatcaaaaagcttgtcgccgacggaaaactcgccatgcccagcggcgtccctatcaaaagcgtcgtcctcctccgaaccattgccgatcccgtcatcgtcccacgcaagaaactggatccgatcaccggcacgctggtccccgacatggacccagccgacccaaccaaaccgaatccccggaccagacgtgtctatatcggcggcaacaaccatcacttggaaatccgacaacgccagcgccaacggcagggacaactcgtcgaggaatgggtgggccacgtggtcagcgcctttgaagccgccagacgcgtccgcctcgaaaaacgcgacgccgtcgaccgcgccgacaacgaacacggcctgttcgtcatgtctcttgccgagggagagatgatctttgcccgccgcaaggaccggcccgaagaaccgcccgactactacgtggtttgtaaactcgacaaggccggaaattcatcccgcatccatttcgctcctcattgggatgcacgcaaggcaagcgaacaggaccgatgggacgtaacccccagcgacctcaagctgtgcggtcccgagcccggcaagccaccccaaaaggtccgcgtgaaccctttgggcgaagttgttgtgctggacaaagactagaaagatcgagcaagccaaacccgcctcgccccttgccacgggcagccacaagggatcgggccaacttcctcgcgcccaccgtgcagaggggctcagcataaccgcattcggagccgccgccaggcgaagtcgccaaacatgaaaagagggctgtttttttctggacaacgcccgccgaggtgattatcctgcaacgtgtacgccaggatgcggtcgagcccccaaggatggtcctaaaaggacccatggggtaaagccgccgaccatgatcaagcacaccatcgaagtctcgcgcgagccggcgcatctgaccgtgcgtctcggtcagttggtcctcaagaacggggaccgaattcttggaagcgttccttgcgaagacgtcggcatggtcgtggtcgacaaccccggcgccacctattcccacgccgccctcgcgacgctcgcccgttgcgatgccgtcctcgtggtctgcggccaggaccatctgcccgccgctgtgctcttgccactggccgatcactcccaaatcacttggcggatcgctgaccaggtggccgtcagccgcccccgccgcaaacgcctctggaaacaattggtccaagccaagatccgggcccaggccgccaatgtccccaccgattggcccgcccatgccaaactgctcgatctcgcccgccaggtccgatcgggcgaccccgccaacatcgaggcccaagctgcgcgcgtctattgggacaactggctccccgaagttgcttttcaccgcgatccgaatcaagcaggactcaatgccctgttgaactacggatatgccgttctccgcgcggccgtcgcccgcgctttgatcgccgccggactactcccatctctcgccctgttccactccaaccgctccaacgccttcggtctcgccgacgaccttatggagccgctccgccctttcgtcgacgatctagcgcgcgagttgttccgccaaggttacgaagaactgaaccaggaaaccaaggcccgcttgctccaaatcctcgaactgcccgttcgcctgggccgacgtcgcggccccctcatggtctgcctgcatcgaatggtcgcctcgctcgtccgctgctaccaaggcgaagaaaaacgactcgaaatcccccgttcctcctgataccgaccgcaaacgcctccacgcttcacgcaaaaaagacaaataagccctacgcataagattatgccagacccctatgaggtgccgatcaaccccagctcaatagtctgcccccgcttgctctgccgcaaagcgagtcagattgccgagcggtttctcgaacggatgcccggagtggcctcccctccggaggcaatcccccgccagcaagtccaaaccacacaaccgccacgcatttaaccaccacgataatcgcagtaagcacccattcgctgtggggaagccatgttggtcagcgggtaccgctgtatgtgggtcgtggcaatgttcgatctcccggtcgacaccaagaaggcccgccgggcatatgccaatttcgtcaagcaccttcgccgcgacgggttcgctcggctccaatactccgtctacggccgacactctgccagcaaagaaaacgccgaggttcacatcaagagaattgaacagaacctcccccccgatggcgaggtgcggattctcaccgtcaccgataagcagttcgaacgaatgctggtgttttggggaaaaaaccgcggcagcccggaaaaacccctatgccaattgcagcttttctgaccgccctctgctcacaacccctttgctcgcaaccacttggggatcagcgagtgtatccgatcccggcccgcaagcaagccgcaacgggtcacgaacgccacgtgcggtccgtgggagtgtatccgatcccggcccgcaagcaagccgcaacaggagcggccgtattgcccgcgatgcctggagtgtatccgatcccggcccgcaagcaagccgcaacaaggtggaagtgggttccacctgggaagcgagtgtatccgatcccggcccgcaagcaagccgcaaccatagcagaatggggtcgaccagcaggcgtagtgtatccgatcccggcccgcaagcaagccgcaacacacggagcggtgcgcaccccagcgcggaagtgtatccgatcccggcccgcaagcaagccgcaactgtgccgatcagtcacccggatgtccagatagtgtatccgatcccggcccgcaagcaagccgcaaccaaggacgccaagcccaacctcgaccgcgaagtgtatccgatcccggcccgcaagcaagccgcaacatggccgatctcctactcctgtaagacgaagtgtatccgatcccggcccgcaagcaagccgcaaccgccgacgaagccgcgtacgaaatcgtcaaagtgtatccgatcccggcccgcaagcaagccgcaactggcggaccatgtagccgtccaccaacggcagtgtatccgatcccggcccgcaagcaagccgcaaccaggacctgggccatctcctcctgcgtgcaagtgtatccgatcccggcccgcaagcaagccgcaacgccgcgatagcgggcgaggccggtggcctcagtgtatccgatcccggcccgcaagcaagccgcaaccgcccgtcgctcccctgcacctggcccgctagtgtatccgatcccggcccgcaagcaagccgcaacgcggagggaggaccgccagcggctcggcagagtgtatccgatcccggcccgcaagcaagccgcaacgcccgcgccaaaacgcaccctccgccgccgagtgtatccgatcccggcccgcaagcaagccgcaacagtgagagaacggca

SEQ ID NO: 3000 - DNA, 23165 bp, synthetic construct
  misc_feature 1..23165: note = Synthetic
  source 1..23165: mol_type = other DNA
acttctggatgaacctccttcattagatagcacattggcaattcctccacttactgtagtcgaatcaatcagtgttactaaatcggctccaaatctggatcttaagtcatatatgtttacggtatcgtccggggcatttacataaaaattataagtattatcatacaaggagttaagtatcctataatttacatgttccgtaggtccattagattcttgatgtgaatttgcgatttcaactgtgccaacaaagcggatctttaatgccagatttgagttgtcaattatttcattctttttactttcgtttaaggctattaattcatctatatcaaaaacggaagtatcattttcagcccatttctttgctcttgttgtatagagtaccagcaagtcaacagttgttgtatctgaataatcttttatatcgtaatcgtcataattcagcgatttgtttaaaggctgtttatcagcaacatgttcaacatcacaaataaagcccgtttctgtaacctctgtaaaatataattttcattgaagtaggagagcttaaatagttgatcttgaatattaaagagtcctgtgatcctgccatttttgattaaaatatgactggaacctgattgaagggtagggctggttatcaatcctctataaccatttgacaagttttggatcttgctaattggctgtaccagaacttggtcatcaaacataatttctaacgaattctctgttttaagatcctttgataatagctgatcattgatagttacggcatatttaaagcttccttcagttttatttttatctgatgagaaagtgaaatcctgccccaaaacagagttagccatgcatatagacaaggcaaaaagaactattttctttatatcgatcaaatttggggagtaggattagaacttaatctaagttaagtaaatttaaactctttcaataaaaaaagcccgtcaataaattaacgggcttttaaagtatatattttaggctactaaatttacctcttcatagcatcttcaattaaagcttcttgttctgcttcatgaactttcttttgtcctgcagcaggtgaagctgaagcatgacgaccagcataggttagtttttgcccatcttccagaagatccataaatcgaggagctacaaatgtccaggcacccatattctttggctcttcctggcaccaaatgatctccttcacatttttaaaagatttcaattgttctgcgatatctttatcagggaatggatagaactgttccagacgagcaatagctacatctttgatttcattctcctggcgatacttcaatagatcgtaatacacttttcctgaacagataaccaagcgttcagcatttgtaacttcaggatcagaaataaaaggctggaattttccttctgccaattctgtggtattagaagtagccattgggtggcgaagcagactttttggagtcattaacacaacaggttttttagcttcttgaagtgtttgctttcttaacatatggaaatactgcgcaggggtagtcagattcataacctgcatattatcttctgcacaaagctgtaagaaccgttcaggtcgagctgatgaatgctccgggccctgaccttcatatccgtgaggcagattgagtatcagcgaggtagtttgtccccatttagcttcgctcgatgaaaggaactgatcaataatgatctgcgctccattcacgaaatcaccgaattgagcttcccaaataaccaaagcgtctttcttttgagcactgtaaccaaactcgaaacccattgcggcatattcacttaataaactattgtgaacatggaaaaatccctgatcatcagataagttgttcagtggagtgaatgtttgattggtttcagtaccatgtagaacagagtggcgatgtgagaatgttcctctttctacatcctgaccggtaattcgtacggttttaccagatttcaaaagcgagccaaacgctaatgcttcggcaaatccccaatcaattttgttgtcattgttttctactacttccgcacgtttagctagcaagcgcagaagtttaggattggcatcaaagtcttttggtaccgtattgatcttaaccgcaatgtctttcagctcgtcaacagggtaagtagtatcagggaactcaattctgtttttctgtagagattctgttctgtcgatgaaatcgtcagtaatatcaacttttggagcttctttggcatcttcaaacgcttcttgaaggagcttatcaaattcatcaaagatctgttgagtttcttcttctgaaagctcatcattctttactaatgcttccgtatacagatctcgtaccggaggatggtcgttaatttctttgtacatacccggttgagtaaatgcaggttcatcaccttcgttatggccatgttttctgtagccaataagatcgataataacatcctttccaaacttctggcgatattctaaagccatttggatagcatgaactgcagcttccggtttgtcgccattcacatggaagataggcgccagaatcatcttagctagatcagaagcatactctgtagatcgtccgtcttttggaagagtcgtaaatccgatctggttatttatgataatatgaatagttccaccggttttatatccttccaattgagacatatttaatgtctccggaactacaccttgtccggcaaaagcggcatcaccatgcataagcacgggaagtactttttgttgtgcattttcactttcgtgatgatcttgcatggcacgaacggcaccttctacaaccgggtcaacagcttccaggtgacttggatttggcatcaattcaagctgaagttcttttccttctgctgttttatgaataccctttgtacccaagtgatatttaacatcaccggaaccttgaattgaatcaggatcgataccgccttcaaattcggcgaatactttatgataaggcttgttcaaaatgtttaccagaatgttcaaccttccgcggtgagccattccgaaaaacactttttcaacgtcattgtttgcagcttgagaaagcatggcgtcgatcattggaatcaatgtatcagccccttccagagaaaaacgtttatgcccgatatactttttatgaaggaattcttcaaaggccattgcctgattcagtttatgaagaatctgctttttgtcgtctttatcaagattggctttgttggcactgctttccattctttggcgcaaccaacgacgctcttcaagatcaagcaagtgcatatagtctgcaccaatgtggccgcagtaggtatcgcgcaataatttaatgatctcacgaagcggagctttttcttttccaccaaatccaccacaataaaattcacgatcaagatcccaaagtgaaagtccgtaatattcgaggtcaagttcaggcacatgtttcggttcttttccgagaggatccagatccgccagcacgtgaccacgcattcggtacatattgatcagtctccaaacgccgattgctcgtttatcatattccagagaatctgtatttccgccaaaaggtcctgaataggtatctgctgaatagggtataggctcataaggaatttcgagatcggcaaaaatttcttcgtagaagttttcctgacctgtaagcagatcgttaatttttttaaggaatgaacctgattctgcaccttgaatcacacggtgatcatacgtacaagtcaccgtcataactttactgataccaagctgattcaaaatatcttttgacatagattgatattccgccggataatcaatcgcaccggtagcaataatagcaccttgaccttgcattaatcttggaacagaagaaacggttccgatagtacccggatttgtaatactgatggttgttccctgataatcatcgatctggagttttcctgaacgagctttatcgatcaactcagcgtatgcatgcaggaattccataaagttcattttattaacgccctttatgttaggtacaaccagatttctgctgccgtctttattaggaagatctattgcaatcccaagattaacctggtcgtgcactactttatagtgattgtcaccatcaaaatgatacgcgttattaacacccggaaattcttccaatgccttgatgattgcccatgcaataaaatgcgtgaacgaagcttttggctcatttctttgcaaaagatgcgtattgataaccgttctgtcttcgatcatcattttaaccggaagcactctcaatgaagtagctgttggtacttggaggctaagatccatgttctcaacgatcttggttgctacacctttgatcttttcgagttgagcatttttaggagcattagcagaacctgaactttctttttttggtgctttttcctgttttgccggagcaggagcggaagcttgttctgttttttgagaagattctccgttaacagatttaccttcgtgttcatcgaagaagtttttccaatgggcaggtactgagttaggatcttctttgtattggtcgtagagttcttcaactaaggctgaattaggaccgaaaacggcttcaagagatttcaatgggtgttaacctcgtgcggattttatgcaactaaatgaatctgattgtttgtgttgtttgaaaatttgatcatgaatggtgaagaaatttgcaaagcacttaaaattaaggattacaatcttaaaaaacgatatttcttctgttgattctcattatagataaacacaaagatttcgaaggaatagtttccataaaaagatctaaagtatttggctaattctctttcaacaatttgagggataatgcggagcggagctcctgtgtttcattccgcaccggaggtgctgaacgaggttaaaataaaaaaggtctctattttttgatagagaccttctacgatgaaatacttgtctatttaattagcgtcattcgctttgtaatggttgtagagcctgaagttagcctataaatataaattccacttgaaagaaaagatgcatcaaatgtaacagaatgtgtgccggcagacatttgactagatacaatggttgaaacttctctgcccaacatgtcatatacttttagacttacttcgccagattctggaaggctaaaatttatttcagtagtagggttaaaagggtttggatagtttgtaagttgaaaatcagaaggtttttcaatttcatcgcctattataatctctttactcttagctaatgaattactttctttaggagcattgatatgtcccaaacttgcaattacagtctctttgaaattataggattccagtttcagtaaagaggctagatcttcagttaagctttcagaagggatttctattatataatcctcagaatcattatcagataatgtactagataaagttatcaaactactacttcttcccgaagattcattaacgttcccaactaaaagttttggtaacttaccatctttaaaaattgaagaaacattatttcctctaatctgaagattaaaatctagagctgtattggttagctcagttggtttttcaatactgaatgcatccaaagctttttcaatacttaagtctatagaatcttgatgaaacgacttcatcgaaactgaacttttagttccagaaaaaaccccttgatttacatcatggactataaattccaagtaagctccagaagtatcaataaacgatatggaacgtttataaatcatttcttcgggattaaaattcggatctactggtagcgacttcatgagtgtttggttgctaagcttaacattaaagtttggccccacttcttcagtataaaagaatttggattgagttcctccaacagaaagagagggagaaactccattactggtaacggtggaagggctgttccaactagaaccattaaaatattgctttgcaatacctgcatttccagttatctcccaaaccagataagcatcatagttacctattgtaccaactcctgtaatagtaggctttagttgttgctgataataagtagtgtggtacacattaggccaactattaacatcagaagtccatctgtgtataattttatggtcatagctactacttcccgaacctgtagttcttgaccaagcaacgtgaaccgctgttgaaggagttttatctgttcctatgctcggagaatgatgggttgctgaaccgggtacaacagaagataaatttttattcgcactccataaatggtaagggtcatcatgaaaagtatgctttattgcattgttagaattatccctataaacaatgttaaaaccgatatttccaaagcgagccgaaccaatacctgagaaatctgtagtagataagttcgtattagggattaaacttacagttgagttccaaggatcccatgtgtcagaagaagagttatatattagtgattgcaaaccgtttgccctgtaaactaacattaactgattttcattaggagagtcgaatgtcattatagttggttcaggttcgtaattttgggttacagtagtgattagtttttctgaaacccaagaattccctccattagtacttttttttgtgtaaatatcgtaaacagcattaccagtagatggatcagtacttccatatctcttcttttgccaagcaatatgtaatactccatttttatcaattgtaataacaggcttggtatttttaccaatgtttgagttctgtaagcttgttattatttttggtgactgagtcatccaaggaagttttttgtaatacacaatttcacttcctgaagcaaaaactacgtgataagatcctgaagaaggttcatatactgttcttcttcctgaattatctcctgatgcatcctcattcaaagatttaaaactaaccatttgattagcaacagctaaacgttcagcttgatatacagcttttaatgcatttaatcgaccatgtccatattcactcgtgaagagtaatccattcataccctgtactttttcagctgtttgtgttaggatggtttttacttcactcggagataagttttgatttacggacaacataagggctattgtgccagttacttgaggtgcagacattgaagttccgggaacatagtcgtagttttggttaaagccatttagacctccattcattactacagaataattaggaagtgttgaataaatatctctgtaatctcctgatccgtaaccgcctggtgcagtgagagttatttccgaaccagcattagaaaaacttgaatgtatatcattatgatcagtagcgccgactgcaataacattttcataagctaacgcatgtttacccgggtacgtaataaaattctgatttccttggttgtgagttatcgttactataataacattttttgaagcagcgtaatctattgcatctatatatgcttgtgaggcactatatcctccagagctgaaattaattactactcttttaccagtttgttgtgcataatcggatgctgaaataacactgtttttaaacatgctactagtataagtgccattatcacggttcgactgtatagctaagatttcagaatcccaggatatgccacttataccattaccattgtttgtttccgctgaagcaattcctgttacatgtgctccatgtccgtgtaaatctcgaaccgtaggatcaccgcttgtgctatggtcaggtcctaaagttattctcgaattattttgtaaatcgggatgtgacaattgaccattttgcattggaattccagtatcaagaattgcaatgacaacttcgttaccgccggtagttatgtcccatgcacttttgactaaaatgtcagcaccagttgtcccattagttggtgattgacctatattatttaagtgccattgtttagaaaggtctggatcgtttggggaataccctatttcaccaacataaagcggttcaaaaataacatcagggatttgaatttttaaggtgttaattagatcaataacattatctgtatttgtatctaatatagcccatcctaatttatcaaatgagcttatagtcccaaaattcgttaaatacttcttatattgagtactatcttctaaattatttaattttatgtgtaactttttctttaaataagctatctcactaccattatattcttcaactgctatatcctgtattgtgctaaacctatcttttaataaaacttgacctattaaatcatctgtaggagataaatataaaaaagtaaagatcaaaaaggctttaaaataattcatgagttaattgtgttttaattataaaaatgaacgaacgtaaatactagtatttgtattttgagattcggatataactatatatatattgtttttttgaatatgacaagctactatttttccaagagatatattctctgtgagtttagaccacaaatgatcattttttgagaaaaatcctttttctgtacataaaaaaagtatttcagaatcaactataccaaaaccatgtggttgggattgtttaagtgaatccggtacatcgtttaagacccatgtttctaatgaaaaatcgtaaattaatatcccaccttttgtataatctgtttcttgaacgaaacccaatattttatcaaaactatccgtagctgcaattgggttgatgtcagttgtaaaatcttcgtcaataagaagggtccaattcagtccactatcttctgtaattaaaatctgtgaattaacgcttgtgcttaaaacaattctttccggtttctccgattttagaagtgcagaatgggaaactccgtttgctaaattaaaattgtcattgttagaattttctgattccccttttcccggtacgggcgtccagtgttctcctttatcttcagagaagtaaaaccaaccagaaccgaaaccagctgttcctgcatagattctattaggatctattgggtcagcagtaagggataaaacactcagttctgaatttatctccaagcctttatcaatttggctccaactaccaccaccgtttgtagattttataactccatgaggattagcataaattacattcggattcgtacgatcaaaaatgatttggctaatgcttccaccttcccaaataatatcccaagatttaccaaaatcatcacttctgaataatttaccctgcgctccggtactaaaatttcttgatgtaccaataaatagagtgtttgataaacatgggtgtttttttattgttaggattagatctgtttcaatattacctaacttagtccattctgacgctgatactgaattctgttgattactctctaagcaacttaacatggtgctatcatcattaatatcacaattagctagtattaataacattattaaaataaaagtatgatagtagctatttattaacatcatgtaataatttattagtaagagatttatcggtgatctttgttacaagataaaagatttcgaaggaatagtttccttaaagagatctaaagtatttggctaattctcttgcaacaatttgagtggaatgcggagcggagctcctgtgtttcattccgcaccggaggtgcgaaacgaggacaaataaagaaaaagaatttatgacaatagttaattctcgttccgtagctctgctgcggaacgctaagtagaagcagaaagatgataataaaggataaattatttaaaatttatgatttaaatattggatagttataaataaatagcttttattcataaaaaaagccctccgcagagggcaaattaaatataggtgaggggtgctaaaattaacagagcccgcagagtcctataactctttgttgagataagactcttatcaagatgaattaaatcaagataacctatctgaataaaaaatcaaaaaggagaagattttgaaaaagatactgggattggatatgggagttgcttcaattggttggagtttaattgagtacaatcaagatgacgagggtaatataattgatagcggagtaagaatttttgatcaaaatttacaacgagataacgaagcgcaaaaaggagaatcaaaaaaccaacaacgtactttacaccgagggatgcgaagacaaagagaccggaaaagaaggaggaaaagaggactttactattcactaaaaggtgtaagaatgtgtccggtaaaatctgagaatgaggagtggaataaatggattgatttaaatccatatgagctacgtacaaaagggctagatgagcaacttagtttgatggagtttggtagagtactttatcatttaaatcaacgaagaggatttaagagcaatcgcaaagtgggaaaagatagtgaagacggagcagtagctactgaaatatctaaaatacgagcagagatgaagaaaaaaggaatgcgaaccttaggagagtatttattcagtcttcaggaaaatcattttgatcctccggtatctccaaatcatgatgattatgaattcaaaaggagaataagaaataagtatacacatcggaatatgtatgaggaagaatttgaattgttatgggaaaaacaaactcaattttatcctcaaactttaactgagaagtttaaagctaaactttctgacgacactatttttttccaaagaccacttaagagtcagaaacatttaattggtaaatgttcgctagaacctgataagaagaaaattccaaaaggtcatttacttttccagaaattccgaattgaaaaaactttaaataatctagagttgatgggagagtatggacaaagtctagatatgactgatgaacacaaaaagatcatcagagagaagttagaaagatcagatcatgtttctttttctcaactaaagaaagatttaggttttaattctaatgcaaaatttaatctggaaacctcggatgatagcaaacttaagggtgatacaaccagcaaaaaactatcaagcaaaaatgcatttggtaaagaatggtatgggttagatgaagagttcaaaaaccatgttgttgatgttcttattcatgtagaaaaaccagacgttgtagaagatcttgctttaaacaaatggggaagaacaaaagagcaagccaaccatttgaaaatgcttcaacttgaaaaagggtatggaaacttttcttacaaagtcatccgaaaaattatgccattgattaaagaaggaaagagagaaaacagtgctataaaagaagtatatggtgaagtaaaaaaaacacccaaagaagatgtctttcaactaccactgttagatccaaaagattaccggaacccagttgtatttggcgctatggtagagctacgaaaagttgtgaatgctgtccttagaaaacatggattacctgatataatcagggtagaacttgcacgagatttgaagaatagcaaaaaactccgtgatgaaatcacaaagaaaaataataagctggaaaaaagaaataatgaggctattaaggcactaaagcaatctccatttaactatcaaaatccaagcagaacagatattattaaatataatctttggattgaatgcaacaagacttgtccttatacgggaagagtaatcaatggggaagccctagacagaggtgaattcgaaatcgagcatattcttccatttagccgaacgcttgatgatagctacgctaataaaaccctatgtgaatctgatttcaatcgtcgaaagggtaatcgtactccttacgaatgcgttgaagccggtttgttgagtaaagaggaattagaacaaaggataaaaaataacttgccttggagaaagcgaagaaaatttactcaaaaaaccattgataccgacgagtttatcgctcggcagttgaatgacacccgttatatgagcagggaagcaagtaaatatttaaaacagcttggctcagaagaatggccggtagttattcaagttaccaaaggtcagaccacttctctgctaagacatctttggggtttgaattctatattaagtattgaaaatgatgaaattaaaaatcgagatgatcatcgccatcatgcggtggacgcgatagtaattgcccttacatcacggtctattttgaaaaaactaagtgatgagaataaactcatcgaaacagaaaattggatggatgaggaagagtcctcagttgaccgaaataggcaaataaaagatagggcttcaaagcggattactaatacccctccatgggatacgttttggcaagattcacaagaatcggtaaatcaaattattgtttcgcataaggtaagtaggaaaatatcgggagcgtttcatgaagaaacttactatggatctactgaagaaagttcctctaagaaagaccatataaaatacttagtagtacggaaaagggtagaagctctttctgagaaagaactaggttggaattcaaaaacccaaacttttgataaagagggaaaggtttttattcgtgatgaacatataaaaaagatagtaagggataagatttggaagaaatataaagaaacgggagatataaaaaaggctattgcagcgttagaaacagatcctcctaaattgtttcacaagaacggaaaagattttaatcttatccataaagttcggttgcttatggaaaaagatttatcaaaaatgaatgagtttgaggatgaacccaagaccccaacaaggtacgctttgtatggcaacaaccaccatattgctatttatgagtacactgataaaaatggaaataagaaacaaacaggagaggtaatccctacgatggaagctgctcgtagagttttagataaagagtctatcataatgagagaacaccctgagtacgatcggtttttattttcgctttccacaaatgaaatggtacaagatgcagaaggaaatgtctatcgcgtacaaaaattgacaagtacaggtgaaataacgtttagaagtcataatattgctttgaaaggtccttttgatccaggtgtaattcggaaaatgggtacaacagtagatttcaaaaaaattagaattgatccaatcggtcagatatttccagcgaatgattaaacgtacgattgaaatatcaagtgggcctattcatctatctattaaagataaacagatgaagctaaaacaaggagaagatatccattccattcctgtagaagacttgggtttgctggtgctttcgcatcctgctatcagctacacacatcaacttttgtatgaattattggaacaaaatgtagcagtcttgttttgcaatcgtcaacatatgcccgaagggttattgcttccattcgaagacaatcagctccatcaagctcgccttcaaatacaagcagaagcaacaaagccattaaagaagcgtctttggcaacaagttgtaaaagaaaaaataaaagctcaatctaaggtgctcaaaattaaacacggagacgatgacggcttaaaattactgatccctaaggtaaaatcaggtgatcctagcaatgttgaggctagggcagctaaacaatattggaagtcattgtttaaagattctgagtttagaagaaggtatgatcgaaatgacatgaattctttgttaaattacgggtatgcaataattcgggcagctgttgcacgaagcttaactgcagcgggtttacacccctcaatggggattcatcatcacaatcaatataatccttactgtttagccgatgatatgatggaacctttacgtcctttggttgatgcggaagtatttgatctttatagacaatttggcacacttgatattgaagttacaaaggaaacaaaacgacctctgctagaattattgaccaaagaggtttttataaaggaaatgaaatacccgttattggaaagtttgcacttaatgtcatcatcactggctaaatgctattccaaaaaagctaaaaccatagatttcccaattttaaaataatgagtaaaccgctaatcacttttggaggaatgaaaactatgtggatggtagttatgtttgatttaccggttgacactaaagtggcagtgaaagaagctaatgattttagaaaacggataaagcaagatggttttatgatgatgcaatattcagtatatacccgacattgccctagtaaagaaaatgcagatgtccatgagagaagagttaaaaaaatcttacctcctgatggagaagtacgcatacttagaataacggataaacagtttggtaaaatgaaaatttttcacggaaggcgaagaaaagcaatagaaaatgcccctgctcagttacaaatgttttagttttttaagacttggaaccgaacaagtttatgggagccataaacttgaacagaacctaatctaattcatcttgataagagatcaaatcccaacttgaatttaatccggttttataggcgtgtaatctaattcatcttgataagagatcaaatcccaacaatcagtaaaaaaggaatgacatggcaacaaatctaattcatcttgataagagatcaaatcccaactagagcctgtccatattcctatgaagagtaaatctaattcatcttgataagagatcaaatcccaacaatccggccatcgtgaaattgtagaatcttaatctaattcatcttgataagagatcaaatcccaactagacgctagttttacagatttaggaaacaatctaattcatcttgataagagatcaaatcccaacgattatggagtgaaacatccagagtaatagaatctaattcatcttgataagagatcaaatcccaacactttaagagtaggtacacattaaaaaatcaatctaattcatcttgataagagatcaaatcccaactcggtcattacactcatgcgaatagctccgaatctaattcatcttgataagagatcaaatcccaactaggtctctcatcggaatgacttagttagtaatctaattcatcttgataagagatcaaatcccaacggtgcagatgatttatctaaagcaggacttaatctaattcatcttgataagagatcaaatcccaacatgctatgaaacaactagattcttttatcaatctaattcatcttgataagagatcaaatcccaacagagttaactcgttcagtaattacactaaaaatctaattcatcttgataagagatcaaatcccaaccacatcttttatctatcgtttgcctttgttaatctaattcatcttgataagagatcaaatcccaactaaatctggttttcttagatttttcaattgaatctaattcatcttgataagagatcaaatcccaacacatgaggttattaagcaaaggcacgaagaaatctaattcatcttgataagagatcaaatcccaaccacaagctcaaatggcacgctttaaaaatgaatctaattcatcttgataagagatcaaatcccaactgcaacgtggcgctgaaattgcaatacctaaatctaattcatcttgataagagatcaaatcccaacttccatttgctcaacgtggaacttctgtttaatctaattcatcttgataagagatcaaatcccaactctgctattcaaagatggttagaacttagtaatctaattcatcttgataagagatcaaatcccaactagcagggtaatcaggattgaaattaaaaaaatctaattcatcttgataagagatcaaatcccaaccaatttctctggtaggttttgccataccacaatctaattcatcttgataagagatcaaatcccaacacagttacaggtattaaaaatgatgtacctaatctaattcatcttgataagagatcaaatcccaacaatgaaaaggagtgtatagttaatgatactgaatctaattcatcttgataagagatcaaatcccaacaagaccggcttatgataagaatgtagctcaaatctaattcatcttgataagagatcaaatcccaacacatggctgaaattgtgagctttagcctcaaatctaattcatcttgataagagatcaaatcccaaccctaaatcttgatgttcgtcttttataaataatctaattcatcttgataagagatcaaatcccaacatacttatcaggcttcaatagaagatcataatctaattcatcttgataagagatcaaatcccaaccggtcttcagcatctctgacataaacgatcaatctaattcatcttgataagagatcaaatcccaacagcctgtagctcgcaaagcgtacgtgtggaatctaattcatcttgataagagatcaaatcccaactggtagtgattacgcggaaagcacataccgaatctaattcatcttgataagagatcaaatcccaacagatggtagatctcgctatccggttggtataatctaattcatcttgataagagatcaaatcccaacactcaaacaagtatctgctcttccaaaagaaatctaattcatcttgataagagatcaaatcccaacaagctgttagtgtgggcttttctttcaagcaaatctaattcatcttgataagagatcaaatcccaactgccagtggtgcctgcgttagtgatatcaaaatctaattcatcttgataagagatcaaatcccaaccctcaaccgtgtagtgcttttcgtttcctaaatctaattcatcttgataagagatcaaatcccaactacgccaccctatttgtttttaataacgcaatctaattcatcttgataagagatcaaatcccaaccgtgtatttcatcaatcctaattccatgtaatctaattcatcttgataagagatcaaatcccaactgataggcaatcgtggtaagcctttaaaagaatctaattcatcttgataagagatcaaatcccaacgttatatctacattcctttcaataaaaataatctaattcatcttgataagagatcaaatcccaacactattggattggcatgtagtgatgcaaaaatctaattcatcttgataagagatcaaatcccaagtatgtattttgcattcattaagcatattattaacacaagtaatttatgataatagtttcctaactaatgctttaattcccatcctacaactgctatattccaaacaaaaaattactacatgacaacagactccaagaaagccaaaaccggcgcggaaaaaattaactgggacttgagtgatctatacaaatcttcagatgatcctcaactacaaaaagataaaaaagaggtgttggcagctgctgataagtttgctgataaatacaaaggtagaatagattcactttcagctgctgaattcaaagaattacttaaggaatacgaaactattcaggatagaggagggaagataggatcttttgcttatctgcaatggagtacggatacttcaaattctgagtacggaaagttagtgcaggaatcgaatgagttgtcatctgagctcaatcaaaaactggttttctttgatgtggaatggctcaaggttgataataaaaaagcacaagctttgatcaatgatcctcaactttcgttctattctcattatctggattcttcacggcgttacaaaaagcatgttctggaagagcaacaggaacagatcatgtctgcaaaatcagtgaccggcagaagtgcctgggttcgtttcttcgacgaaacattaggcgcagcagaatttcatattgacggtgaatcgctgacggaacaggaagcactgagtaaactgcatgaaggtgatcaaaagatcagaaagaaagcacatgctgcgttatcagaaacttttaatgatctgagcagaacgttgacttttatctttaacactgttctggctgataaatccacgaatgatcgtttcagaaattataaaagttgggtttcatccagaaatcttgccaacgaaaccgacgatgagacagtagaagcgttagtggaagctgtaacttcaaattacgatcttgttcaacgatactacaagctaaaagcagatcttctcgggctggatgaaatgaaggattacgatcgctatgcacctatcatccagaatgaagaaacgatttcatgggatgaggcaaaagaaatggtgttagatgcatattccaatttccatccggaaatgggggagatcactaaaaaattctttgagcaaaactggatcgatgcagctataaaaccgggcaaaagaggcggagcatattctgcaagcacagttccatccgttcacccgtatgtattcatgaactttgacgggaagatcagagatgtacaaacattggctcatgaattgggacatggcgttcatcagtatttatctaggcaacaaggaccattgcaagcgggaacaccacttacgactgcggaaacagcgtcagtttttggtgagatgttggtttttcagaagttgttgaaggaaatcgaagaccctcaggaaaaactggcattgatcacgggtaaaattgacgataccattgcaacggtatttaggcagatttctatgaataggtttgaagatgcaattcataccgcaagaagagaggaaggcgagttaacaactgagcgtttttcagaattgtggatggaacagcaagagaaattatacggagattcagttaccttaactgatgagtacggaatttggtggagttacattcctcattttttacacactccgggctatgtgtatgcatatgcttttggtgaattgttagtgatggctttatatgaagagttcactcaacgtcccgaaggttttgctgataaatatatggagttactaagtgctggtggatcagaatggccacacgaattagtagcaaagatgggattggatattacagatccggctttctggaacaaagggttgaagtcgctggaaagaatgatagaagaagcagaagctctgaacgagcaaatttcaaataacaattaattcaaatttcaaacatctaaaacgaattgttacattgcagtttgttatttgagatttaatttcgaagaaattcaggatggcattagataggcaggataaagcattacgggaatttaagcagatcatggaggacctggtacacttgttaaggacatcaacaagagtacaacttacctatatgtgctgggttaatcactcaaggcagcaatttgtttgggagacaaacagcacaacgatgccgaatgtgatgtttcaggatagggttaattttgaccaccattttctgaacgactataaagagatccaggaaattaccgtgctcaaagtcggcgaagatattgcaaaaggaaagctcatgcattacttcgactttgttcaggctaaaaccatggtattggttcctttcaggaataaaggagaaacagttgctataacggtattggaaagtgatctggacattgaagttgaaaagatcaaagatcagattctttcctacaacaacgctttggtaaacgtgctggatacgtatctggaagttgttgatctccatgaacagcaaaaggaatgggaagtttatgaaaaatcacttgcaaaattcagccctcgtcaacataaagtagaaatacttaaaaccatgcttaacgagatgcaaagttgtattccaaaaggaaatgtgtctttggtttgccatggaatggatacatggaatgttgttctgaactcagaaaagtcgaacaatccgggaaaaataggtcttaaagtcgaggaaaaaagtgttgcgtatgatgctttagaaaaaggagatccggttttttctatgcactttaataacaatcctaaaagaatatcgagtggagagggaattacggaaggtgcaagttatgccattcctgtagtaatacacgacagaagacaagctgttgtaattgtgagtgataacgatccgctttcttttaaagattccacaaaacataaactttcgaatttagtccgtgtggcaggtttaactattcaagctacacttaacaaagcttctatggcaaccgaccttcttacacatagttttgacgcgtatatgccggagttatgggaggcaacagtagatacagaattaaaaagagcaggtaattcatccagaaccaaaacatggttcggattgatctctccggatgatatttcggctttgcgaacaaaattcagattagaagagctccagaaaattcaggaggactttgtacggtttttgaaccctagtgtttatggattcccgggttatatcgggtttaattctgattatgtgtacagttttattatccaaagcgataaagaagaagctgtagaagcatggatagataagtttaaaacccgcttggctcatggtttacgattgtcgaacggtcacaccataaacatcagatttaaaattggccttacagagctaagcgaagattgcgctaattcctatcaagtgttaaccaaagctaaaaaagcacatgctgaagccgttaatgattccgaagcggtagcggttgtagcttaatgggtaacttttacctcataatagtggatggtcttggagtcggagctcaggaagacgctcacctttatggcgatgaaggtatgaatacgttaggaaatgtgtgtaatgaaacccaatgtaaacttccgaatctgggcaagatgggaatcggaaatattattccgttgtcctcagttcctgaagaagaaaatccgactgcggcttttggaaaaatgagggaagtttcggcaggcaaagattccacaaccggtcattgggaaatagcaggtattcatctcgaaaaaccctttccaacgtatcctaaaggatttccgaaagatgtagttgatagattttgtgaaggaatcggagtagaaaaagcgttgtgtaacctgccctattcaggaacagatgtaatcagggattttggcgaggaacatattaaaaccggatatcctattgtatatacatctgcagatagtgtatttcaggttgcttgtcatgaagatgttgcttctgttgaaatgttatatgatttgtgtgatttcgccagaaaggaaatttgtgttggagaacatgaagttggaagagttatagcaagaccatttacaggaacgtatccttatgatcgaatttcagatcaaagaaaagattattcagcgattcctcctaagaacaatattctaaattcgctactgaattcaggaatcaaaacatattcgattggaaaagtaatcgatctttttgcgggaattggcttttctcagtatcggaaaacaaagaataatgcggaaggaatttctcaattgctttctgcaatgagtgcggttaaaaacagtttcgtttttgtaaatctgatagataccgaccaactatttggccatcgtctggatccggaagggtatgcaaagagcctggaagaatttgaccgggcactaccggcaatattatcaaaattaaataatgaagatgtgttagtgataacaggagatcatggaaacgatccttgttcaaactctaccgatcattccagagaatttgtaccattgttagtgtatccaaaaggcaaaaccctccatctgacggataacccgtctgatggaactacaagtctcggaatacgagcaacttttgcagacgtggcagtttcagttgctgatttttttgagatcaaatctacatttccgggaaagagttttcttaaataagacttctttttccaaaagctcccttttcattctttgcataattgtctacactttgaagcgatgaatacaaaagaagacctgcacttttatagcaatttaaatgaatacagacagtcgataagcgagcttcttcaaaaggaatctttatttagagatgtacctgctaattggcatgtagttttaaccgatataaaatcttctacaaaagcgattgaagcaggtaaacatgaaattgtaaatttaatagcaacaggcagcattattgctgttctgaatattgctcatcaacataaaacaacaataccattcttttttggtggagacggggctacacttttggtccctgaggaaatcttagaggaatctttgaacgcgctgactgaacatcagcaaaacagttttgtcaactttgatctatttctgagagttggaaatatgcctgtttcagaggtgtataaagaaaagtacaggctaaagattgcaaaagcgaaaatgaacaggtttttatcgatacctgtaattcttggtggcggtcttcattatgtagaaaacgtaattaaaggaacttctaataattataagaatccggaacttttgaaaaatgttctgaatctggatgggatggaatgcagatgggatcgcataaaaccgcctgaagatcaacatgaaattttatgcttacttgtgaattctataaaccggaacgaccaggcacccgtttataagcaaatactagaaaaaatagagtccatttatggctcacataaaaaaagaagtccgattagtgtggcaggtttaagacttaatgccactctagatcgtataaattttgaaatgaaagttaaaactggcacgagcaatatcaggttttttttaaagcgaatgttagccactttaattggtaaattttatatcaaattcgatgaagaaggaaaacggtatttgaataatcttgtagaactcactgatacacttgttttggatggaaggataaatactgtaatttcgggattaaataaacaacacaatgaattagaagtattcctgacagaaatggaaagtagcggtctaatcaattttggaatgcatcggagtaaagaaagcattatgtcctgctacgtgcgagaccggaaagatcagcatatacattttgtggatggaggagatggcggatataccaaagcagccggagtattaaagacaaaatttggaagtaactagaaccttaaatttaatcaaataagcttttagctggtagccgttagcaaatgcttcgaattggctaacggctaagtgctaacagataaaaccaatagacatgaaatactcagttaccatttttatagtacttatttgtacagtgaatgcttttgctcaaaaaggagctaat

SEQ ID NO: 3001 - DNA, 13517 bp, synthetic construct
  misc_feature 1..13517: note = Synthetic
  source 1..13517: mol_type = other DNA
gcggcatggcgcggttcaccccggtcgcggtacatactgaccatcgtagcaagatccagctcttgcaagtttggcgggtatttgaatacgaaatcggactttttctgcatgttgcactcctaaaccttctctcaagtttacaaaaaaatcgcggggtttgttcaatcaattagtttaagagaaaaaagtgaagcagagttaagctagtaaataacttgatttttttaatttcaagcctaatttacaagataaaataaaaaagccctccgcagagggctaaggatactcttctgagcagagcctgcagagtcttagactctttgttgtgataagactcttttcgagatgatttacttgagtataaatgaactatcataataattcaaatcgggatacaatgaatactattttgggattagacttgggtgtagcttctattggatggagtttggttgaaaaaagcgaggatgatggaaaaataattaagtctggcgttaggatttttcaatctaatgaacagcgagccgaggctgcccccggtgagtcatcaaatgctgaccgcagaaaaaaaaggtcagtaagaagacagcgagatcgaaggtcaagaagaaaagcaaaactatatcattgtttgaaaagaaatgggttagcaccctcaaaaaccaaatgggatgattgggtaagtattaatccatatacaataagagcaagtgcattagataagaaagtaagtctgcatgagtttggaagagctttatatcaccttaatcaaaggcggggatataaaagcaatcgaaaagccggaaatgataaaaaaggaccagttaaagaaggtatttcaaaagttagggagcagattaataaatatgacgcaagaactattggagaatacttttatgaaatctatgataatcatcttaaagaagaggtcaatcatgatgattttaactggagaattcgtgataaatatactcaccgaaaaatgtttaaagaagaatttgaaaagctttgggagtctcaaataaaatatcatgaagttttaactgacgaacttaaaaatgaaattaaggagatcatatatcatcaaagaaaaatgaaaagccaggcacatttgattggaaagtgccctttagaaccggataaaaagagaattgctaaagcccacctgctattccaggaatttagagtactcaagaatctaaataatttaactcttgccgacgaaaatggagtttatattccttttgaagatgagcaaaaaaacattgtcaaagaattattggatagaaaggataaagcaacgtggagccagttaaaaaattcacttctaaaaaacgatgctattgccaataaaaacgccatctttaatcttgaaagaggtggaagaaagcgaattgaaggaaatagtacgaataaagctttatcacattctaaagcatttggtgatgattggtatgaattcgaagatgaatttaaaaaccatgtagtagatgtattgacccatgttactaagccagaaaaagttaaggaattggctctaaatcgttggggtcgaaaaaaagaacaggcagaatatcttagcaaacttactcttgaaaaaggatatgctaacttttcagaaaaagctataaaaaaactacttccatatcttaaagaaggtttcgaggagagtacagcggttaagaaagcaggatatgatttgtttgagcaaaaacccggcaaattgaaccagcttcccatgccaagtcaggaaatcaaaaatcctgtcgtataccacgctttaattgaattgagaaaagttgtaaatggaataatcagggaatatggaatgcctgatgtaattcgcgttgaattggcccgagacttaaaagctggctatgagcaccggcaaaaaatgaaccggaaaatgagaaaacttcaaaagaaaaacgataaagcaagagaagcccttaataaagcaccttttaatgtttctcaccccggatacaatgacattatctggtataatttgtgggaagagtgcgacaaaatttgtccatatacaggaaaatctattccagcagaagcgttcaattcaggtgaatttcaaattgaacacattattcctttcagtaaatcattagataattcatatgcaaataaaacattatgcgaagcagatttcaaccgtcaaaaaggtaatcgaacaccatgggaatgtgtagaagcaggattaatagatgaagatgacctactgcagcgaataagaaatttaccctggaataaaagaaataagtttacacagaaagagattaatacaagtaaatttatcaatcgtcagttaaatgatacgaggtacataagcagagaagccagttcctatctaaaacatttaacttgtgaaaatattgaagttgtaaaaggacaaacgaccgcattacttcggcatttatggggattgaacagtgtgctcaataaagaagatgaagaaatgaaaaatcgtgacgatcaccgtcaccatgcaattgatgcttcagtggttgctctaacaaatcgttctacgcttaaacgcttgagtgatgaaaataaaagaattagtccggcagaatggatggatgaagatgaaggaagccaatttacctatcaagaaatgaaaagaagagttggcgaccgaattgatttaagtgatccttggtcttcatttagaaaggatgtggagaatagtataaatgaaattactgtatcccacagagtggatagaaaaatttccggtgctcttcatgaagaaacatattatggtccgacagatgaagatgcacctaaaaacaaagagaagatggttgtaaggaaacccgtccatgaattaacaaacaaagagaagatggttgtaaggaaacccgtccatgaattaacaaagaaagagttgggattgatccgagacgatggaattcgaaaaattgtaaatgaagagattcagcaacgcatggatgaaggtaaatcacgtaatgcagctgtgaagagccttgagggcgacccaccatatataatttctaccaaagccaaagttccaattaaaaaggttcgtcttttaatggaaaaagatcctgaaaaaatgcatcactttgaaaatgaggaaggagaagtatatagacatgctttatatggaaataatcatcatatagctatttatgaaacaacagatgataaaggccaaaagaaacaagttggtattgtcgtcccaatgatggaagcagccagacgagtgaaagatggcgagccaattgtaatgaaagattatcgacctgatcacagttttttgttttctcttgccatcaataattcagtaatgaacaaagaggacggagaaatttatcgtgttcaaaagatagcctcaggcggtcaaattacatttcgttcaaatgctgtagctttaaagggccaaagtgatccaggagtattaaggaagaatccaagtgctctaagcatgaataaaattaagatctcaccagttggtgagatatttccagccaatgattaaacgtacagttgaaatatcaagtggtcctgttcatttgagcattaaacacaaacagatgctgctgaaaaaggacggcgacattcattccattcccgtggaagatttagggctacttgtgctttcccatccggcaattagctacactcatcaattgctttatgagttattggagcaaaacgttgctgttcttttttgtaatagacagcatatgccggaaggcctcttgcttccttttgaagataaccagctctatcaggctcgtcttcaatctcaaacggttgccacaaaaccactcaaaaaaagattatggcaacaagttgttcgggcaaagattaaagctcaagctcaggtattagaaaataaacatggagatcacggagggttaaaaccgcttattaagagagtacattctggagatcctaaaaatgtagaagcacgagctgcacggaaatattggaaagcacttttccaaaatgatgaatttcgaagaaatactgatggtcaggacattaatgcacttttgaattacggctatgctgtgatcagggcggctgtagccagaagtataacggcagcaggcttgcatccatcaataggcattcaccatcataatcagtacaatgcatattgcttagcagatgatatgatggagccgctccgtccttttgtggatagtattgtatatgatatttatgatgaaaatgggacgctgaaagttgaggttaataaagagaccaagaagcctttgctcgaattactaacgaaagaagtaatgatcaaagaaatgaattatcccctattggaatcgcttcatcttatggcttcttcattggttgattgttttacaggcgatgccaaaaaagttgctttcccaattgactcctaacctgtttttacgatgaaaaccttcgggggattaaagacaatgtggatgattgtaatgttcgacctacctgtcgataccaaagcagcaattaaagaagctaatgattttaggaagcgaatcaagaatgatgggtttatgcgaatgcaattatctgtttattcccgtcattgccccagcagagaaaacgcagacgtgcatgaacggcgggttaaaaaaattttgcctcccgacggagaagttcgcattatgcgtatcacggataaacagttcggaaacatgaaggttttccatggagcacgtagaaaagctacagaaaaagcacccaaacagttacaaatgttctgacttttttggactaagaactgaacaagttgttgtgagagaacaacttgaacagaacgtaatctaaatcatctcgaaaagagttcaaaccacaactgttcttgaatgcttagataccggcggagtaatctaaatcatctcgaaaagagttcaaaccacaacgccggaaatggaagactctccatagctgataatctaaatcatctcgaaaagagttcaaaccacaacattgcaaaggaaaaggggattgaaaattggaatctaaatcatctcgaaaagagttcaaaccacaacatgggctttgccgtcaggaatttatagaagaatctaaatcatctcgaaaagagttcaaaccacaacagtgtaacgttgtcgatgaaaatggagaccaatctaaatcatctcgaaaagagttcaaaccacaacctataaatggtatcatgacacccctccgctaaatctaaatcatctcgaaaagagttcaaaccacaacgccggctacgactgacaacccacaacaggcaatctaaatcatctcgaaaagagttcaaaccacaacgaaagccatctccctgctgggtgtgaaaaaatctaaatcatctcgaaaagagttcaaaccacaacagccttgattctgatttgacggcttctacaatctaaatcatctcgaaaagagttcaaaccacaacttgatcgggtgtgtttacggaattgctcataatctaaatcatctcgaaaagagttcaaaccacaactgtttgtttaacgcgggcatggattatgaaaatctaaatcatctcgaaaagagttcaaaccacaacgctatcactaactgacagcgaaagatcattaatctaaatcatctcgaaaagagttcaaaccacaacgctcaggtaatccttgagcgaggtcttggcaatctaaatcatctcgaaaagagttcaaaccacaactatcaagtgcagatactcttatccaacaagaatctaaatcatctcgaaaagagttcaaaccacaacgcagcggcaaacctggtggatgatatccagaatctaaatcatctcgaaaagagttcaaaccacaacagacacctaacgggtaagtgtatcatttcaaatctaaatcatctcgaaaagagttcaaaccacaacatctttatagaaccggtgtagattgtcaacaatgtaaacattttgaaaagattttaaatgaacaactactcttgaagatattcttcacggctcaagagtacaccctggtcccaggtccgttttgggagtgtaaatgtgtagggatatccgctggcggtaaccagataaaaaggggctggttcagcttcaacgaaccgatagaagttcactgttttggactctccattgtctgtcttgaactcaacagaatagatggggttggaggagatggaagaatcaatttcatcaggtggatagcccgctgcatttaaacgcccaaccatactcacaagtgtagtggttttctgttgattcaatgaatccgatccggccatccaggttccattggcgttctgaatcgcaaatgaactgtcggccggatacgtaaatcgaatttcagaaatggattctaatggaacattccagacggtcaaatcccgccagttattaaaattggattgaatggatgatcgattcaatccactgacagaatacacttgattctcgccgggaatgcgaacgtagatgtctcctgtacttccgggaaactgtgatgaacttgcgatgacttgatccaaaacctggtcaccgttataaagtgtaatagtagtgcctgtgctgtccacccggtagcgtgtgtgcttttggggatcacgggttaccagagcctcaacctccatattttgtagctcccgtaaagccatattaattttttgggaatcggccgaaaaagtttcgttttccgcatgaacctgccacactccgtcacttttcagaagttcaacaaaagacgtatcagcaggattattcaatgttattcgatttacatcggtgggttcagtgctcacgagatctccccggaaaatatcactctcgccggtttcgcccagcaaaatttgaatcaggagtaaagcgattgagatggcaaagatcacagataatgtctttgtagcatttgtcatgattaaattccctcctcaatccatttatgtcttcttgattgagctcttcggtaccggtaaaaaccataaccaattacgagaaaaattggcagcagtacatttaagtatttcaaaatggttttggtacgatcactgatctgtgccaatggccggctggtaacgccttttgttcgcaattccatcaaaccggaggcatctaccaaccaatccacggaattcacaaagatattgatattatcttccggcatattttgctgctgctgaccggtgccattgatcacaaagtcaccgtctccaaaaactacgagcgaggttggactacttgacgtgagctcggcttgaatggaatcatcctcagcaaaggcagacttgaacgttccctcaatcaatgcagcaacaggcaggtatgaagcttgaaaatcttgagccgtgaattgctgttgtggactcagggcaaaaaattgtcgggtggtatcggcacgttccgaacttcgagcaaggacagacaaggtttggtttgattctgctcttgtaacatcgattgttgagacgaatggaaaaatgacagattcaattccccggctgatcggatgatctccaaaatttggtatcatagggatataaggatagcgaaccgaattaagtacattaaatccgctttgctgtgtttggacctggatttgggtactgcttacatctctgagaagattcaatttcaccgggatattataagtctcaagaagacgatcgatattggaacggatcggttgaccgatacctcctgcctgtagatttgcattcactttattgatcgcaaaaatagctttgccgccactcattatatattggtcaatggccagaagttcagaatcggacaatggctcttccgggcccactaccatgagaatttcaatatcgggtggtataccgtttgtccttacgttacgtaaatccacaacctgataaagttgctgcaactggttcatagcttgtggcattgctgcttgagtcggttcgccgtgcccctgcaggaaaccgatttttggtttacgatcaatcgtgagtttttgaatgattagtgaaatttcgtactccagagatgtgccgggttggatggccggtaaaatttcctgctgattttcatattgaaaaacagccccgaggtaggctcttctttgtgatacctggtcacgttcacgcacattcaccagcagtggttgaataccagcctgttgggcttcagcttcaccccgattattttcattgggattgataaaacgatattcaagattcccccccgaataggctcgaaattcatccaaaaaattgcggaattcatctttcaccagatccaggtttggaggcaggtcttcggaaaaataggcagttacggtgatgggatcatcaatttgatcggcgatctgttcacttgcttccgacaatgtatagcgattgtcttctgttagatcggcacgccagatcaagcggttcgcaaaaatggacagaaccacggcaatgcctacaatcagcccaatttgaatgagcccttcatttttcgtttttagaaatccgtcaaatgccttcatgtccacatcctccgccttagtgatgctgttgacagaacgaagcctatgatgatcaaagagatcatatatataacagattcaagtgtaataactccgcgggtgagggttgaataatggaactgtaaatcgagaaattcagcaatacctgagagccatgcaggcaatacagatgcagatattccaaataatagatggaaaaagacgccgataaaaagactcagaataagagccacaatctggttttgagtaaggcttgatgcaaaaattccgacacttgtgtacacaccactaataagaatcagcgccaggtatccggcaatggttgctccatggtcgatgtttccaaggttggcaacagtgatataataaggtaaggtgaaaagcaacgagatgatcaccaataaccaagatgccagccatttaccgatcacaatttgaaaatcagtcacaggtttcgtggcaagcagttccagggtaccggatcgctgttcctcagcgagcattctcatagtgatggcgggaataaaaaagaagagtgtccaaaaggcgattccaaaaaatgtattgagagatgcctgtcccacaaaaaacaggtcgcccgagccgcccagccatgtaaaaaatccactgacagccaggaatacaattaaaataatgtaggccgtaagtgtgctgaagaacgcgttaatctctcgtttacaaatggtccagatgtgattcatacaccctccgattgaatggtgagttttcggaacacatcctcaaggctggactgcataggtgtaagttgaagcaaaacccaacctttctctatacagagcctaaaaatttcttctcttgcatcgtctcccggttttgtatccacatataagctactttcaccttcttcgtgagagggtgttacctgagctacggaatctaatgtcaaaagaccttctttaacattttccccttttatttgaagtagcaaccgattcgttcctgaggatcttgctttcaattcctcaggcgacccatcggcaaccagctttcctttgctaatgatgagaatacgatcgcaagtcgcttctacttctttgaggatatgtgagctgagcatcaccgttttctgtttgccgatctccttaatcagtgaacggatctctacaatttgattgggatcgagtccggttgtcggctcatctaaaattaatacatccgggtcgtgaataagtgcctgggccagacctacccgctgacgaaaacccttcgagagttcgttaatatttttatggcattccggtccgagcccgcaaacatctaccatctgccttatgcgatcgggaatctctttttctggaacatcctgtagggctgctgccatatgcaggtaatcgaaaatgctcatatcggtgtacaaaggattgttttccggcagatacccgattcgttttcgtacctcttcagagtgctttttgatatcaaaaccgtcaagctgtacagatcccgttgtaggactaataaagcatgatatgattttcatggtggtgcttttgcctgcaccatttggcccgagaaaaccaaggatttctccggttttaacctggaaagagatgtcatcaactgctttttgagaaccgtacatcttagtgaggttctcaacggtaatactcatgttataatctgtttagaaattttatgaatatgacccatcaacaaacgcaaaaaatctaataagtattatttttcaaatcaactgttaaagggtctgttcttatcaagaactcaacggtaaatgataacgattctgaacggataaagagaacaggaaacgtactcctgcaaaaccggttaatcagcaatttaggatttgcgagaacattacataccatcaagtagagaggttaggaacctaaggggatctgctttccttcttttattcaatcatctgaagaaactattcatgaatattgaagatgaaggcttagagatattttgatatcaaatagttctgataagtaaagatgataagattagatggaacattcggtgactatttctgcttttatatgatggtaacttatttggaataaatcacttatacatatttatggaatcaagtttggatatgaatgaagcctacaatcttgtagcaggtaaacttgaaacatggctgagtacggccattgagatgcttcccaatttagcgttggctctgctggtactggttgttttttatgtgataggcaaaatgctgcgcaagtttgtacgtactctcctcgaaaaagccaccaccaacaaaaccgtaattgacctggcagaaacggtcatgtcggttctgattattggtattggagtcttctttgcgttgagcatactgaatcttgatggtactattacaagtctgctggccggtgccggtattataggtttggccttaggttttgcatttcaggatattgctgccaatttcatttcgggtctgttgttatccattcgccatccctttggaattggggatatcatcgagagcaatgattactttggtacggttcagaaactcaatcttcgtaatacgatcattaaaacgccacagggacaaattgtatacatcccgaataaagtggtttatgagaatccctttaccaattatacaaaaaaccaagagcggcggatcgatttggaatgtggtatctcctacggggatgatcttgagaaggtgaagcaagtagccactgaagcgattgagtccatcgaaaagagaaatcaaaacaggagagtcgaatttttcttcaaggagtttggtggtagttccattaactttgtagttcggttttgggttgatttcagaagcaacccggatttttgggaaccacaaagtgaagcgattatagccctgaaaaaggcctttgatgagaacgatattatgattccattcccaatcagaacgctcgattttggaatccgcggtggtgagaagttgaatacgatgtgggatggcgaataaaactgacggagaagccagatgaaaatgtcatacaaaaattcagttgataatccattggatttcacgaaatccgaatagttaaataaagttgtaaagtcatcacgggtttacacgtatgtttaaatacttgtgatacaaaaatattagagtagtggatcaatagagtcggtttgtatgttaattttttgtttgatgaggtatataagtagttgccgttatcatctcttcctgccggttatcagagatgattaatgatctcgattttggtaaaccaaccttgattaccaatttttttacataaagtatccaagacagaacatttctcagaaatgaaactagtcattttgtatttctgatgtgttctattgtaaacaacataaatttatttatgccggaagacctgtttaaatctcttacgaatagactgatagcatcagataaggatgcttttgatcagcttttccggcagttatatgcctcgctggttaaattttcatataaatatacgcaagacaaatcggatgcatgcgatatcgtgcaaaacgcatttgtgaaactttggcaagttcgggaaaatctggaacgagatctatctgttaaatcatatatgttcagtatggtgcgaaatttatcacttaatcatataagagatcgatctcatgaaacagtgggtcttgaaactgacaacctaaagcatgatcagcaacatgaaaagacattgaccatgtatgatcagaaaaaggagcgattgaaactggttaaatcttggattagtgaactacccaaccgtcagcggcaagtactggaaatgagccggtttgaaggcttggatcatgaagaaattgccaatgtgctggagatttcacaaagaacagtcaataaccatgtggtggcagctatgaaaaatatgaagaagttacatgatgaatatattgaaatgaattgttgaattatggatgaaaaagagttcaataaagacagcaaacaagaaacaaattccggcaatattgaaaagcttttagagaatctggcacttaatgaagatgagtttgaagaggtgttagatcaaccacctgataattcttctgatgaaattaccgttggtacaactgaaacagaaattgcactgagccaggtaaatcatcaactgggctttgataaaaaaattcatggctttgagaagagtcaacggaaaaatttgctctataaatatctcgctgcagcagttgttcttctggctctgacagtcgggtggttcctgtttcctcgtaccgcagaggcaccttatggggaaatggttttagtcagtctgccggatgggagtcaggttgagttgaacagcggcaccgaactaaagtacaatctgctgttcggaacaatgcatcgaaatgtagagctcgatggcgaagcctatttcattgtagaatctgcaagtcaaccgtttaccgttgaggctaatggaacagtaactgaagttacaggtacggaatttaacattcgatcctgggataaagatcccggctccgttaccactataacggttgcagagggagaagtaattttctataccgaatcgaattttgatgacagaaaaacgttgagttccggtttatccagcttttggtctgcagatgccgaggagctttctgagccagattcagtcaatatcaatagtgcacttgcctggagaaatgataatttatcatttgtaaaccagccattgcaggtcatatttaatgaactggagagaaaatttgatatacacatagaaatcgaaaacgacgagatacggcgcgaaacacttactacattttacacacgcccggaaaacctcgagatgttactgaatgatatcacaacagtaaaagggcttcaatatagggagacatccagcggttattatgtgtttaacaggaagtagagttatggacagatgagatttcatcctattttgaatacacgcgtcattgtactgaaaacagttctcattttatttagttctgcattttggagtacagcggctgcgcaagtacaagtatccgactcaa

SEQ ID NO: 3002 - DNA, 5737 bp, synthetic construct
  misc_feature 1..5737: note = Synthetic
  source 1..5737: mol_type = other DNA
agcaaagactgcaccaacagaaaaaagaaaccaaatgattaaagaaaagattttcagtttcatatcagcctccaataattttgtgatcgggtaattcaattaacaaaattttggatttaaatggaaatggatgtcaactgtcactttctgatttttcaattagaatgagttttctcttgacattctaacaattgatactaacttcttaaaataaaaaaagccctccgcagagggctaaggttgctctttgagcagagcctgcagagtctatactctttgttgtgataagactcttttcgagatgaattatttaaaaatacatcaattgaattaacaaatcaaacattaagaatcatgaagaaaatattgggattagatcttggagtggcatccattggatggggacttgtagaaactgatgagaaaacaacgggccaaattataggaacaggtgtaagaatttttcaatcaaatcagcagcgagcagaatcagcaccgggagaatcctcaaatgctgacaggagaactaaaagatctgtaagaagacaaagagaccggagaacaaggagaaaaaagaaactctataatcatttaaaaagaaatgagctggctcctgaaaaaaaaggctgggaccaatgggtgagtattaatccttacgaaataagggcaaaagcattagataaaaatgtttcacttgaagagtttggaagggcgctttatcacataaatcaaagaaggggatataaaagtaacaggaaagcagggagtgataaagaaggtgctgtaagtgaaggcatatctaaagtgagagagcatatggataattataatgcccgtacaattggtgaatattgctttaagatatatgacaatcatttagaaaatgatgtagagcatgatgattttgactggagaatacgggataagtatacgcatcgttcaatgtttgaagaagagtttgaccttctttgggataaccaggcgaaatttcacaatggagagttatctgaaaagttacgtgatgaaacgaaggagattattttccatcagcgtgagttaaaagttcaatctcatttgatcggaaattgtccacttgaaagtgacaagaaaagaattgccaaagcccatttacttttccaggaattcaggatcattaaaaacctgaataatcttaccatatctgatgaaaacgggctttcaattcctttaacggttgaagataaacgggcaattaaagaagtattggacaaaaaggataaagctacttttaatagcttaaagaatgtgcttaagaagagagggacaatcgataataataacgctttgttcaatcttgaacgaggtgacagaaaatatctggaaggaaatcgaactaatcatgcactctcacgagagaaagcatttggcgatgattggtttgatttggatgaagaatttaaaaaccatgttgttgatgttttaattcatgttgacaagcctgaggttgttaaaaatttagctttggataaatgggacaggaccaatgaacaggctgaatatctaagtgacttaacgttggaaaaaggctatgcaggatattctgagaaagcgattaaacagttacttccgcatctaaaagaaggcttggaggagagtactgcaattgataaagccggttacacattattcaaacaaaaaaccggaactaagaaacagctgccgatgccgccggaaataaaaaatccggtagtctaccacgctttaatcgaattacgaaaagtagtaaatggaattattagaaagtatggtatgcctgatgtaattcgggtggaactggcaagagacttaaaagcgggatatgaacaccgccaaaaaatgaataaaagaatgcgtgaccttgaaaagaaaaatgacaaggccagaaatgctttacagaaagctccattcaatgttcaatatcccgggtataatgatattatctggtataatctttgggaagaatgtgataaacgctgtccatataccggtaaatcaataccggctgaagcatttaattccggcgaatttcaaattgaacatattattccattcagccgctcattggataactcctatgcaaataaaacgttgtgcgaggctgactttaaccgaaagaaaggaaaccgtacaccatgggaatgtgtggaagccggattgcttaatgaaggtaaattgcttcagcaaattcggaaaataccatggagaaaaaggaataagtttactcaaaaagaggttgatgaagataaatttttaaacaggcagttaaatgacacccgctacattagccgagaagccagttctttcctgaaacatcttgcctgtgaatctgtggaagtggttaaaggccaaacaacgtccctgttacggcatctttggggactaaataccattttgacccttgaggatgatgagatgaaaaacagggaggatcatcgccatcatgctattgatgcaatggtggttgccctcacatcccgtggtacacttaaacggttaagtgatgaaaataaagtgatatctatgccttcctggcaggatgaagaagaaagcagcaaggaccggtatgatgaaatgaagaacaggttaagtggcagaataagattgaaagatccctgggaggattttcggaatcatgttgaatatgcagtgaatggaattgtggtttcacacaaagttaacagaaagattagtggtgctttgcatgaagaaacatattatggcccaaccgaagaggaagcacctaagaacaaagaaatgatggtggttcgtaaacctgtacaccaacttagtaaaaaagatcttaaagaaatccgagatgaccgggtgagacaaattgtaaataatgaagttataaagagaatggaagctggaaactctttggatatagcaataaaaagtcttgaatcagagccaccatatatcatttcgtcaaaagctgaaattccaattaaaaaagtaaggcttttaagaaaacaagatccaagtataatgcatcattttgataatgaaaatggggaagtttatcgaagtgcagtttatggaaacaatcatcatatagctatatacgaaatcaatgataataatggtagaaaagagcttatagaagaggttattacaatgatggaagccgcaagaagagtgttagatggtgagcctgtagttatgagaaatcatccagagtataatgaatttattttttcactcagtcaaaatgaaattgtcaaaaatttagatgatgataaactttatcgtgttcaaattattgaatctgacaaaagattaacacttcgagaaataagtgtcgcacctgctaatgctagtcatgggaaaattaggaagcggccaaaaaatttaaatttaagaaaagtgactgtggatccgataggacgagttcttgatgccaatgattaaaagaacggttgaaatatcaagtggcccaattcatctcagcatcaaacataaacagatgttattgaagaaagggggtgagatgcatacaattccggtagaggatttgggattgcttgttctttcacacccagctatcagttacactcatcagcttttgtatgaactgctcgaacaaaatgttgcggtgttattttgtaatcggcaacatatgcccgaaggtttattgttgccgtttcaggataaccagcttcaccaggccaggctaaaaatgcagactgaagcatcaaaaccattgaagaagcggctttggcagcaggttgtaagggcaaagataaaggctcagtcgaatgtattaaaaaataaacatggggatgacggtggtttgagactgctaataaaaaaagtgcattccggtgatccgaaaaatgttgaagcaagggctgccaaagtttactggaaaaagctctttcagaataatgagtttcggaggaatactgttggcaaagacctgaatgcgttgttaaattacgggtatgcaattatgcgggctgctgtggcacgaagcctgacagcggcaggattacatccctccataggtattcaccatcatagccagtataacccgtattgccttgccgatgatatgatggaacccttacggccatttgtagactgtacggtttacaatttgtacaggaagaagagatcacttcaaatagaggtaagcaaggaaaccaagaaacccctgttacagcttttgacaaaaaaaattgtgatcaggaagttaaagtacccattaatggagtcattgcacctaatggcctcgtcacttgtggattgttttgcaggagatgcaaaaacacttgatttccctacagaaataaattgataagtatgaaaacatttgggggaatgaaaaccatgtggatgatcgtaatgttcgatttgccggtcgacacgaaaaaggccgtaaaagaagcaaatgatttcagaatccgtttgaaaaaagatggatttatgatgatgcaactctctgtttattcacgacattgtccaagcagggaaagcgccgatgtacatgagcgcagggtgaaacggttcttgcctccggacggagaagttcgcattatgcgtataacggataaacagtttggtaaaatgaaaattttccatgggaatcgaagaaaagcgacagaaaatgcccctaaacagcttcagatgttttgacttttacaaaccaggaactgaacaagtacatgacagacaagcacttgaacagaacctaatctaattcatctcgaaaagagttcaaaccacaacattgtagccagcctctgccattggtggtacaatctaattcatctcgaaaagagttcaaaccacaactgtttacgcctaatgatgttttacgccttgaatctaattcatctcgaaaagagttcaaaccacaacgagcggctctcaggtatattaaggtcgataaatctaattcatctcgaaaagagttcaaaccacaacttaagcctgaagcagttgtatatcgccggaaatctaattcatctcgaaaagagttcaaaccacaacacaaagagcttggtataacccatcaggattaatctaattcatctcgaaaagagttcaaaccacaactacataacggatggagcataaccggcgctaaatctaattcatctcgaaaagagttcaaaccacaacataagcacgtttttatcatcggtttcaacaaatctaattcatctcgaaaagagttcaaaccacaacattgttattcgttctgtgtttcctacttctaatctaattcatctcgaaaagagttcaaaccacaacaatacgttgcggtggcataaatgggtgatcaatctaattcatctcgaaaagagttcaaaccacaactttccttgaatattgaaacgccccctattcaatctaattcatctcgaaaagagttcaaaccacaacaggtggccggggtgaggcaaaagccacacgaatctaattcatctcgaaaagagttcaaaacaaaatttgtctgtgtggatggattcaatagaaatcaatccaaaatgaaaacatcaataaatcattttggaacattgtttgaatactttcctatctttacaatcttaaatttagcatcatcaatttatcctacatgtcaacaatttccagtaaaaagtatgaagctgtaattggcctcgaagttcatgcacagcttttaacaaaaagtaaagcgtttgcacccgttaccacagaatatggttcggctcctaatacacaaataacacct

SEQ ID NO: 3003 - DNA, 23669 bp, synthetic construct
  source 1..23669: mol_type = other DNA
  misc_feature 1..23669: note = Synthetic
tatcgtctcgaccggggcttcgaggatttgggcacttattgtgtcggcggtatgtatcagcgccaccagcggcgtcttggcgcacgcggctcggtacgagcgctcctgctcatagctattggtggccaaatcccaagggcccatgtgccagcgtatggccataagctcttcgtcttcgaggtcgagaccactacgaaggagcattattacagacttttcgccgtgtccgagagggaacttggagtagtctacctgatactcgtcatatttctcgtactgccccacttcgttacggcgtgcacgttgtaccttgtgataaatatcggttttgcacacatcatgcagcaatgccgcaatggcgatggatgccacgggcatacgcgtttcaagctcgggtcgcagcgtcaatagcgacgcacgcacagccatagccgcatcatagacacacagcgagtgttccagcagtccgccgggatgattgaagtgattgcgcacggacgccggagcttcaaagaatccccagctctccagatcctggattacgtagtccatattttcgcggcccgtagccgtaagggtatctataaatcgctgtttcttttgttctaaagtttcttcggtgaaagttgacatttttatattttcgcgtttctgtattttacaaaattataatatgggcgagagcaggcgcacaaccgattcggcaaccttgagcgaacggcggcggcgtgcccatgtagcttgatacaaccgcgtgcattggcgcatatcacgatggaaaatctccgccatttcctgagtgaagcgcggcgagtacacaaagaggttcgcctcgaaattgtgctcgaagctgcggaagtcaaaattagtggaacccacggaagctatttcgtcatcaacgataagcgtcttggcatgcatcatcccgggattataaagataaatcttgatgccggcgcgcaggcactcggcaatataggagaatgaggcgtattgcatcagtcgcgagtcggtgcgtcgcggcatcattatgcgcacatccacacgcgccaaagccgccgtctgcaatgccttgagcaagccctcggtgggcaggaagtacggcgtctgtatgtatacacgatggcgtgcattggctatggccttatggaacatcattgcgatattgctccattgcgatgtaggcccggaggtgataagctgagcacccatatccccgggagcaggattgtcttgctccacactctcttccagcagcggctgccccataaagttccagtccacggcaaaagagtattgtaacgatgccacagccggcccgacaagtcgcagatgtgtgtcacgccaactgtcaaaacacttgcctccggtgatatagcggtcggcaatattcattccgccgatataccccacttcgccatcgatgacgcatatcttgcggtggttgcgccagttgatgcgcgtaccgaaaggtgggaacgaaaccttgaagaatgggtaaacttctatgcccgccgaacgcaaacgcttgaaatagcgacgccgggtatccagcgaccctacattgtcgtatatgacgtgtacggccactccggcatgcgcacgctctatgaggacgtccgctacgcgagtgcctatttcatcgtccgatattatgtaatactgtaaattgatatagcgtttggcctttcctaaatcttcgataagggcttcgaacttggatgccccatcagcgtagaccttgatatcgttgccggaataatactcggcatcctccaacgacttggccagccgtatttgctgctgcgcctcggccgaaagcgtgcgctcattgacctcggtcacagccgtgcgctcggcctgtctgagacggcgacggttgcggcgcgaaatcattcgagtattcttgatgctgcgcccgaagaacagatacagcaccacccccacaagcggcagcaggataagcacggtcacccacgccagcgacttgaccggattgcggttttcgctgactatcacgcacaatatcactatcacggtgatggcgtatatcgtcatcagcgtatagtatatccaactgtaatcaaagcttatatacaaagcatccatgggacatggcactaatcgaaggctcaattcgcctcttcaccacaaatttacgcacaaattaacagcacaacatcaccgttatgaataattaacaattaacaacatccttatggccgcaaaagggcgctaactatagaccaaccccgaacccgaaagcatcgcgatccaactattgggcgcgtgtgcttgccaatgccggaacaacaaattcctatgaaaagcgagccacagcttcaatcgtaagttggagctatggcttgtttgcctacgtaagattcgcaaaagttggtgatagaatcagtaattgcattttttgcaatttcgttggattcgaagttcggatatttttcgataagctgcttagagtagttctcaataaacaattcctgtccttcagtacttgatgaacatgctacaaagaataaagccgcgcataaatagagcagttatttcatttgttaagttctatcattcagattattgatatattcgttgatgtcattattctcgaaataatcgggctgtttatctgtattaatatttaggcataaacaccatgcataacgtgttcggtatcgccgttacaagtgttgatgtcatcgtattcgttcatatacttagcctaaagctaaaatcctaagtttgatttctttcaactcatcttaaacgatttgataatccgacaattgcagacaatctgcaatctcggtcaggctcttattctctatcaagtataaatggagaatgatcaattgtttctcactgagtatttcattcagacgatggcgaagcgctataaagatagccttgtatagatcgagtttttctttccttatatccataatgcgttagcggttgaagtcgtttggtttagacacattgcatcatcatatttattcctgtcgatcgaatacagttactctggtgtatttgaagtaagaatgatattgcagtattttacaatttcatcaatttgaacttggcgtaacttcatcgaacatgacttaaagatctttgagggttggggctgtgccgcaaagcattgacttcggcacagcccctacctgtattatgcgaaagtgctccgcgcgattatccgcaatggaagtagcggcggacgatgcgaagcatagcttcggtatcgtcgtgagccagcgctatttcgtcgcggtcatacgagcgcaggcgtttgatgattccgtctatggtggcgtcatcgaagactccggcggctgtgaatacgtcgcggcggtcttcgaggcattgtgccgacccgtagcagtcgacaggcagcgagctcaggcgcgagagcacggcggcattctcggcacgatggatatttacgtccacatatgtgtcctcggctaccttgagggcatccggcatctcgaaaccgtggcgcatagccactgccaacgatgctatcagcaggtatatatccgccgacccgtcggccgaacgtatctcgacagtctgtttctgcgtcgtgtccacgtcggccaggccgtggctgccgggattgagctcggcgcacatatctttccgggccgtccatcccagcggtacgcgcaccagcaccgagcggttgcggtctccccagcatacattggtgggtgcttcctgcttgggcaccaggcggaagtacgatgtgggcaccgtattgccgaaggccgtgatggcctgcgccaggtccataattccggcgataccgcgacgcgcctcgtcgctgagacggcggtcggtgtcgagcatcatattgcgcccgtcgcgcatgatacgcatgtgtatatgcagtcccgagccggccttacccacggtgattttgggcgcaaaagtgatgtcatagcccttgatatatccgaggttacgtatcacccatttggctatcatcagctggtcggcggcacgtcgtgcgtccacgggcaggaattcgatttcgttctgctcatagatttttccgtccagggtgaagttgcccacttcgctgtgtccgtatttgatgcttccgcccgtacgggctatgtactgcatacacagggtgcggaagtcaccgaatttggcaaaaggtgccgactcgtgatagccgcgctgatcgcttgcggggaaggctccgtcatcttccttgacgacgtagtactccaactcgcccatagcttggaagtccataccggtcacgcggttgaactcgcggcaagccttgtccaagatatattcgggcgcgctctccagcggattgccgtccttgtcaaagaacgagcacagcatggtcaccgtcggaatctcggcaaagggatcgcggaaagccgtgctgaagcgcggcaacacatacaagtcgctgctgccggccgagataaagggaaagagcgatgagccgtccaccctctcgcccaaggtcagaatggtctcgagatacgccaagtcgttgatgacaaaattcagagtcttcaggcgtccgtcggctgccggatacatgaagttgaccatttcaatgccgttggccttgatataggtgattatgtcgtcgagcgtaaagtcttcttgtgccttgtgcagcgactgcacaagggcgttcttgctcattgcaatattcttatccatagttgtaatggttggttcttacgtgtttggtttcgttgggcgacgcactcggcgtctaaatagatagcatttcggccctaaaagtacaaaaactttcattcgcccaatacaccaaaggcaagatttaagaaattttaatataaaaatgtattccccctacagtttatttgccatgagattccttcattttcagagccaaaattattatatctatgcttgtcgcctaaaaaattttagctaattttgcgcataaaacgttagcgcctaagcgtgtcggtcttcgccgcatatcgaccttgcgcaaacgccaagtatatgtctaaacaacaataaaacatagaacaacaaatgaaacgtcacattaccatcgccgtaagcgtattgtgcgccaccatcggagcgtttgcccagtcgaagacagacgctgccacgcaacaaattctggacgcctaccgccaaaagcagctctaccctgcagccaaagtgattacacccgtcaatgccccgttcgatttcgaaagcacttcgcgtgccacgcccactgcggcagccatcgtacgtctgagcaatggagccacctttgacgacctccgtgccgccgggctcgaagtcatcagcaccgccggcgacgatatggccgtagtggcaggcagcatcgacgacatcatcgcaatggactccaatgccgatgtccaaagctactcgctatcggcgcaggccaagcccatgctcaacgaagcccgcaaactcagcggcgtcaccacaatacacgccggcgaagaccaccttgaccaaccctataaaggcaaaggagtcatctgcggtatatacgatatcggcgtagatcccaaccacgtcaacttcctcaacaatgacttcacggacacacgtatcaagcagttaatgcacttctacacttccaacggcatgtccagtatatacaccagctacgatgatataagccgattctctaccgacaatacctccaatacacatggtacgcatacgctcggtattatggccggctcgttcaaccgcagcggcggaaagaccgccatactcaattccaaaggcagcgtacaagtacgcagcacagtcaagaacccatactatggtatggcacccgaagccgacctcgtagtaggctgcggctctctatacgatgccaactcctgcagcgccgtcagcaaaatcgtagagtacgccaacacacacagacaacccgctgtcatcaacctcagtatcggacgcacaggcggcccgcacgatggaaccagcaacttcggacaatatatggaacgcctcggcaaaagcgccatcatctgcatctcggcaggcaacgatggcgaagagcccatatcactgtccaagaagttcagcgcctccgacaaggcacttaagacattcttcgtaaacactaagactcgcggaacagccaacttcagcatctggggcaacgacagccgcgaatttacagttacggccgtaatctacaacaaaacgaccaaaaaaattgtcgatcaagtaaccctgagcggaacaaaaagcgtactcgccaccaacaactacaccgacccgtcgtacaaccacagtgaagctttcgacgaagcatatagctccagctacatcaactgcacatacagcgacaacgcctctaccaataaacgctactcggccagcatcgatatagtcctgggatacaacaacaccgccaacgccgacaagcacctcgttgcaggacttatcatcgaaggcaaagacggcgcacaggttcaatgctcactcaacaacgtctccggcggatttactatggagtcgctcggtcagagcggatggtccgacggcaataccgacttcaccatcaacgaccttgcctgcggcaaaaacgtcatcgctgtaggtgcttacaacaaccgtcaattcttcccggcactcaacggcggcaaatacggctacaacgtcgacggctaccaaaccgccggcgcaattgccccctactcgtcctacggcgtgacatacgacggacgcagtctcccgcacatctgcgcccccggcacggcagtgatttcctcatactccaaatactacaccgaagccggatacgaagacaccaataccttctcggccgaatacaccgacaacaaaaacaaccgcaaaagctactggtgtcaaagcacaggcacatcaatggcttcgcccgcatacgccggcggcatcgcactttggcttcaggccaaccccaagctcaccgttgacgaagtccttgagatcaccacaatgacagccaccaaagaccagcaaaccgccaccaccggcaacgccgtacaatggggcgccggcaaattcaacgcactggcaggtctcaaagaagtgctcaaacgcctcggcgtcaacgacattcgcgttgacgagcaaggcatactcgtcactgctgccggaaccgatgcatacgaaatcagcgtcccgggagccaagaacatcaacgtccgccttgtatctatgacaggcgcaatcgttcgcgacatcaacgccaacggcgacacatactccctcgacttggccgatgcacctgctggcgtatacgtcctcagcgtcaacaacggcgcatacgcccgtcgcatcctcgtgcgctgacacataaagacaatacacccttagcatcaatcccgcgattgcagaatatctcatctgcggtcgcgggattggcgttatcaccccaaccacgtcacacgacaatatcacaatatatatgcgcagtcacatattactcccgaccaagacgctgactaccatcaccgtagcactcctcgccgtaaccgagatcacatccgtcgcctccgtattcgatgcacgtaccaccgccatactggccgccgatgccgccaaagcccgacttgtccaagcccaagcgagtgccgatgcgcccacgctgtactacccggtcatcatcgaaatagacgatgacagcgccctcgatgacattgatgccctcgggacagtgatatggcgccgccgcgacaatatgctcctcggctgcgtaccccgacagaacatcgcgcaactccaagacatcgcgcacgtctcctcggccgccatcggcacacgcctctcgttggccaccgaccgctcgcgccgatggtccaacgtagcgcccgtatacgccggcacagccaccgacaaatgcggcgcactggacggcagcggcgtcaccttaggactgtgcgacatcggcatcgaccccaaccacatcgtattcagacacgacggcgacccgacagccccctcacgcatcagcgtcgtcacccattacgttgacagcaccgcccaaagactcatcgccgacacccccgaagccgtggccgcatggaccacagacaccccggacgagacacacggcacacacgtatgcgcaatcatggcctccggatacaaaggcaacccataccacggatacgcccccgcagccgacatcgtgaccaccaccagcgggctgtacgacgtcgcactactctgcggcatcgaagacgtcatcgaacgcgcccaaagcctcggccaaccagccgtcgtcaacctctccatatcctcgctcataggcccgcgcgacggctccgacgccgtatgccgatacatcgccaaatgcgcccaagacgccgtgatatgcttcgccgccggcaattacggacaatccaaatacgccatacaccacgacttcaccacccaagcgcccaccgtcggcaccatcatcgacaaccgcaccacctggagcggactagacgtcaacggatacaccgacatatggggatacgacgacaccccgctgcaaatacgcataatcatatacgacttcgacacccaagccatcatataccgctcgccatggtacggcggcgcatccgacacccaaggcaccatcacactcgccaccggcacagccgacgcctgggccgaaggcacatacgaacccggcagctccatcacaatatcccgggacatcgacagccacaacggacgcacccacatcgccgtactctcggacatgcactcccgaacattacaacaagccggaccatggtcacgatactacttcggctacgaaatccaagggccgcaaggcgcttccgtagacatctacgccgatggcacgcagacattcctccgctcatgcggaatccccggaatgaccgaaggcacagcccaagacgccttcaacaacctcgcctcacccaccgacgtcctcgccataggcggatacgacaaccgcgccaccgtccccatggcagacggcaccgaaaccacatacagcggcatcaaccccggataccccatgccatacacaagctacggctacacctacgacggcagacacatacccgacttctgcgcccccgccaacaccgtcatctcggccatgaaccgctactaccgcgatgcccatcccgaaggctacaaagtcctgaccgagaccacagccgccgatggcacccgatacgcctggtacgacgaaggcggcacatccatggcctcgcccgccgtggccggcatcgtcgcactgtggctacaagccgatcgcacactcaccgcacaagacatccgcgacatcgtcgcccacagcgcacgcaccgacctccccgaccccaccaatccccgctggggcctcggagccatagatgccgccgccggcctcaaataccaccttgaccaccaaggcatatccgacatcagcgtcgacacccccgccgtcctccccatcgccaccctctaccacgacctcctcggccgtcccctcccagctcccgaaacctccctccacgaccccacttcatccaattccacatcccccaattccacattcatcctccgcaccgacatctaccccgacggctcccgccgcaccaccctcctccgcagataaaaagtccaacagcgacaccgacagtaaccctcaaagcaaaacaatactacaacgtagccaattctaccgtagattacacggctctgaaaatacgcattgcgcaccgaaagtagcttactcgacttccggtgcgcagttcattattatcaacttacaatataaccgatataaaaaagccctcaccgaagcgagggcataggatgaaatccttcggcaattactgccttattgcgataagatgtaggattttacttatcttgcgacaaatttagactaatagtttgggacatccaaaaataaatcgtaaatttggcataatttaacaaatcagcactatggatggcttaagtagaattaaaaaacacccctatattatataacatggaaacaaacaagaaaaaacgtatcctcggattggatacaggcactaatagtatcggatgggcggtcgtagaccgtctcggagaccaatgcgccctggtagacagcggcgtacacatattcaccgaaggcgtaaaggaagaaaaaggcaacgaagtgtccaaagccgcggaacgcacgtcacatcgggcaatgagacgcggcttttacagacgtaagcttcgcaaaatacgacttctacgcattctgagcgagttggggtggtgtccgtatttgtcgccagaattactatctcaatggcgcctgaaaaaagtctatccggccacaccggagttcatgcagtggttggggacagatgacgacaacgccattacaccttataggtatcgcgttatatgcctgcacgaaaagttggatttgacgcaggaagctcaacgatatatccttgggcgggcactctatcacatggctcaacggcgcggatttcgctcgaaccgtaaggatcaatcaaatgatgacgaaaaaggcaaggtcaaagaggcaatatccgatttgtctcataaaatgaaagaagaaggctgcgaataccttgccgaatactttgagaaactatacaacaagggcaaacgcattcgcaatcaatacacctcgcgagacaaccattatgtcgaagaatttcatgcgatatgtcgtcgtcaggagttggacgaagataccatcaaacgacttgagcatgtgctgtttgaccaaaggccgctgaaatcgcagaaacataccgtggggcattgcctgttcgagccttcaaaatccagatgtcaaatgagccatccggattttgaagaaatgcgtatgctccagaccataaatcagatacggatgaagacgccagacgatgatatgctgcggcctctttgggaggacgaacgtgaattgatcgtgccattattcctccgcaaatcaaagtctaactttgacttcgaggatatagccaaagaacttgccaaaccatacatcaaaaggtatggcaagaagtgctacggatactacaaaaccgatggagacaaagacattctattcaactatccgatggatatgggcattgccggctcgccgttcaccgccggaatggttgccgctctgggatcggactgggaagccgttatagacgcccaatacgtaaaaggagatgacaaaggccttgacgacaaggtgaatgatgtatggcacacactatcatttttcgataacgacgacaagcttgaggcctggcttgagacaaacctcggtttagatgcggataccgcaaaaaaagttgccgggatcaagatggtaagcgcatacgcatccctgagccacaaagtaatacgaaagattctgccgtttatgcgcggcggtatgttgtattcgtatgccgtaatgcttgccaatatagatgccgtactgccggcgtatgtccgagataatgactatatgcgtcaggcggcggtcgatatggccgtcggatgtctcaacgagtacgacaagaagacctgtgagtgcaccatgtatcaatggctcaagaatttccttgccgagaaataccatattggtcacaaaacgctcaaccgcctataccatccgtcagacttggagacatatccgcatgttcgccctgacgatcaaggccgtatgcacctgggctctccgcgtatatctgcaatacgcaacccgatggcgatgcgctcgttacaccgcattcgccacgtggtcaacgctctattggacaaaggcttaattgaccacgataccgaagtacatatcgaactcggacgcgaactgaacgatgcaaatatgcgtgccgcaataaggcagcaaaacaagcacaatgaaagtgagcgtgcaaaagccaaagtcgtactcaaagattatggagttaataacgtatccgatgatgatattgccaagtatattctatgggaagagcagggcaaaaaatgcctatacaccggtaagcaaatcggatttgagtgcatcttcggtcccgatccgaaatatgacatcgagcacacaattccacgcagccgtggcggagacagcactatggaaaacctcaccctttgcgattcgcgcttcaatcgcgaggtgaagaagacaaaactcccgagcgaattggccaatgctgacgaagtgatgcaacgagtggcgttcatgaaagaaaaggccgacgacttgcagaaacaaatccgccgctgccgcacaaatgcatctatggacaaaagccagaaagaccgcataatccaaaaacgtcactcgttggagctgcagcaagtctattggcgcaacaaataccgtcgattcgagatgaccgaagtacccgaggacttcagccgccgtcagggtgccactgccggcatagtggctcgatatgcccgactgttcttgaagtccctattcgatgatgtctccatcgtcaaaggcgctgcaacagccgacttccgtaaggcatggaaactgcaaagcgtcgatgagaaaaaatcccgcgacaaccatacacaccaccaagtggatgccgtagtgattgcgtgcatcggccgaggcgattaccaacgtcttgcggcttcgtaccacctgaacggatatgcagacagggaacgtccgtcagtacccgaaccttgggagggtttcgtggatgatatgcggcgcatccaagccgagaccttagtatcgtacgatttcacggacaatgcgcccaaacaagtgcgccgccgtatcaggttcaccggcagccaccatataaaaggtcataaaccatcgcacatatccgaaagcgatacggctcgcctgtcgctgcacatggacaccaattacggtgccatcgagcatgacggcgaagtgaaatatgtaattcgtaaaccgattactgaattaacaagccaaagcgatatagaaagaatagttgatcctatcgtcagagaaaaggtacaagcagccactcgtggtcttgataaagcgccggaaatcaaaactgcattagcaaatcccatatggatgaacgaagccaagggtattcaaattaagaaggtaagatgctttactccggatgttacgcgtccgcttaacgttcgcaagaatcgcgacatatcacgacacgagtacaagagaaccggacacttcaaaaacgacggtaattactgcattgccatatacgagcaagttctgccgcaaggctctacggcaaaagccaagcggtcgttccgtatcataaataatctggcagcggcatctcacttcaaggtaggcaatcgcgcaaatcgcgccgagctatatcctcccgtagacgaaaacggctatcgcctcaaagccgcgctgcatcaaggcgattcggtactactctatgaaaactcgcccgaggaggtatacaatgcttctgccgcagaactctgccgcaggttgtatgtggtctccggaatatcatctatggtaattacaaataataagtatggcgtcttacaattacgtcattcacaaaaagcaggaaaatatgaaaagggtaaaaacggtgcatatgttgtgggcgaaaatctacgttccacaatcacaatgcttcatacgcaattcaaggcgctaatccaaaatcaagacttcaccatcgatgtgcttggcaaaatcaagtttctgaagcatgattaaacagaccatcgtaatatcgacaccacgtcgtctgtctctgcgaaaccacttgttggtaatcacaggggcggacgacgaggagccgattacgcgtccggttgtcaatatcggtattctgatattggagagcacggtgacaaccgtaaccctgccgcttctgaacgctcttgccgcggcgaatgtgatggtcgtcatttgcgatgaaaagcattgcccggcgacaatcgtcactccgctcgaaggcaacacaactcaaagcgaagtacttagagctcaatgccaaatgacactgccgcagctcaaacaggcatggaagcaaatcattacggcaaagattgccaaccaaaagcgcgttctcgatatctgcggattggatggcgacattctgtcgtcgcatgtgcgcaatgtactcagcggcgataccaccaaccgcgaaggcgtggccgctcggctttattggaccgaaatgtttgatgaagcttttgtccgcgaccgcgaaggcgatggcatcaatgccttactcaattacggttacgcaatactgcgagctgcaaccatccgtgcgcttatcggctctggtgtgtcccctgccttcggaatcttccaccgtaaccgatacaacgccttccctttggcggatgatattatggaacccttcaggccttttgttgatttgatcgtgtacgaactatggaagcaaggccaagcaaccatcaacaagaagaccaagtcgcggctgcttaaggttctgacctgtgacgtgttgtgtggtgatgtaatgcgaccgcttatgctggcactttcatcaactacggcatcactcggctcatacattcttcgtaaatctcaaatcctaactttaccacaaattccatgacacacaaccgaataaatgcttatcatattatgtggttatttctatttttcgatcttccggtctgtaccaagcggcagcggaagcaggcgaccaaattccgcaaagacattgaggctttaggctttaaaatgatgcagttctcggtatatgcatgccattgtccttcgtatcagcacgccgatgcccttattgagaagattacgcacatatttccggatgaaggtaacgtaaaaatactttccgtgacggacaaacagttctctaaaatattcaattacaggggtaaaccggaaagctccaagaattcgtggataaaggattctaagattccggtccaacttcagctggagttttattgatttttgctgatctttatgcactattgtacgcaaaaaaatgcttaactttgcttcagaatacaaccctacacggcgttttctatcttgcttccacgctatacgcacctatgtattagcgaattgcgatgcgatagttgcggtttgatgtaggattataatgatatacaactacggcctttcgcaacagatggtgcaggctgttgcggtttgatgtaggattataatgatatacaacggtacaattttactccctgtacaatttcaagttgcggtttgatgtaggattataatgatatacaactgcagacatcaaggccattcaagaccgctggttgcggtttgatgtaggattataatgatatacaactaggaagctcttgatactctccacttcgctgttgcggtttgatgtaggattataatgatatacaacaatgcagcaaatgcctattatgcagcctgtgttgcggtttgatgtaggattataatgatatacaacccgatactttgtcgctgccgcttcgacatcgttgcggtttgatgtaggattataatgatatacaacctactccattagaataggcaactgttccgtgttgcggtttgatgtaggattataatgatatacaactgcctccgcctcctcgggcgtgattagccggttgcggtttgatgtaggattataatgatatacaaccgactgcgccgcctccacaatctcgcctaagttgcggtttgatgtaggattataatgatatacaaccagctcgggggggggggatggcacggaatttgtagggagcggaataattgctaattttgcaacgcgattgcgaaggcaagccctgtagggtgcagacctcacgggtatgaaaagataaaatgattagatgacagccgagggcaacggcttcggacggatgcacggctgtcgaattgttaggttttgaagtatcacgttttttaatgatttgcatatatgaatgatgtgcaacgtaagcgcataaggcgcgctatcagtgtgtattatctggctatgggaatggtgttcgcctcgtgggcatcgcgtatcccggatgtaaaggcggctctgtcgctggacgacggcagccttggggcgctgctttttgccattccggcgggccagatagcaatgatggctatctcggcgatgttgattgcgcgctggggcagccgtatggtgttgcgcgtgtccttggtggcatacgcggtcgtacttttcggcatcagtcaggcgccgacgtttgtgtcgctgtttgtcgtactgtttctctttggcatggcagccaatatcctcaatatctcggtgaatacacagtctgtggagcttgaaaagatctacgggcgctcgatactgtcctcattccacgggctatggagcctcggtgggttgttgggcggcctcgtgggtaccggcttcgtaatcaccggattgccgttgtgggtgcattataccgttgtggcgatattgtgcataggtgtctctttccctatgggctttcgactgatggacgactctaagctacagcactccgacaataatgataataagtccgaggtgaatagccatcatcatagtttcgggctgctggacggcgtcatcattatgcttggttttgtcgcctttggcggaatgttctgcgagggcacggtctacgactggtcgtcggtgtatatggctacggtggtatgtcctccggaggcgctgatacgtgccgggtatatcgccggaatggcggcaatgactttcgggcgatttgtggccgaccgcttcatcacgcgctatgatgcggctcatgtcctacgcatcagtggcgccagcattatggccgggctgctgatagccacggccttcccgtatcttgtgacagccaccttgggcttcctgcttgtggggcttggcatgtccacggttgtgcctatatgctacagcgccgccggacgtcatccgcgactgtcgccggcaacggccatcaccgtggtttcgtcgatttcgttcatcggatttatggtcggcccgccattgataggtctcttggctcaggcgctgacgctgcgcgtagccctggctattgcagcctccttcggcttgctcatcatcttccttgctccggctgccgtgcgctaccgccaacggggctgatatagtagcccgctttgcacaacagagccaacagcccctccgggcctacaagatgtcccgcacctacggccacaagcacgctgtagcgccgcatttcgggggcgagcatagccgcccacgcgcggttgcgcgcatacagcatccgctcggcatacgcctgtcccatttcgcgagcaagcagtccttctatggccgcgaggtcttgacgatgataggccgcaacgaggctgtccgaagccgcctgtgccgcctcgggagcacgcactgactccatcagcgactccagttgctcgctgatgggtaggttcataagcatacacatctgctgcgcggcggtctcgagggcgcgcacttcccgtcccatggcccgagcgcgatgttgcagtgcaatgtccggcgacatatccgttgatgctcccgaacggcgcacttcgagaaaagcgtccagcattgccggcttcattcggctcaaagccttcactgtctcagagccgtccacttcgaatgaggacacgtatcggcataacgaatcaagcgatgccggcgacagaagtcgctgcaaggtgctgtcgctcggcgcaatggcgcaagccatagcctccggcgagagcgccatctcggaggcatccacctcgccgtacaccacggcggcacgctccagcgcctcagtcattccggtcaatgtgtcaagcacttccgtcccggccgtatgcatcgtccccaggacatacgatgtatgcgtgacgccgccatcgtctcccttcgccgtcacgcgccacagcacctgcgccgccgctccgacaaagctaattacagccacaatgacaaacgccaatacgcggccgagcatccctcgccattcattgcatatcttgccatacaacgaagtcatatctatatgtttcctacgataattcatatccccttgtgttttcgatttcacaaagatacgacatttcgagtgtctgcacaaagccgacaccgacagacatattaaccgccggagacaacacccgcgaccgcgacatccgcccaagtcggacatcgaaaaaacagtgaggcaaaataattttggtaatgtgcttaataatgtgtaactttgcacgatttttgagcgaaataaaacgaaatatacaaattacacaaagcaaccccaaacgtcattatgaaccccatcaaaaagaccatcacattggccgacgggcgccagattacgctggagaccggcaaattggccaagcaggctgatggcgccgtggagctccgcatgggcaataccatgctgctggcgactgtcgtctccgccaaggaagccggcgaaggcgtagactttatgcctctccaagtcgaatacaaagaaaaattctcggcagcaggacgcttccccggcggcttcctcaaacgcgaaggccgcgccaacgattacgaaatcctgacctcgcgtctggtggaccgcgtattacgtcccctattccccgacaattaccacgccgacacgttcgtcaacatcaccctgttctcgtccgacggcgtagacatgcctgacgccctggccggactggcagccagtgccgccctcgccgtcagcgacatacccttcaacggaccaatctccgaggtgcgcgtggcacgcatcaacggcgaatttgtcatcgaccccacattcgagcagctcgaacaagccgatatggaactgatggtaggtgccacctacgacaacatcatgatggtcgaaggcgaaatgaacgaagtatccgaagccgacctcttggcagccctcaaggccgcacacgccgccatcaaggagcaatgcaaggctcagatggaatttgccgaagaagcaggcaaagtgaaacgcgaatattgccacgaagtcaacgacgaagacctgcgcaaagacgtacacgacaagtgctacgaccgcgcttacgccgtagccaaagccggcagtgccgacaagcactggcgtcaagactccttcgatgccatctgtcaggaatacatcgatgcactccccgaagaagagcgcgacgagaaagccccgctggtcaagcgctactaccacgatgtagaacgcgaagccgtacgccgctgcatccttgacgaaggcatccgcctggacggccgcaagaccaccgaaatacgccccatctggtgcgaaaccgactacctgcccggacctcacggaagcgccgtattcacccgcggtgaaactcaggctctggccaccgtcaccctcggcacaaagctggacgaaaaaatcctggacgatgtgctcaatcaaggtcgcgaacgcttcctgctgcactacaacttcccgcccttctccaccggcgaagccaaggcacaacgcggcgtaggccgtcgcgaaatcggccacggcaacctggcacaccgtgccctcaagcgcatgttccccgatgacttcccctacgtatgccgcgtagtgagcgacatcctcgaatccaacggttcctcgtctatggccaccgtatgcgccggcaccctggcgctgctagacgccggcatcaagatgaagagacccgtcagcggtatcgccatgggtctgatcaccgacaccgattcatccaaatacgccatcctgagcgacatcctcggcgatgaagaccacctcggagatatggacttcaaggttacgggcacacgcgacggtatcaccgccacccagatggacatcaagtgcgacggcctgtcctacgaaatcctcgaaaaagcgctcatgcaggcacacgaaggccgtatgcacatcctcgacatcatcgagcagaccatacccgcacctcgcgaagactacaagccgcaagttccgcgcatcgtcacaatgattatacccaaagaactcatcggcgctgtcattggcccgggcggaaaagtcatccaaggcatccaggaagcttccggcgccaccgtcagcatcgacgaaatcgacgaaggcggatatatcgaagtggccgcagccaacaagcccagcatcgacaaggctctcgaacttatcaacgccatcgttgccctgcccgaagaaggcaaggtttacaccggcaaggttcgctccatcatggacttcggcgcatttgtcgaattcatgcccaaccgtgacggcctgctccacatcagcgaaatcgcatgggagcgtctcccagacatggaagccagcggcctccacgaaggcgacaccgtcgaggtcaaacttatcgaaatcgacaaaaagaccggcaaataccgtctgtccatgcgtgccctcaagcccaaacccgaaggctacgtagaacgcagcgagcgtccccgccgtgacggcgaccgcggcgaacgtcgtccccgccgcgatggcgaccgtccccgccgcgatggcgaccgtggtgaccgtcgtccccgccgtgacaacaatcacaacaacgacaacaacgactgataccccctcatagagaggcatcaacccatacagaccggagcggctacccatacgggtggccgctccacttttacattaacactcacatttctgatactaatcccggcctaagggtaaacatcctcactagagggaattaatcttcttcatctgtctatatacataaaacgagggacagccactgcggctgtccctcaattcttttgacggccttaagccgtgcattgtcgttatcagtcggcgaattcgatgaggacggtatcgttgccgatttggtcaccgggagcaacaaatacgcgcttaacagtgcagtcgcggtcagcggtaacgtcattttccatcttcatggcttcgtataccaggagtgtctttcccttggtcaccttgtcgccggcggccacgtcaacgctgatgatgcgtccgggcatgggagccttgattacgggaccggtgatgggctcatcggcagcagcgggagcagcctcagcttcggcagcggcggcgggggcggcagcagccttagcggcagcgtattcggcagcacgacgtttcttcaggaacggcatagccacgttgggcagcagagcgagcagtagttcttcctcggtgttcaaggccagtttgacgccgccacaatccggcaatatgggattttccggtttcttgtagttggaggtatcgtatgcgtgttcggtggcatcgccggtgattttttcgcggaaggcgggatctatgggcacgggggtgtgtccgtattcgcccctaaccagcgagataaactggttggacttggtggtgtagtcgggattgcctttgcggcggtcgatggccaccatcacggcctggctgcctacaatctggctggtaggtgtaaccaggggcaccagaccggcgtcgcggcgtaccataggtatcaagcgcatagcgtcttcgaggacatcttcggccttgagagacttcagctgagccaccatattggagtacataccgccggggacttcggcattcttcaccaattcgttgggcttggggaagccgaaatatttctcgatggcgtggcatgcatcgagcagtgcttcttcgtcgcctgccttggcggctgcaacggctgcatcgatttgtgcctcaacttcggcgggaaccttgtctgtgaggggatcgaattcgcgggggaagttgtccttgttcaggtcgtaagcagcgaggctctgacgagcgccgcgcagtgctttgcgtatttcgccgacggccttcatatccacgtccagttctacaccgagtttgtcggcgaagaggtataccaattcgatggccggagcggcgctaccgccgccgaaccaccagatgttggtatcgaggatgtctacgccgtggagtatggccatgatgcaggatgcgaggccgtagccgggggtgcagtgtgtgtggaagtcgatgtcgaccttgacattggctttgagtttggagataatggaggctgcacgcgagggcgttacgaggccggccatatccttgagggtgattatcttggcgccaagggcttccatagccttggctttctcaacgaagtattcgtcggtgaagatcttcttgggagcgggagctgcgggagctttcttgccgaagagcttagcaaagaagccctttggtgcttcggcttgaggcgtttcttccttggggtctacggtgtagcatacggcaccgtcgggcacgccgcccagggcgttgatcatgcggatggactccttgacattgtcgatgtcgttgagcgcatcaaagatacgcataacgttcagaccgttggtgatagcctctttatagaagccttcgagtacatagtccggataaggcacatagccaaagaggttgcgaccgcgcgacagagccgacagcatcgacttgtctttcatgactttggagacggagcgcagacgatcccagggagattcgtcgagatagcgcatcaccgagtcgggtacggcaccaccccatacttccatgatgtagaagccggcattctcgtacaacggcaacagtttgtcaatttcggactggctcagtcgggtggcgaacaatgattgttggccgtcgcggagtgtaaggtcgcggattttcagtttacgcttttccataatttatggtcagtggtttttgtgagggtaatatggtattggataatatttatcattatctgtgatgctatcgaggtgacgttttgccatatcgcggcgcttgattaccctgtggataacgcccggtcaagacactttgtcctcccgacaccgcaaagttaacagaaaatatttgatatgcagaaatttttccctaaatattttcgcgaaaaatgactatttttgcagtaaaataacaccctttcgaaaatgttcaatattttcaagaagacaccggagcctataaagttttggttttcaacggatatacactgtcatgtagtccccggagtggatgacggctcgcctgacgcggatacatcctccgagttggtttcggcgttgtacgatatgggcatacgccatatcatcgcgacaccgcacgtcacacaagccactttcgaaaataatcctcagacgctggccggtccgattcaggcgctcaaggacgtattggcgcgcgacggcgtggacgtacgcatcgaccattcggccgaatatcgtattgatgagctgttgcaacgtcacatcgagcaaggcatacttatgcccttccccgacaattacctgctcatcgaaaattcctttatccaagaaccgtggaacatcgaacaactggtatttgacttgcaggtgcgcggctacaagcccatacttgcacatcccgagcgctacttatattatcacgcacgtggcaatcgctacgaagagcttcaccgcaatcttctgttccagatcaatatgctgtcactggccggatactatggcaagcaggaaaagaaaatggctgaggcactggccaaggccggtatggtagactttctgggcacggatatgcacggacatcgacacgtgacttgcctgcgcgaatacctcgcatcatcggaggctcgccaccatcgcgatttactcgctcccaaaattaagaatagcatcttcgactgaaagcggccgcgccaaaaggcttgcaataaccattatagtattacggctattatg

SEQ ID NO: 3004 - DNA, 23654 bp, synthetic construct
  misc_feature 1..23654: note = Synthetic
  source 1..23654: mol_type = other DNA
ttcggctgactccaaagacttggccaagcgtatttgctgccgggcctccggtgacagcgtgcgctcgttagcctcggacaaggccgtgcgctcggctcgtctgagacgacgacgattgcgccgcgaaatcattcgcgtattcttgatgctacgcccgaagaacaagtataacaccaccccaacgagcggaagcaggataagcacggttacccacgccaacgacttgaccgggttgcggttttcgctgacaatcacgcacaatataactatcacggtgatggcatatatcgtcatcaacgtgtagtatatccaactgtaatcaaagcttatatacaaagcatccatgggacatggcactaaacgaaggcacaaattgcctcttcaccacaaatttacgcacattttaacggcacaccaccactgttataaataattaacacttaacgccgtcccgcaaccgctcagctattgcaatcctgccaacattgaagccgtccatgacggaacggcttcagtagccaacagcctctcagtaccggcattgccttgttaatggcggttctcccggacatggtccgttttctccgccgtttgcattctaaaactaatatttcctcatcagaatataagacaacgatacaacacgaccaaatttgcatcgtcatccaaagtctactggcttgagcaaactcgcctcagacacactgactgaaacaccacccgttatcacgcgaattgtcggattacccaaatatattagaatgatatatgattaagtcaatatatgcgctttccctcgttgtgttcttcccaaatgatggttgcgagatatttgtcgcttcggcattgaaggtcagcaactccatcttcaatcaattccgatgtgtcggattgatagtaggcatcgacggcctcttgcaaggagactccgtaaagctcgcagatggcttttatcacgtttgcgcttttattggcttgcattgccatttttccgtcttcactcatagctgtatgctttcgatgtgttttagacattcatcaagcatccgttgactgcgaatgcaatactgaatgtttggtttctcaaacacaagcagcccgagagcttcatcttcggaaatttcgccttcaaaatagcggtcgagcgtttgaataactctatcgttggcgacacctccaatcacaatatcatattcgctttcatcattcccggcacgacatttggcgacaaagtcaagccatcgcttgtcgtagctgtcaaattggagaacacgccattgcgatgactcaaactcaaacacgtatgaattaagccaagccgtccgctgacggcgaataaaacgctgggcatagcgcactgcctgttcataaatgggcgtaaggtagaatcccttgccgaaatcaagataatctcgagaatgtgcggtgtcaggcactaccacagattgggtcgacgaatggtaaagtttcattatgcaagcactcctttctctctcatatagtctgtaagatcttcaacgagataacgtgaactaaaagtgtgcagaacgtcatacgaaggcacgatataatcgtacagaatccccgactgtttaagccggcggtaaacctcgcgctgactcaatttaagtacctgcgcgagcttgcttatgcagtatgttacaaattcaagagtcttagtatccatcttacatcgctttaatcatagattcgatgaacgcaatttattcatcggagaggtggtatttagacagaaattatatctttgccaaagaaatttgatagcatggcaagtgtagagatggtaaagttatgttctccgctcaaccatcgtgttacctcattagggcgtttgccgacagcctctgcaagttgctttcggttcagccttttctctttcatgagagcttcaagcttgttggagatttcaaaagagagccgggtttcttctcgtttttcttgtggaatctcgttaaagatttcttttaaaggaatgtttgcagatttcatatatcaaatgttttatctgttataatttctctctccgttatcgttacattgcccaaactctcttcctgtttcagcagacgttcaaatttctgcaaatccatcacgtacccttggagagtatcgtcctcttgatatgtacggcggttttttacatcgccattgccgataacaaggatcttatcggtcagccgcaggcaatacagtcgcaatttggatctaagtaccggcagagcaacaacagaatcattcatcttgccctctctacggaaatagcgttccaatgcaccattgtctataatctgctcaacaaaacgcattatcgcctgaaagtcaggattcagttctgcattgtttcggaatttagctatgaatttttcaaattcgttctgctcgtccgaaaggaactgaatggtgtagattgtgcagcgttcgccacttgtcacaaaaagaagttctacttcgctcatactctatttttattattacggcgtaaagttacgaaataaattttacatatatgtaaattgtgcagactttttatagtagaaaagtagattaagttgaataaaattcccgatgcaaagatgaacagagtttctcgggagtggattttttttggtaagccttggtcgctatgcgaccaagcaccggctgcgccgacaagtacgtcaagcccactcgcgaatgcttcgcatttcacagtcctccacaagtatctattgtcaagaaacttagtgtttttataaatggaaattattttccgctccaatatatagcgtcagtgccggaacaggtgcttttcattgtgccgcatcggatcgccgaaatacacggtcttcgactcgccaaacacggcgcttaaactcgtggataacccacctacgaaagtcctatccatttacggcatagttcgagccgagagcggttgcattgaaagcgtccgcgccgttggtgcgatgttccgcatagtagcggcagaagtcatggacgggagctgaaaatttgcgattgagggacgctcgcggtaatacaccgctgcggagcgcatcttattgagcccggtggcgacgcaggcatcctttgaaatggggctgtgccgcaaaaaaatttcggcacagcccctcattgtattgtgcgaaagtgctccgcgcgattatccgcaatggaagtagcggcggacgatgcgcagcatggcttccgtgtcttcgtgggccagtgctatttcgtcgcggtcatacgagcgcaagcgcttgattatgccatcgatagtggcgtcatcaaagactccggcggccgtgaagacgttgcggcggtcttcaaggcattgcgccgacccgtagcagtcgacgggaagcgagctcaggcgcgaaagcacggaggcattttcggagcgatgtatgtttacgtccacgtatgtatcctcggccaccttcatggcatcgggcatctcgaagccgtgacgcatggccacagccaaagacgctatcagcaaatagatatccgccgacccgtcggccgaacggatctcgaccgtctgtttttgcgtggtgtccacgtcggccagcccgtggctgccgggattgagctcggcacacatatctttctgcgccgtccaacccaggggtacgcgcaccagcaccgagcggttgcggtcgccccagcacacattggtaggtgcttcctgcttgggcaccagacggaaataagacgtgggcaccgtattgccgaaggccgtaatggcctgtgccaaatccataattccggcgataccgcggcgagcctcgttgctgagacgacggtcgctgtcaagcatcatattgcgcccgtcgcgcatgattcgcatatgtatatgcaatcctgagccggctttgcccacggtgattttgggcgcaaaggtgatgtcgtaacccttgatatatccgagattacgtatcacccatttggcaatcataagctggtcggcagcccgccgtgcgtccacgggtaagaactcgatttcgttctgctcgtagattttcccgtccagggtgaagttgcctacctcgctgtgtccgtacttgatgcttccgccggtacgggctatgtattgcatacacagcgtgcgaaaatcgccgaacttggcaaaaggcgccgactcgtgataaccgcgctggtcgccggccggaaaagttccgtcatcttccttgacaacgtaatactccaactcgcccatggcttggaaatccataccggtcacgcggttgaactcgcgacaagccttgtccaagatgtactccggagcactctccagcggcttgccgtccttgtcaaagaacgagcaaagcatcgtcaccgtcgggatttcggcaaaggggtcgcggaaagccgtgctaaagcgcggcaacacatacaagtcgctgctaccggccgagataaagggaaacagcgacgaaccgtcgactctctcgcccaaggtcagaatagtttcgagataggccaagtcgttgatgacaaaattcagcgtcttcaggcgcccgtcggctgccgggtacatgaaattgaccatctctatgccgttgaccttgatataggtaattatgtcgtcgagtgtaaagtcctcttgagccttgtgcagcgactgcacaagggcgttcttactcatggctatgtttttttccatattcgtagtgtttggctcttatggggttgacttagtctggcgacgcgcgcagcgtctaaatagatagtttttcggccttaaaagtacaaatactttcattcacacaagaccacaaaagcaagatttaagaaattttaatataaaaatgcagctcgcatcaatcgctcgtccacatcgaacacaatcatcccgatatcaaaaaaatctcccgtgcttgtcacttaaaaaataattcgctaaatttgcgcataaaacgttagcgcctaagcatgtcggcatccgccgcaaaacacgcctgcgccacaacatccacacaagcacaaacaacaatagcacatagaactacaacatgaaacgctacattacaatcgccgtaagcgtgctgtgcgccaccctcggggcattcgcccaatcaaagacagacgccgccacgcaacaaattcttgacgcttaccgaaacaagcagctcaatcccgcgtccaaagtgattataccggtcaatgctccgttcgacttcgaaagcatctcgcgcgccacgcctactacggcagccatagtgcgcctgagcgatggagccacctttgacgacctacgtgccgccggtctcgaagtaatcagcactgccggcgacgacatggccgtagtggtaggcgacatcgaggacatcatcgcaatgaacgataatgcagatgtacaaagcttttctctgtcagcaccggccaagcccatgctcaacgaaacccgcaagctcaacggcgtcactacaatacacaatggagaagaccacctggaccagccatacaagggcaaaggtgtcatatgcggcatatacgacacaggcatcgaccccaaccacgtcaactttctcacatccgacctctcgaacacacgcatcaagacgctgttccacttctactcctccaacggtatgttcaacaactacaccgactatgacgcaataagccggttctccacagacgtcacctccagcacacacggcacgcacacgctcggcatcatggccggctcgttcaaccgtagcggaggacgcacagccatcctgacctcgaacggcagcgtgcaagtgcgaagcaccatcaaaaatccatactatggcatggctcccgaagccgacctcgcggtagcctgcggcgcactttatgacgccaatacctgctccgctgtcagcaaaatcgtagactacgccgtcaaaaacggacagcccgcagtcatcaacctcagcatcggacgcaaaaccggcccgcatgacggaacaagcaacttcggacaatatatggaacgcctcggcaaaaaagccatcatctgcatctcggcaggcaacgacggcgatgctcccatatcattatccaaacagttcagcgcctcggacaaagagctcaaaaccttcttcgtaaatgcaaaccccgacacacgcggaacagcagtcttcagcatctgggctgacgacaaccgcgagttcaccgtcaaagccgtagtatacaataaagtcaccaaaaagattgtcgaccaagttacactcacaagcacgcaaggagcactcgccaccagcaactacaccgttacgtcatgcatccacaacaacgaattcgatgaggcttacactgacagctatatcaactgcacatatagcgacaacgcctccaccaataaacgctactcggccagcatcgatatggttctcggatacaacaccacagccaacgccgacaagcacctcgtagccggacttatcatcgaaggcaaagacggcgccaaggtacaatgctcgctcaataacgtctccggcggattttatatgcagtcgctcggccaagacggatggtcagacggcaatgccgacttcaccatcaatgaccttgcctgcggcaaaaacgtcatcgctataggcgcttacaacaaccgcagtggcttccccacactcagcggcagcctatacggctacaacgatccggctctcaacatcgccggcgctattgcaccctactcatcctacggtgtactatacgacggacgcaaacttccgcatctctgcgcccccggcacctgcgtaatttcctcctactctaaatactacaccgatgcaggatatgtagacaccagcaccttatcggccgaatacaacgacaccaaacacaaccgcaagagctactggtgccaaagcaccggcacatccatgtcctcgcccgcattcgccggaagtatcgctctttggcttcaggtcaacccgaagctcaccattgacgaagtcatcgaaatcgccacaatgacagccaccaaagatgagcagaccacaacaaccggcaacgccgtacaatggggcgcaggcaaattcaacgccctggccggcctcaaggaagtgatgaaacgcgttggagtcaatgacattcgcatcgacgaacaaggcatacttgtcactcccgccggagccaaggcctacgaaatcagcgtccccggagccaagaacatcaatgtccgcctcgtgtccatgaccggcgccatcattcgcgacatcaatgccaccggcgacacatacgccctcgatttgacagacacacccgcaggcgtatacgtcctcagcatcaacaacggcgcatacgccgaacgcatactcgtacgctgacatacagaccgatacaccattagcaccaatcccgcgattgcagaacatctcatctgcggtcgcgggattggcgtttaccacaacaccgatataccgcaacaactatgcgcaaccacacaccactatcaagtaaaatcttgacagccatcgcaatagcactgctaagcgctacatccgagacaacatcctttgcatcggtgttcgatgcgcgtaccaccgccatattggccgccgacgccgccaaagcccggcgcgcaaacgcccggtcgacagccgtcacacccacgctctactacccggttatcatcgaaatagacgacgacagcgcactcgacgacattgacgcactcggaaccgtaatatggcgccgccgcgacaacatactgctcggctgcgtccccaggcaaaatatcgcgcagctgcaaaacatcgcgcacgtatcatccgcctccataggcgctcgcctttcactggcctcggaccgctcgcgccaatggtcaaacgtagcgcccgtatacgacggaacagcctccgacaaatgcggcacgctggacggcagcggcgtcaccgtaggattgtgcgacatcggcatcgatccaaaccacattgcattcagacacgacggcgatgcagccgcaccgtcacgcatcagcgtcgtcacccattacgtagacagcaccgcccggcgactcatcgccgacacacccgaggcagtggccgcatgggccactgacaccccggacgaaacacacggcacacacgtctgcgcaatcatggcctccggatacaaaggcaacccctaccacggatacgcccccggagccgatatcgtggccaccaccagccaactatacgacgtcgctctactatgcggcatcgaagacgtcatcgaacgcgcccaaagcctcggccaacccgccgtcgtcaacctctccatatcatcgctcataggtccgcgcgacggcaccgatgccgtatgtcgatacatcgacaaatgcgcccaagacgccgtgatatgcttcgccgcaggcaattacggacaatccaaattcgccatacaccacgacttcaccacccaagcacccaccgtcggcaccatcatagacaaccgcgtcacctggagtggaatggacgtcaacggatacaccgacatctggggacatgacgacaccccgctgcaattgcgcgtaatcatctacgacttcgacaccaaagccataatataccgctcaccatggcacggcggtccgaccaacccccgaggcaccgccacactctccgcaggcacagccggagcctggaacgaaggcacatacagctccgaaagctccatcacaatatcctgggacatcgacaggcacaacagacgcacgcactttgccgtactctcggacatgcactccctatccctacgccaatccggcccgtggtcacgatactacttcggctacgaaatccaagggacacaaggcgcatccgtagacatatacgccgacgggacacaaacatttctgcgctcctgcggcatcccgggcatgagcgaaggcaccgcccgaggagcgttcaacaacctcgcctcaccatccggtgtactcgccatcggcggatacgacaaccgcgccaccgtccccatgctcgacggcagcgaaacaacatacagcggcatcaaccccggataccccatgccatacaccagctacggcaacaccttcgacggcagacacatccccgacttctgcgcccccgccaacaccgtcatctcggccatgagccgctactaccgcgaagcccatcccgaaggttacaaagtcctgaccgaaaccaccgcagccgacggcacccgatacgcatggtacgacgaaggaggcacatccatggcctcgcccgccgtcgccggcatcgtcgcactctggctacaagccgaccgcacgctctcggcacaagacatacgcgacatcgttgcccatagcgcacgcaccaacctccccgaccccaccaacccccgctggggtcttggagccatcgatgccgccgccggcctcaagtaccaccttgaccaccaaggcatatccgacatcagcatcgacacccccgacatccaccccatcgccaccctctatcacgacctcctcggccgtcccctcccggcccccgcatccgccgatatcacaaggaaatccgcatccgccaattccacattccacattccacattccacattaattattcgcaccgacatctaccccgacggctcccgccgcaccaccctcctccgccgataaccccgaacaactaaaaatatcgcgtttcatttaaccatttccaaaagtaagcaaatcagacgccactctaacgcagaaagacataataccatttataaaagcgcttctgaaaaatgcgcactacgcaccgcaagttatttgcataacttgcggtgcgcagttcattatctgcatttaggataaaaccggttataataaaaaagccctcaccgaagcgagggcataggaataaatccttcggcaattactgccttattgcgataagatgtaggattttacttatcttgcgacaaatttaagccaatgttttgggatatccaaaaaaagtttgtaaatttggcattatttaacaaatcaatgctgtggatgatttgagtaagtttagaaatatccctaaaaacaatttatatggaaagtaacgagaaaaaacgtatcctcggattggatacaggcacaaatagtatcggatgggctgttatagaccgtcttggagaccaatgctcgctggtagacagcggtgtgcacatattcaccgagggtgtaaaggaggaacaaggcaaagaagtgtccaaggctgcggagcgcacatcctatcgggcaatgagacgcggcttttacagacgtaagctacgaaagatacgcctcttacgcattctgagcgagttaggatggtgtcccgctttgtctcccgaattactgtcgcaatggcgactgaaaaaagtctatccggctacgccagagtttatgcagtggttgggaaccgatgacgacaacgcgattacaccttatcgatatcgagttatatgcctgcacgaaaaattggatttgacgcaggaaacccaacgttatatccttggacgtgcgctctatcatatagcacaacgccgaggatttcgctcgaaccgcaaggatcaatccaatgatgacgaaaaaggtaaagtcaaagaggctatatcgggattgtcgcagaaaattaaggatgaaggctgcgaataccttgccgaatacttcgaaaagctttacaaagaaggcaaaaggattcgcaatcagtacacttctcgcgataaccattatgtcgaagaattccatgcgatatgtcgccgccaggaattggacgaagataccgtcaaccgccttgagcacgtgctatttgaccagcgcccgctcaaatcacaaaaacacaccgttgggcattgtctcttcgagccggcaaagtcccgctgtcaggcaagccatcccgattttgaggaaatgcgcatgctgcagaccttaaatcaaataaggatgaaaacgcccgatgatgatatgcttcgcccgctttgggatgaggaacgagaggctataattccgttgttccaacgaaaatccaaatcgaactttgatttcgaggatatagctaaggaacttgccaaaccatatatcaaaaggtatggcaagaagtgctacggatactacaagacagatggcaacaaggacattctgttcaactatccgatggatatgggcatctccggttcgccgttcacagccggaatggtagccgcgcttggaccggactggaaagccgttatcgatgcacagtacgcaaaaggtgaaggcaaaaaactcgatgacaaagtgaatgacgtatggcatgcactatcatttttcgacaatgacgacaaattggaggtctggctcgagacaaatctcggcatagaagcagacacggcaaaaaaggtggccggcatcaagatggtaagtgcctacgcatccttaagccacaaggtgatacgcaagattctgccgtatatgcgtggaggcatgatatattcgtatgccgtaatgcttgccaatatagatgccgtactgccggcatatgttcgagttaacgacgacatgcgcaaggcggcggtagatatggccgtcgaatgcctcaacgagtacaacaagaaaacttgcgagtgtaccatgtaccaatggctcaagaacttccttgccgagaaataccatatagaccacaaaacgctgaaccgcctataccatccgtcagacctcgagacatatcctcatgttcgacctgacgaacaagaccgtatgcgcctgggctctccgcgtatatcttcgatacgcaacccgatggcaatgcgctcgctgcatcgtattcgtcacgtggtcaacgccttgttgggcaagggcatgattgaccgcgacaccgaggtgcatatcgagctcggccgcgaacttaacgatgcaaatatgcgagctgcaataaggcggcagaacaaactcaatgaaagtgagcgtgccaaagccaaagccgagctcgaaaaatatggtatcaataacgcgtccgaaacagatattgacaaatatatactctgggacgaacaacacaagaaatgtctgtacaccggcaaacaaatcggaatagaagacatcttcgggcctgattctaaatacgacatcgagcatacaattcctcgcagtcgcggcggagacagcactatggagaacctcacgctctgcgattcgcgcttcaatcgcgatgtgaagaagacaagactcccgagcgaattggccaatgcagacgaagtgatgcagcgagtggcatttatgaaagaaaaggccgacgacttgcagaaacaaatccgccgctgccgcacaaatgcgtctatggataagagccaaaaggaccgcataattcaaaagcgacattcgttggaactgcagcagacttattggcgcaataaataccaccggtttgaaatgaccgaagtgcccgaagatttcagccgccgtcagggcgccactgctggtatcgtggctcgatatgcacgattgttcttaaagtccctattcgatgatgtatctatcgtcaaaggtgctgcaacggccgacttccgcaaagcatggaaactgcagagcacagatgagaaaaaatctcgcgacaaccatacgcaccatcaagtggatgcagtcgtaatcgcgtgcatcggcagaggtgactaccaacgtcttgcggcctcgtaccatctgaacggatacgccgacagagaacgcccgtcagtgcccgaaccttgggaaggtttcgtggatgatatgcggcgcatacaggccgaaaccttaatatcatacgacttcacagacaatgttccgaaacaggtgcgccgccgtatcaggttcaccggcagccatcatataaaaggccctaaaccatcacacatatccgaaagcgatacggcacgtttgcgcttacatatggatactaattacggtgccatcgaacatgacggcgaagtgaaatatgtcgtgcgcaactcgataggatctctaaaacagaaggatatcaaagacattgtcgactcggttgtgcggcaaaaggtacaagaagcttatgacgccaaaggcgatgttgctttctccgagcctatatggatgaacgaggccaagggcatacagatcaaaaaggtaagatgctatgctccgaacgttacacgtccgctcaacatccgcaagcaccgcgacatatcgcggcacgagtataagagaacaggacacttcataaacgacggaaattactgcatagccatatacgagcaagttctgccggaaggatctaccgctaaagccaaacgatcgttccgtatcgtcaataatctggccgcggcatctcacttcaagttaggcaaccgcaccaaccgcaccgagctatatcctctcgtggacgagaacggctatcgcctcaaagctgtattgcatcagggcgattcggtactgctctatgaaaaatcgccggaggagatatacaatgcctccgccgccgaactttgccgtaggctgtatgtggtagccggaatatcttctatggtatttacaaagagccgttcatatggcgttttacaattgcgtcattcacagaatgcgagcaaatccgaaaagggtaaaaacggcgcatatattgtgggcgagaatctccggcctacaatcacaatgcttcatacgcagctcaacgctctcatccaaaatcaggacttcaccatcgatgtaattggcaaaatcaagtttctgaaacatgattaagcagaccatcgtaatatcgacgccacgtcgtctgtctctgcgaaaccacttattagtaatcgcaggggcggacggcgaggagccgattacgcgcccggtcgccaatatcggaatcttgatattggaggacacggtgacgaccgtaaccctacctctcctgaacgctcttgccgctgcaaatgtgatggttgtcatttgcgatgggaagcattgcccggcgacaattgttacaccgctcgaaggaaatactactcaaagtgaagtactgagagcgcaatgccaaatgaccctgccgcagctcaaacaggcgtggaagcagatcattacggcaaagattgccaatcaaaagcgcgtgctcgacctctgcggactggatggcgacattctgtcgccgcacgtacgcaatgtactcagcggcgataccaccaatcgagaaggtgtggccgcccggctttattggacggaaatgttcgatgaagcctttgtccgcgaccgcgaaggagatggcattaacgccttacttaattacggatatgccatactgcgagctgcaaccatccgcgctctgataggttcgggagtatctcctgcattcggcatcttccatcgcaaccgctacaacgccttccctttggcggacgatgttatggagccgttcagaccctttgtcgatatagttgtgtatgaactatggaaacaaggccaagccaccattaataaaaaaacaaagtcgcggttgctcaaagtcttgacctgcgacgtgttgtgcggcgatgtgatgcgacctcttatgctggcgctctcatctactacggcatcgctcagctcgtacatactacgcaaatctcaagttctaactctaccacaaattccatgacacacaaccgaataaatgcttatcatatcatgtggctattcttattttttgatcttccggtctgtaccaagcagcagcggaagcaggcgaccaagttccgcaaagacatcgaggctttaggctttaagatgatgcagttttcggtatatgtgtgccactgtccctcatatcagcacgcggatgccctaatcgacaaggttacacacatctttcccgatgaggggaatgtgaaaatcctctcagtgacagacaaacaattctctaagatatacaattattggggtaagcccgaaagttctaagacctcacgaattaaagattcaaaaattcccgttcaacttcaactggagttttattgattttcgccgacgtcagcgctctatggttcgcaaaaaaatgcgtacctttgccacaaaacacaagcctacacggcgttttctatcctgcacatgcgctatatactcctttgtattagcgaattacgctgcgatagttgcggtttgatgtaggattataatgatatacaactactgagtgtcgagggctttattagctgccgttgcggtttgatgtaggattataatgatatacaaccggtctcaatattcggcgcaacgcggtatggttgcggtttgatgtaggattataatgatatacaacgggtctctcacggttgcaaacggcttccacgttgcggtttgatgtaggattataatgatatacaactatatcgactatgacaacgtaaaagtggacgttgcggtttgatgtaggattataatgatatacaacacgactccgcccgcaaagagtttgaggactagttgcggtttgatgtaggattataatgatatacaacattttcgagacgcgctttttcaaaaccatagttgcggtttgatgtaggattataatgatatacaactaagtactcatagatgtgggtctgcatattgttgcggtttgatgtaggattataatgatatacaacctgcgttattatggtgcattacccttttagttgcggtttgatgtaggattataatgatatacaacccatccatagccggagcacaggcacttatgttgcggtttgatgtaggattataatgatatacaacggcgtactttctggccattatatgtttactgttgcggtttgatgtaggattataatgatatacaacttaacggtttccaatacatcgaatgtcgaagttgcggtttgatgtaggattataatgatatacaacataaatgagagtataggcacggaacggaaggttgcggtttgatgtaggattataatgatatacaacataggggctgagcgccctctcatgggaggagttgcggtttgatgtaggattataatgatatacaacatatactatttaattattgaaccatatatagttgcggtttgatgtaggattataatgatatacaacagaccttatgatactctggcgggcagtatgttgcggtttgatgtaggattataatgatatacaactacttttatcgaatacacagaccccgaatagttgcggtttgatgtaggattataatgatatacaactcaccaggtaaaacttcctgatgaaagaaagttgcggtttgatgtaggattataatgatatacaacactgctcaaatgcaacgtttgcaggctgctgttgcggtttgatgtaggattataatgatatacaaccgtcacagatgacgtgcgaaactacatcaccgttgcggtttgatgtaggattataatgatatacaactcaaatgtggtacgtggccgacaacgcggagttgcggtttgatgtaggattataatgatatacaacctcgtaaatctcctcgcggttgtccggagtgttgcggtttgatgtaggattataatgatatacaaccgttgggtctcgctcatccttctaagcgtagttgcggtttgatgtaggattataatgatatacaaccctacggctggacgctgacgacataggcaggttgcggtttgatgtaggattataatgatatacaacgccgtggcgtcccacgtaaatccacgctttgttgcggtttgatgtaggattataatgatatacaaccctccaactgatactcgtacggattcagaagttgcggtttgatgtaggattataatgatatacaacaaataaagaataaagctcaaagcaaaaatagttgcggtttgatgtaggattataatgatatacaacaccttataatttaaagactctttatagttcgttgcggtttgatgtaggattataatgatatacaacgcagtaggcgaattatattcattctgtttggttgcggtttgatgtaggattataatgatatacaacttagaacaagtaatgcatacaactcagatgttgcggtttgatgtaggattataatgatatacaactctatgtgcaacgtcattacatactggttgttgcggtttgatgtaggattataatgatatacaacgggggcgaagtccccgacggaggctcgagtgttgcggtttgatgtaggattataatgatacacaacgaagccgtctgcttagaaggcagaaaccatttgacatataccacgggtggaatcccggactactgaggacgtggtaatatattcaagcagatgtaattgtaacgggcttttgtgcatcacggatttattgctaattttgcagcgcaattgcgaaggcatattcataagattttatgcttcgcggatttaagaaaaaaaatgcagtgacgtacaacggcatagtgcgtatgcacggctgcgaaatgttaggtttgtctgctatatattaagagtatgaatgatatgcaacgtaagcgcataaggcgcgctatcagtgtgtattatctggctatgggaatggtgttcgcctcgtgggcatcgcgcatcccggatgtcaaggcggcgctgtcgctggacgatggcagcctgggggctctgctttttgccataccggcgggacagattgcgatgatggccatctcggcaatggtgatagcgcactggggcagccgcatggtgctgcgagtgtctttggtggcgtatgccgcagtgctctttgccatcagtcaggcgccaacgttcgtgtcgctatttgtcgtgctgttcctcttcggcatggcggccaatattctcaacatctcggtgaatactcagtcggtggaattagagaaactttacgggcgctcgatattatcgacttttcacggactatggagcctcggcgggctgttgggcggcctcgtgggtaccggcttcgtactcaccgggctgccgttatgggtgcattatgccgtggtgtcgatactatgcgtgggcgtcaccctacccatggggttacgccttatggacgactcgaagctgcaacattcggtcgagaaggccgaggatgacggcggccgtcacggattcgggcgtcttgacggcgtaatcatcatgctgggctttgtcgcctttggcggaatgttctgcgagggcacggtttatgattggtcgtcggtgtatatggctacggtggtatgccctccggaagcgttggtacgtgccggatacattgcgggaatggcggcgatgactttcgggagatttgtcgccgatcgctttatcacgcggtatgatgcggctcatgttttacgcatcagtggcgcaagcatcgttgcgggcctgctgatagccacggctttcccgtatcttgtaacagccacccttggcttcctgttggttggcctgggcatgtccacagttgtgcctatatgctacagtgccgccggacgccatccgcgactgtcaccggcaacagccatcaccgtagtgtcgtccatttcgttcatagggtttatggtcggtcctccgctgataggccttttggcacaagctctgacactgcgtgtggccttggccgtggcggcatccttcggtctgctcatcatcgtctttgctccggctgcggtccgctaccgccgacggggctgacgtcaaatccggcactgcgaagcatagccaacagcccctcaggcccgacaagatgtccggcgcctaccgccacaagcacactgcggcaccgcatttccggaacaagcacggcagcccaagcgcggttgcgtgcatacaccatacgctcggcgtacgcctccctcattccacgagcaagcaagcgccctatggcctcgaggtcttggcatctgtaggcggcgacaaggctatccgaagccgcttgtgccgcctcgggagcgcgcaccgactccatcagcgcctccagctgctcggcaacgggcgtgcccataagcatccgcacctgctgctcggcggtctcgagggcacgcacatccttgcccatggccgttgcacggtgttgcagcgcaatatccatcggtacacctgtcgaggcactcgaacggcgcacttcgagatacgcatcaagcatcgcaggcttaaaccggccaagagcctcaagcgtccttgcgccatccacgccgaaggtggacacatatcggcacaccgagtcgagcgccgccggcgacagaagccgctgcaaagtactgtcactcggggctattgcgcaagccatagcctccggcgtaagcgccatatcggaagacaacacctctacatataccgccgctacatgctccagcgccccgtccaatccggccaacgaatcaaggacatctgtcccggccgtatgcatcgttcccaggacatacgatgtatgcccggcgccggcaggaccgtccgccgtcacgcgccacagcacctgcgccgatgcaccggcaatgcccgtcacaacggcgacaacgagcgtcaaaacacgcccgagcaccatatgcgccccgacaatcagctgtatcctatgtggttgattcataaaacagtgcatatcccaaatgacatttcccatataattgattacacaaagatacgacattttgtgcgcacacacaaagccgacagacaagacgccgtataattcacccggattcacatcctgcgaccgcagcacacatccaaagccttcacaaaaaccccatgacggaaaataattttggtaatgtgcttaataatgtgtacctttgcacgatttttgagcgaaataaacgaaatatacaaattacacaaagcaaccccaaacgtcattatgaaccccatcaaaaagaccatcacattggccgacgggcgccagattacgctggagaccggcaaattggccaaacaggctgatggcgccgtggagctccgcatgggcaataccatgcttctggcaacagtcgtctccgccaaggaagccggcgaaggcgtagactttatgcctctccaagtcgaatacaaagaaaaattctcggcagcaggacgcttccccggcggcttcctcaaacgcgaaggccgcgccaacgattacgaaattttgacctcgcgcctcgtggaccgcgtattgcgtccccttttccccgacaattaccacgccgacacgttcgtcaacatcattatgttctcgtccgacggcgtagacatgcctgacgccctggccggactggcagccagtgcagccctcgccgtcagcgacatacccttcaacggacccatctccgaggtgcgcgttgcacgcatcaacggcgaatttgttatcgaccccacattcgagcagctcgaacaagccgatatggaactgatggtaggagccacctacgacaacatcatgatggtcgaaggcgaaatgaacgaagtctccgaagccgaccttctggcagccctcaaggccgcacacgccgccatcaaggagcagtgcaaggcccagatggaactcgccgaagaagtaggcaaagtaaaacgcgaatattgccacgaagtcaacgacgaagacctgcgcaaagacgtacatgacaagtgctacgaccgcgcttacgccgttgccaaagccggcagcgccgacaaacactggcgtcaagactccttcgatgcaatatgtcaggaatacatcgatgcactccccgaagaagaacgcgacgagaaagcaccgctggttaagcgctactaccacgatgtggagcgcgaagccgtacgccgctgcatactcgacgaaggcatccgcctggacggccgcaagaccaccgaaatacgccccatctggtgcgaaaccgactacctgcccggacctcacggaagcgccgtattcacacgcggtgaaacccaagctctggccaccgtcactctcggcacaaagatggacgaaaaaattctggacgatgtgctcaaccagggacgcgaacgcttcctgctgcactacaatttcccgcccttctccaccggcgaagccaaggcacaacgcggcgtaggccgtcgcgaaatcggccacggcaacttggcacaccgcgccctcaaacgcatgttccccgatgacttcccctacgtatgccgcatagtcagcgacatcctcgagtccaacggctcctcgtccatggccaccgtatgcgccggtaccctggcgctacttgacgcaggcgtcaagatgaagaagcccgtcagcggtatagccatgggcctcatcaccgacaccgattcgcccaaatacgccatcctgagcgacatcctcggcgatgaagaccacctcggagatatggacttcaaggttacgggcacacgcgacggcatcaccgccacgcagatggatatcaagtgcgacggcctgtcatacgaaatcctcgaaaaagcactcatgcaggctcacgaaggacgtatgcacatcctcaacatcattgagcagacaatacccgcacctcgcgaagactacaaaccgcaagttccgcgcatcgtcacaatgattatacccaaagaacttatcggtgcagtcatcggcccgggcggaaaagtcatacaaggaattcaggaagcctccggtgcaaccgtcagcatcgacgaaatcgacgaaggcggatatatcgaagtggccgcagccaacaagcccagcatcgacaaagccctcgaacttatcaacgccatcgttgccctgcccgaagaaggcaaagtatacaccggcaaagtccagtccatcatggacttcggcgcatttgtcgaattcatgcccaaccgcgacggactgctccacatcagcgaaatcgcttgggagcgtctccccgacatggaagccagcggcctccacgaaggcgataccgtcgaggtcaaacttatcgaaatcgacaagaaaaccggcaagtaccgtctgtccatgcgtgccctcaagcccaaacccgaaggctacgtagagcataacggccgcagcgaacgtccacgccgtgacggtgaccgcggcgaccgccgcccgcgtcgcgatggcgatcgtccacgccgcgatggcgatcgcggagaccgtcgtccccgccgtgacaacaaccatcacaacgaaaacaacaacgactgataatccctcatagaggcatcaagccatacatatcggagcggctgccctcacgggtggctgctccgttttttttcatgcttgtcaggcatataattccgcattaaaagcccggctatattcacacacatcgacatggacatcatcattgagcctaaggagcctctcgacgcttacagcaccccaattgttcaacaggacggccaaacaaaacaagtaccgcgaatacgatatgttcggaattgcgtccaacggcgacccttcgcatcctatgcacggcctttacaaattcaagcgcggcttcggcggcgaaatattccaccagctcggttgctgggattatcctatcgacgacgacaaatacaaatgcctcgccgctcgcgaaatgtgcgcccaagggtattactcgtgatgaggcatttcttatcgtcaacgggaataatccaaagacaaaaacatccgttttatctcgataatacataaagcgagggacagccgcggtggctgtccctcgctttatgtgacggctaaaagccgtgtattgtcgttatcagtcagcgaattcgatgaggacggtatcgttgccgatttggtcgccgggagcaacaaacacgcgcttaacggtgcagtcgcggtcggcggtaacatcgttctccatcttcatggcctcgtaaaccaagagggtcttgcccttagtcaccttgtcgccggcggccacgtcaatgctgatgatgcgtccgggcatgggagccttgactacgggaccggtgataggctcttcggcagcaacaggagcagcttcagcctcggcagcagcgggagcggcagcagcagcggcagccttggcggcggcgtattcggcagcacgacgtttcttcaagaatggcagagccacattgggcagcaattcgagcaacagtttctcctcggtattcgaggcaagcttagcgccgccacaatcggccaaagcgggattttcaggttctttgtacttggaggtatcgtatgcgtactcggtggcatcgccggtgattttctcgcggaaagcgggatctaccggcacgggagtatgaccgtattcgcccttaaccagcgatatgaactggttggacttggtggtgtagtcgggattacccttgcggcggtcgatggccaccatcactgcctggctgcctacaatctggctggtgggcgtaaccagaggcaccaaaccggcgtcgcggcgtaccataggtatcaggcgcatagcgtcttcgagaacatcttcggctttgagcgacttcagctgagccaccatattggagtacataccgccggggacttcggcattcttcaccaattcgttgggtttggggaagccgaaatatttctcaatggcgtggcatgcatcaagcagcgcttcttcgttgcctgccttggcggctgcaacagctgcatcgatttgcgcctcgacttcggcgggaactttgtcggtgaggggatcgaattcgcgagggaagttgtctttattcaggtcgtatgctgcgaggctctgacgtgcaccgcgcaatgctttgcgaatttcgccgacggccttcatgtctacgtccagctcgacaccgagtttgtcggcgaagagatacaccaattcgatagccggagcagcgctaccgccgccgaaccaccag

SEQ ID NO: 3005 - DNA, 18696 bp, synthetic construct
  misc_feature 1..18696: note = Synthetic
  source 1..18696: mol_type = other DNA
tgtctcgtgggctcggagatgtgtataagagacaggattaatcagccgcgcccactaattattaattgaggcttttatttgacaggcttgtattccacgaatgcctcgattgcctcgtatgaggccaggccgagtccttcgtagagcttggcggtgccgcggttgcgttcttcggctcgctgccagaacaggcggtcgtcgtctccgaggaagggagcattctccatctgcgactggtgcttgagaatcgagttacgcttgaaacgcagctcctcggggctgatgggcacggccatctcgatgtggtcaatttcccattccgcccaggcgccgcggtacatccatatgcggcagtccttcatccattcctcgtctttaagttcgtcgacggctgcgagcacggcatcggtgcagaccttgtgggtgccgtggggatcggcaaggtcaccggcaacgaaaatctgatgaggcttcacatcttcgagcaggcgcttgacaatatcaacgtcgacctgcgaaagatcgcctttcttgatggtgccggtctcgtagaacggaaggcgcaggaaatgaatgttctgtggcttgacgccgatatagttgcaggcgatggtggcctcggcctgacgtatcatcgttttgatttcgcggatgtcggcgctgtccgtatcgccggctttcttgccgttgacaaactcgtgtacctctttcgacagcttctcgtaaccgtccttgaagccgaacataggcgcaattttgtccatcatcaggaagtagcgcatcatgtcctcgtcgccaacagcaatgttgcccgaggtttcgtatgccacgtgcacgtcgtggtgctggtcgacaagacgtttgagtgtaccgcccatagagataacgtcgtcgtcggggtgcggcgagaacacaatcacacgcttcggatagggattcgcgcgctcgggacggtaggtgtcgtcggcgttgggtttgcctccgggccatccggtgatggtgtgctggaggtcgttgaatatcttgatgttgacgttgtaggccgaaccatagagggcgataagctcgccgaggccccagtcgttgtaatccttgttggtgagtttcaggatgggcttgccggtcatgtcgcagagccacacgatggcacgccggatgagcttgtcgttccactcgcacgaggtcaccttccaggggtggctgatgcgggtgaggtcttcggcggcgggaaggtcaatcaccaccttgatgtggttatggccttgcagaagcgacgcaggcacgtttgtagtggcgggttcttcgactgccttgcgcacaatcgacgcacggttttcgccccaggccatcgtaacgacgcggcgggcgtcggcaatgtcggatatgccgagggttatcgcggtggacggagcgccgtcacacttgtagttagaggcgatgccatggcgcgtctcctcatcgagcagaacaaggcggcactggcttgtggctgcgctgccggggccgttgaaggcgatggagccgccggggccaatctcgcagagggccaggtcgaggccaccctcatcctgaatcgactgctcgtaggcctggcaatagtcaaacatattttctttggtcacaccgggattgatggtgcgcacgttggcgtcttcaatgtcgatgtggtcaaggaaaacttcgcgcagacgcgcaagggtcgagggtccctcgggattgagggggaagaattcgctaatgttgaaaatcacaacattgcggaaatcgaccttcccttccttatgcatgcggataagggctgaatagacacggtgggtgctcgcaccggctccgagagccagcacgcacttgcctttgcggtcgatatagcggttgatgtgctttacaaagtattcggcgatgaactccgctccatcgtcggcagtctcgaagatgcgggtgtcgatcttctcctcacgggcgagggcggttgcttcgatttcattctcagggcagtagtaccggcgcgggatgcggtcgagcttaatctgagagcttaaatcttttttcattaatgtatggtgttatatatttataattgtgcttgggttcaggctgtgttttatgtctatgcaaagataacaataaaaagccgaaacagattgataatatttctaaatttttgtttataaagcaaaataaacccatcatcacccgtgattacaacaaacgcgcccgaagccgatgaagtatgcatcggtttcgggcgcgtcatttacaattaaattcgtcctaagccactataaggactgcgagcggaattatcactcggccttgacttcgccgcgcttgagcgtcatcagctccttgccggcagcgtcgagcagcatcaccttgtcgttgccgtcgctgatggccgaggccgtctgttcgagggcgacgaggaacgccgtttcctggtgggtataggggcaggccatgcgagtggtacccatgttactgaaatccacggcattggaacggcggtggtcgaggtagatgtcgccgttgacgaagttacagccggtgttgccgtgcaatttcagttcagtcaggtcgaagaatacatcggcaggcacctcgagcttgtcaaggccgacgatgctttccacaatccactggccgttgaggaactcaaggttgcccctgcggaggcgcatcacggtcttgccgccttcaccgagaaaatcgacgaaagtttcctgccctacctcgctcatgcggagcttggtggacacattgtccgtcacaatggtgtttatcatgttgtcaaactccacgtcggcgcaatagcgcagcgtcgagagcacattgtagaatgtcacgacgtcgttggcatccaccgaataagcgccgttaagggtgttgcaaccgttgttggcatagaatgccgcggacgagggctcgaaggtgatgtacggcatgtcctcgtcccggtcaatggtcacgccattaaccattacaatgctccattgtccgccgaggtcacgggcaagacgcgtattcatagtcagcatagctacattgggatttgccgcagcgctgtcggtagcctgactctcagggcctggcgcaaccgtcggctgctcggccggagccggagaaacttgcgtggctgccgcaccgctcattgttttgggatattttgacttgttgggctgaatcacggaacatccggcgcccattatggccatggctgagatggccgcgataaaggcaatttttttcattcgtaagttgtatttcctattatgacactttcaaggcgtcaaaggtttaactgcacagttgtaaaaaacagggatgaaaagcaacatcggccacccttagggcagccgatgctgttgtaatcgttaagcgagcgctgggcttacttgcggataccgagctctttctgggcgatgatggcgcggtagcggctgatgtctttgcgcatcaggtagtcgagcagacgacgacgcttacctaccagcatcttaagagcgcgctctgtagtatgatctttgtgatttgacttcaggtgcttggtcaaatgagcgatacggatggagaataatgcaatctgcgcttcaggcgagccagtgtcagtcttgctcttaccgtacttctcgaagatctgtactttttcttcagaatttaagtgcattcttgagatgatttaagtagttaataatatatgattttgttaatcgggtgcaaagatacgcaattttccgttaactgccaaaccttcggtttattttaatcgaggctcgagcggtcttttgtcggattgcggtagtaaagcttgccatcgatgaactcctgggttgcgataagggtcggtttaggcagcttttcataatagcgcgagatttcaatctgctcgcggttctcgctcacttcttccagcgaatcgttgagcgatgcgaattcctgcagcttcttctcgaggtcgtggcgcatttcagcggcaatctggtttgcgcgcttcgccatgatgcagacagtttcatagacgttgcccgtatcttcggcgagctccacgaggtcgcgggttacggtgttgagaggtgcgtttgatttcttgtagtccatgagttaaatgatggatatttagtcttttacgtattttcttgcgattgtgtagatgttttcggcctccgagaggttggggctgtctgggtaattgttgatgaacgaatagtattcgtcaatcacctcgcggaagcgttcctgcttgcgttcgtcgacactcatgtcagcctcctggaaacgggccttgagaatcagcaattcaagttcttccttgtattttgaataaggatagtcacgcacggcattctgagccacgattatgcagctttcatagttgttgcccatgtagttgccgagattgtaatacagctgggcgttctgcagctgcttgagggtgagcttatcctgaagttcaaaaatggcgttttgcgcctgggcgactttatcgctcctggggaaatagtcgagaaatgcctgcagctcctctatgcccttgatggtgggcgtctggtcaagctgagggtcgggagaatcgagataatagccgtagccacaataaaagcgggccggctccacgtattttcctttcgggtaacgctggtaataagttttgaagtaggcgcccgaactgatgtagtccttgttctcataattgctaagggccagcagatagagggactcctcggccttgtcggtgcccttgaacaccgtgctgcaatccttgaacaacgtggcggcctgcacataacgcttctgttcgaacgcctgcttggcgaattcaaacttatagttgtagtcagtgcttttcagcactttctggtactctccgcacgagcagaacagcaccgccaacaaagagaatatgataaatttgcgcataattgtcatttcaacacgcaaagttacgaaaaaaatctcactgaagccaaacttcactaaatttaacaataaaaaggctccaccgaagcggagccaaggataatttccttcggcaattactgccttattgcgataagatataaaagagaaattatttttctgccacaaaaatacacaatttcttttgaattgcaaaatttattatgtaattttacggaaattcacataaataatccatggaaacaaaacgtatactcggccttgacaccggaacgaacagtctcggatgggccttaatcgaccgcacgggcgacaattgcagactgattgcacgaggggtgcatattttcccggaaggcgtaaagatagagaaaggcgttgagtcgtcaaaagcctctgaacgtaccggacaccgcgccctgcggagagcctattaccgacggaagcttagaaaactgaggctgttgaggatattgtcggacaacggactctgccccaccctgtcccaaccactgctatcggcatggcgactgcggaaaatatatcccgcgactgacgacttcatgtcctggcaagccaccgacgacatcgccggcaagaatccgtatgccgaccgatgcgactgccttcaccgcaaactcaatcttgacaccgagagcgaccgctacaaactgggccgtgcgctataccacatagcccagcgacgcggatttcggtcaaacagaaaaagcgaagggaaggacaacgaggacggaaaggtaaaatcaggcatcgacgaactgagcaaagccatcgagcgtgaaggatgcacgtacctcgcagaatacttcctgaaactctatcaacggggtgaacgaatccgcacacattatacctcccgcgacagccactatcttgaagagttcaaggctatctgccgcaagcaggagctgaaccccgaacttaccgaaaagcttgaaaaagccattttcagccaaaggccgctaaaatcgcagaaaacttctgtgggaaaatgtccgtttgaaccatctaaaacgagatgccacgtcacccaccctgatttcgaagagttcaggatgctgcaattcatcaacaatatcagaatccgcacagatttcgacagccaaccgcgaccgttgagcgcaaatgaacgcaaggcaatcattccgctcttcatgcgcaagtcaaagaaaacattcgactttggcgatattgcaaaagcactgataaaaaaatcagggcatgcacagttcaattatccatcagacctgtcggtgagcggctgccccgtcaccgctgccctggcttcaatcttcggttctgactggcaacgcggaatcgcggaagtctacgttgatgcaaaagacaaaagcatcagtcaaatcactgacgacatctggcacgtcctgcacttttttgaaaacgccgacaaactgagacaatttgccatcgacaagctgcagttaaatgaaaaagacgccacatcgttctcaaaaataacgatgccagaggcttatgggtctttgagccgaaaagccatatccaagatgcttcctctgctgaggaaagggctaatctatccccatgcggcactccttgccaacctcggcagtgtcatgcccccttatgaatggaacatagagcctatgcgggaagctgcgatagacaagattgtccatcaccttgaggcttatgacccaaagacaaccccgggaactctcgaaaaatggcttaaggattttctaaaagaaacatatcttgtcactgacgaagccttgaaaaagctataccacccgtcccaaatcgaaacgtaccccaaagcccgacccgacaatgaagggttagttttgctcggctcaccaagagtttccgccatcagaaatccaatggcaatgcgctcgctccaccagatacgccacctcgtaaatgccttgcttcggaagggattggtagacgaaaccaccgagatacacattgagtttgcccgtgaactcaatgactcgaacacccggcaggccatataccgggagaaccgcgaaaacgaaaaggagcgggccaaacacgcaatcgcaatcgcagaacacctcggcatcgacgccagcgatgtcagcgagcgcgacctgctgaaatacaggctatggacagaacaaaaggggatatgcctatatacgggcaatcaaatcggaattgctgatttattcggctccaacccgaaatatgacatcgaacacacaatcccgcgcagtgccggaggagacagcacccaggaaaacctcaccctgtgcgacgcacgattcaaccgtgagacgaagaagacacgactcccatccgaactgccaaactacgcagaaataatcgaacgggtaaagttcatgaaagaaaaagccgatgaactcacaaaacgaatccgcaggctacgcaccgatccatcaatggataaggcaaaaaaagacggcaccattcagaaacgccgtagtcttgagctggaacgccgttactggcttggcaaataccatcgcttcgagatggaatccgttcccgagggtttcagccggcgtcaaggggccggaatcggtcttatcagccgttatgcacgactgttcctgcaatcggttttcaaacgtgtcgataccgtaaagggcgcagccaccgccgacttccgccaagcatggggcatccaggaagaacataccccgaaaagccgcgtaaaccacacccatcatctcattgacgcaatagtgattgcctgcatagacgtagccgactaccaaaaactggccacagcctatcgccgtgatggctatcacgaccgcgaaaaagtattcctgccattgccatggtcgacattcaaggaggacatacagcaaatacaactgtcaacgctcgtatcctcggacacgcccgacaatatgcacaagcgcgggcgcagacgtattggcgataagattcacacctgcgatgccgcccgagcctccctacacagagacacgttttatggtgcgataaaatgcaacggaacaatagaatatactattagcaaactgctaagtaagttaaagaaagaagacattgaaaagatcatcgacccggttgtgcgtgaaaaggttcgggatgccgtaacccggctcggattcaaggaagccatggcgtccaccatctggatgaacgaagaaaaacgcattccaatcaagaaagtaagatgctacgccaaacacgttaaacaccccatattcataaggaaactgcgcgacatatcgtccaaagattaccgccgacatcaccatgttgaacccggcgaaaatagcaaatatgccctcgccatttacgccggcaaagatgcaaagggaaaggaaaagcgaacattcaccataatcaacaaccttgaagctgccacgcactacgccgccaaaggccgcgggatggacaataccgcttttataccccaaaccagcccgcaaggattacccctgctctgcatattgaaaaagggaacaaaagtcctgctatacgaagactcacccgaagaactgtggcaagcatcaccaaatgaactgcaacggcgtctttatatcgtgactggatttagttctgaaggcaaaacaactcttgtccataatcaagaagcgcgtcccgccgacgagttacaaataacatacggacgatttgcagaagactcggaatttagatcaaaaatgagtctaagacattctcaactcaaagccttggtcgaaggtcagcacttcacccttgacatcctcggcaacatctcttttataaaatgattaagcaaacactgatattcagcaatccggcagaactctcgttgcgaaatggccagatggtcatttcgcaacgggctcttgaccgcgagacggcacggccgatagccgacatcggcattgtcataattgaaaatcagttagtacgcatgaccatccccctgttaaatgaactcgcccggaacaatgcgattgtggtgctgtgcgacaacagccacctgccacaatccatactcacaagtttgaccgccaacagcacacaagcagagaccctccgtgcacagaccacagcctccaccccattacaaaagcaggcatggaaacaagtggtcgagtacaaaatcaggaaccaatcggctttacttgacaagctcggtaaggagggacgcgttttgtcgccatattataataatgtgaaaagcggggatgctgacaatcgtgaaggagctgccgccagaatatactggacaaaactttttggcgatgatttctcacgcgacaggtatggacagccgcccaatgacttgctgaactatgggtacagcatcctgcacgccgccactataagggccattctcggctcagggctgtcggcggctttcggcatattccatcacaaccgctacaatcctttcccattaggtgacgatttgatggagccttatcgaccgttcatcgacgaaatagtctttaatctatataagaataactgctatgaaattgacagaacttcaaaaacggaacttgtcagagccctaaaccgcgacgtgctcattggaaggacaataaagccactacagcttgcgctgtcatccaccaccgcttccttttcgtcatatctaagacaagacatcagaaaattatcattgccggaatttccatgactaataacaggttaaacgcatatcgcataatgtggttgttcgtattctttgacctcccggttttaaccaaactccagcgtaaggccgcagcaacattccgaaaacttttggaacgggatggatttacaatgatgcagttctcaatctatgtgagagcctgcccctcccaccagcatgctgatgtccatgagaaacgcaccatagcccgtctacccgaaagcggcagcgtgaaaatccttcgtgtcaccgacaagcaatacagcaacatgttcaacttctggaaagccccacccaaacaaaacgataaaaaatctgccataaaaaaggataaagaggttggccatcaattagaattggaatttttttaatacctttgcaaaaaagaccatacatcagccgcttccatgaggcttcaaagcctcttaatatgcactttaacaagcaaatacaaagcataggttgcggtttgatttaaaagagaatagatctacaacgcttcgtatgtttccatttcgccgcgcaggttgcggtttgatttaaaagagaatagatctacaacatagtctattttttcagggtcggtaatttgttgcggtttgatttaaaagagaatagatctacaacaccgaccttttctcgggttgcagagcgttggttgcggtttgatttaaaagagaatagatctacaacccgcggatgggctgcaccttgggggtgacggttgcggtttgatttaaaagagaatagatctacaactacaatcgtaattgggaacaagattttctgttgcggtttgatttaaaagagaatagatctacaacgcagatgaagaagaaatggagcgacgcatgttgcggtttgatttaaaagagaatagatctacaactgtccgtaatatgtcggcacgggcaagcggttgcggtttgatttaaaagagaatagatctacaacgattgggtaattatcgactgacaccgttatgttgcggtttgatttaaaagagaatagatctacaactgaacgaaacacggtgttttcccctctgggttgcggtttgatttaaaagagaatagatctacaacggcctcgacgccatcagggtaaggcgtgtgttgcggtttgatttaaaagagaatagatatacaaccagggcgctgaccgagccgtcgccaaggtagttgcggtttgatttaaaagagaatagataaacaaccaatacgattctcccgctgcacagatggagttgcggtttgatttaaaagagaatagatatacaacaataatgtttaacgaactatgagcaaatgcgttgcggtttgttgtaaaagcggtttgatgctaaaactcaccccgggcggaggggcttgctgatgcaagagtccggccggggtgagtttattaaatttagtatttacgcgctggattaagcctggtgggcggggcgaagcaggtcgttgacggtcttgacgggattaaaagtcgacgagggaacttcgacaaatacggtgttccagtcgctcattgcaccgttccaaaggccggggagctcgagggcgcggaggtcgcgtccgccgagggatttggacgagatgaagccagtctgatggtcgacatagtcgggaagattgaagcgcttgccgtcgacatccttgatgtagcacacaagatcgacgggattgaagtgggtggcaccctgcatcatagccatatattcggcattgtcgggatcaatctgggtggattcgagtatctggggtgatacagaaccgtcctgattttcggccatgaacgggccgccaccgggctctccatcgttccgaaccattccgcacacgcgcacaggacggttgaacttcgcggccaggaggtcggcgagttccgattcgctgagcgagtcgaaaagcgggctgtcggtcgacagggttgaacgcatgaaatcaaccatacggctgaggtcatcggctgaatagtcgccgtcgcgcagcattcgcaggtatttctcgatgcggtcatgaaccaggatgagcgtgccggcaagcacctgcttgtagcgcacggtggactcgcgcagggaatcaggcaccacattgtcgatgttttttataaacaccaccgccgaatccatgtcgccgaggtttgcgataagtgcgccatgaccgccgggacggaacacgagctgaccgtcgctgtcgcggaacggctgattgtccaaagtggccgcgagggtatcggttgacggtttctgctcggaaagtgaaatgttgtatttaacgccgaagcggtcttccattggcttgacggcctccttgattttttcctcaaaaagagtgcggtggtcggcggatacggtgaaatgcaggttcacctgcccgtgcgaagcggctgtctgcgcgccctcagcaagatgttcttcgagcggcgtgcgggtggaaccatcggcataacggtggaaagtcagcatggccttgggaagggcgccgtagttcattccttccttggaaatgagggcgctgatgatttctttctgacgaccggcttcaaggagcgctttggcgggcatgccgtagaggcggacggtggctgcatcgagttcgttcaggaacggcagcctgtcaatatcggcaagcagggacgccaccggcgaaccggccggagcgacatcttcgtcgccgtttacgaaagcgaacattgccttgaacatgcgcgatgccgctcccgatgcgggcacgaacttggccacttcgccaccgtcggcaaggtattgttcccaacgtgccacggcttcgtcctcctgggccggagtgagggccttgatgccatgccctacggcggcgctgccgtggagtttcagataaggaaagcccgtggcaaaacgctgcatctgcgcatttgcctgcgcggcggttatgccgtgggccgagagttgattcaggtctttttcagtaaacatggttttaaattatgtcggttatgttggattatttagtcattcgttttatcaaattgtaggccggtattatgcccagctggccggcacgggaaaggtctgcgatgccgagccgttcgttgccgagacgcaggtagacgtaccctctgttgtaccaggcctcgcccatgtccggcttgatctcgattgccttgttaagggcggcgagggccgaggtgtagtcttcgagcgcgagatgcactatggccttgttgtaccaggcctcggccatgccaggcgacatgtcgagcactttcgtcaggtcggaaagaatgtcgtccagggcctttcgccttagagtcgaacgcgtcagggcgtcctgttgttcatctgccgacggacgctcgtcgagctgccagttatggtatcctgcctgggccctgagcagataacccacggcaaggtcgggtgtgagggcaagcgcgcggtcaatgtcgcgtatggcagatgaataatcgtgtatggtcatgaaatccatcgcgcggccaatgtagtcgatggcgcggggggtatgcgtcgacaggtatgagttgtaatattcgattgattggaaatggtttgcggataggtcggaatcgagcgagggcacttcgggcgttacgcggattgtgtaacgcagcaggcgggttgcgttgatgtcgtccacctcctttatataatatgtgtcgggacgcagttcggaattggcggtataatatgccagctccatccacgatgcgggttcgatgtggagattgcggtcctgcactttgccgcgtatggccgaattgttgtattcctcatgtatctcggcattgtcggcgacggtgaggagggttgcaaaccgcctggcggcctcggcgctggtctcatgtggctgcgaatccccgggctgccgggcgggggcttgcgcctgctcaggagcaatctcaccgggaccgaagctgtcggccattttctgggccttgcgcgacaagtcaatgcccctgttgtaatcgcgctcggccgagcgcatctcgccgatggcgcggtatagctcacttcgcaggaaatatgggtcgggaaggtccggaacttcgtctatgacctttgagatgtcggccacagcctgcctgttgcgccctttggcatggttgacaatcgagcggttgtaataggccctggtattgttgggatcaagttcgacaaggcggtcaaggtcaacaagggccttgtcgttggccgaggtctccatttcaagcaacgcgcggttgaagattgcggcctcattgatggggtcgagctgtatcgcataatcgaagtcggccatcgcgccgaaaaagtcgtcgagtttatagcgcaggtacgcgcggttgacatacagccccggctggcgtggttgcaggcggatggcctcgtccatgtcggcagcggcacgctcaaaatcactgtcgcggttgatggcgatgtccgcgcgcatgatataggcgtttacggcgtttttattgatgctcagcgccttgtctatgtcggctacggcggcggcggtatcggtccgctcgaggtgcagtctcgcacgtcccagatagcccgagtcgaatccgggataaaacgacagcaaagacgtgaacgttgagtcggcacccgaaaggtcgcccgtgtcctgctgggcgagggccttgttgaaaagcagctggcggttgcgcggaagcaactcaagggcatgatcatagtcggaaatggcatcggcattgcgtccgaggttctgacgggccacgcccctgacttcccatgcgtcggtaagatacggattgagttctatcgcctttgaggcatcctgttcggctccgacatagtcttccagatttattttagcgatggcacggaaaaagtagggctgcgccatatagggtttcgcctgtatgacgcggttgaaatattgaatcgagagcatgtagtcctcgaaatatagggcattctgtcctacgcgcagcacccggtcggtgttgatttgggaaaaaccatataaggatgacagcagtacggacaaaattaatagaatggtctttttcatcttggtgcaaacttaccaaaaaaaacgcacatcaccacagcatttcaacaaaaattagcaaaaaataagccacaccggcataatttccgatatggctcaaataaaaaaagtcggccacggtgtgggtcgacttatgaggttgatttaagcagtgcctaaattattcagcctgagcagcggtgcaagaatcgcaagcagcgcagctgtcgcaagcagcagagtcaactacaacttcagcaacagtttcttctacaacagctacggtgtccatagcagcggtgtcagcttcggccttcttgtcgttgccgccgcaggagaagagagatacgctgaaagcaacagcgaggaaaagaactaactttttcattttctttttgattaaatagttaaacaattgtttagtgcttcaaaaacgctacaaagttaatgcaaatatttgaggtggcaaacttttttaacaaaaaaaatcggcttttgcgtgaaccattttcataaacgattatggttcaacatattgcataattcgcttaaagcgactctttcgcactgcccgaggcggcaatcatgttcgcctcgcgcacggccttggtaatgtggtcacagatgttgtcagctccgataagacggtcgatgccggcatgctcgagcgattcgcgcacattgggcttgacacccgacagcacaatctgtatgccttctttctgcgaagatttgatgagcagctcaaggttatggagagccgtcgcgtcaataaaagccaccttgcgcatgcggattatgcgtacaacgggcttgacatcgccgactgtcgtgcgcatcatctcatcgaacttcgtggcgataccgaagaagaacgggccgtcgatttcatacacgctcacacccttggccacctcgagcacctcgtggttggggctgtcggtgccctcgtccacatcaagggtgcctgagtaggcgcggatctcggtattctccatgacacggcgcaggaagagcaccaccgcaagcagcagacccagttcaattgcaatcgttaggtcgaagattacggtaagcaggaaagtcacggccagcacccagatgtcgctcttgggcgaatggaagataccgattatcgtgcgccatccgctcatgttgtacgacacgactatcaggactgcggccaggcatgccataggcacatagttgatgagcggcatgaagaaaagaaatatcagaagcagaaccagtgcatgaacgataccagccacaggtgtgcggccgccgttggtgatgttggtcatggtgcgggcgatggcgccagtcacggggatgcccccgaagaagggaacggtgagattggcaatgccctgaccgatgagctctgtgtttgagttggtgcgtgaacctgtgacgccgtcagcgaccgtggccgagagcagagattcaatcgcgccgagaacggcgatggtgaaggccgacggaagcagcatgttgatggtggccatattgagctggaatccgtggggcatggggatgtcggtgggcatgtctccgaaacggtcgccgatggtctcgatgcggtaccagccggtataggtggacagcagccatgcgccaaacgtaacaagaatgattgcgatgagcgcgccgggcagttttttcgatatcatcggtgtgacgattatgatgccgagcgccaccaggccggttacaaacgtgcagggatcaatgctgccgagattcgacaggaacattccccatttgggaatgaactggccgggcacatctcgcaatccaaggccgaggaaatcgtttatctgcgtcgagaaaatcgtcagggcgataccggccgtgaatcccaccacgataggataaggaataaactttatgacggtaccgagcctgaaaaggcccatcactatcagaatcacaccggccatggccgtagcgacggcaagccctgtaaggccaaactgcgctatgatattgtagacaatcacgataaacgcaccggtcggacctccgatctgcaccgagcagccgccgaagaacgataccatgaaaccgcctatgatggccgtaataaggccaattgtcgggctcacacccgaagctatgccgaacgcgattgccagcggcagggcgacgatgcccacaacgatgccggcgatgatgtcctcgcggaaacgagccattgaataatggcttagagcgctccataacttaggacggagattgagtgctcctgtaatgctcataatgaaatagatttataccttagaatttgcaatcaggccgcaaagttacaaaaaatttcccgaagttaaaaaaagtttaaaatcaccatgccgaccattgtccacccgcgggcaacgaaaaacgccgcctgcaggtggcaggcggcgttcagctgaggttatgcggttgattattctgcggggttgaggaggatgaggctgcggttaccctgggcgagcacatcgttccagaacttcatcacatcggcaggagtgatggcgttgatgacgtcggcctgaccgttgaagatgtcgacgccgttgcgggcttcgccacccatgtttccaatccatgccgagttttcctcgaggttggtggttgcggtcttaaccatgaattccttgatggggttgagttcgtcgggggtgatgttctgacccatttccacaatcatcttgtcgattgcggcgagagcttcctcgcgcatttcgggcttcatggggaacggaatctggaaggttacgttcatgtcgccgagacggctcatgtcgccgacagctccaattgaataggtggcacccatttcctcacggatcttgtcgagcaggcgcttgctgagaatctgcgaggccatcgaagccatcatcttgttggcgggagtatagggcatgttgcctgcgagagcgtagaacacccaggtctggggagtggacatggccatcgactcggtaacattgttctggcccttgcggagttcaaacgcggggttggcggtgaacttgacagtgctgcctcctacgggaagggtggcgatgtactgctccatcaggggtttgaaggtatcaaggtcgatgttgccgacaaagaagaaggtgtagtcggaagcgtccgcgagcatctggcgcacgatgctgacggtggcgtcacggtcggctgcatcaattgcggcggtgctgattgcctgctcggctgcggcaggggtgagggtgctcttgatgagcttgccgaaagcgtagtcgggggtagattcctggttggcgaggatgcctttgaacatgttctgtgcggcggcaaattcatcggcggtcacgttgaactcggtgaagttggcgtagatgagctccatgagggcgggaaggtcctgcacggtagtctcaccgctcatgtcacgggtgtattcgccaatcgagaagttaacctgggcctgcttgccctgcagatacttgttgaggtcggagttcgagtaatcgccaaggccgtgcttcatcattgcataaggcatgaagataacggtgttggcctggtcgtcgggaagctgcgagtagccgccgttggccactgcgaggaacttgatttcattgtccttgaaagtggtgggcttaaccacaaccttaaggccgttgctgagggtgaactcagtggcgccccacttttctacggttttctgagacttgattgagccgggagcggggaggttgggaatgaggggatcctcgcgcatggtgtccttgtaaggctcgaggtcttcttcctcaacggcctcgagcatcgaggcgagctgctgttcggtggggatggtgaagccttctgcatcggggagcatgagaagaaccacacggttctcgtcgctcacgagctggggaagaagggtgttgacctgttcgagggggagcatctgcgagaaaaggtccatcatttgcttctcgacttcaatgccgggaatggggtcgttgtcgatgaacgcacgcacatattcctttgaatagctttcgttgggagtattgttgcgcgagtcgaagagctgctggtagcgcgagcggagttcggcgttggcgcgttcaaactcgccggcggtgaagccgcccttgctggcacggagaa

SEQ ID NO: 3006 - DNA, 23282 bp, synthetic construct
  source 1..23282: mol_type = other DNA
  misc_feature 1..23282: note = Synthetic
ggttttcaccatatcaatggcaatggaccacttcaccgccttgggattgcgggcggcccccacccccatgatggcggtagtgttagtgtgggtagtggaaaccggcaggccaccgaaagtggccaccatgagactgacgaaagtggacaggctggcagcgaaaccctggaaggagtccagcttcaccatgctcaccccaacgcttttgatgatgcgctcgccccccaccgcggtacccaggcccatgttggcagcacacagcagcatcaaccacagcggcagcgtcatttgttcagtcatgcccagccccgaggccatcatggtggccagcatgaatatggacatgaacttctggccgtcttgggcgccgtgcatgaaggcaacgccggcaccgctgaaaatctgggcccagcgaaacgcatggttagcccgctggcggttgacgttgctcaaaagccgcccgagccccttgtaattaacccaccccaggccaaagcccatgagggtggaaagcaggatgccatagattaccttcacccattcgccccagttgatggcatcgaatccgccaaacaccgccacggcggcgccagtgaggccggcaatgagggaatgggattgggaagtgggaatgccgaagtaccaggcgctagccccccacacgatgatagccaccatggcggccatgagggccaccagcgccgtgtggctgtcggagccgaaatccaccatcgaaaaaatggtggtggccacggcagtggatacgagagaaaccagcaggaggccgaagaagttgcagatggcggccatcatgatggcgccgcgcggcttcatagcgcgggtagagacaacggtggcgatggcgttgggggcatcggtggcgccgttgacgatgatgacgccgatgtttagaagcactactaccaccagcaccggattaccggccagctgcgcaagaaacgatgcaagttcgatggtcaagaagaatccttccatacagccaacggccgcaagcggcaaatcgccgcaagcgcacggtgaacaattctaacgtaagtttaaccaagggacagcggacgggcacctttcaagaaaccttgacagaaagcggttatcgaactggcgtcagcggagaatgcgggcgggtatgccaggggcgagaccgcagggcacgccggaacaacggggtgccggacgctgggccatgggcagcaggcgggcagacgcggcggatgcagagccgcgggcaacggagatgcgaagttgcaggagcccggacaacggagctgcagagccgccgggcgcaggcacaccaggcgcggggccacagacgggcggcctattctcgcggggcgaacacgccggtaagggcctccccctcgtgggtttggggctcgaaagggtcctgctcgggccggtcgccatcggaaggcgctgccgtcgctgcgccgctgcgctccaccgcgccgctacggtccacttcgccgctggcccccagttcatacatgagccggtgaagctcggtgcggttgacgaagatgcggtcggaccccgggggcaccggatccattgccgtagcgccatcggtggccgcagccggcgcaggcgcagacgcgggcgtggccccttccccgtcctcctgcgcattggcgacccggcccccctcgtccgccatcaatgaagacaccggctgccctttgcgccctttgcgccagcgcaccactcccccggtaacggcagcgatgttctcggtgggttgcaccttcaccaaaggcggcatctggtcggtcatttggccgccgccctcaacgcccccctcggccgcgtccatccaatggccggaaatccggttgtagaagcgcccccaggcgcggcgcatttgggcccctggcgagttgtcgcggtcgcgggcagttttgcccaccggcacgtgcaccttgcgggcgatgaaacggaacggcttcttcatcgcatgggttaccacgtcgctgtagtcgcgggcggggcgggtgcgccaaccaaacgccagcgccgcatagcggatgaccagcaccacgccggcgcacaacagggcgttcacgctgggaagaatgttggaagtgtccagcacgcagtacagggtgcagcccaaaatggcagcactgccataaatgggaccagcctggaatgcagcggggcgccggctcatcagcacgtcgcgcaggatgccgccgcccacagcggtaagggtgcccaagatgatggagggcactacccccagccccgccgacatacttttgccggaaccgatgatgcaccaggaggccaccgacaggttgtccagcaggtccaccagcggatcgaggtaagtggccaggcggccgaaataaaacacgatgatgctggcgatgacgcaggccaccaaaagcgacgggttctggaaggcgtagatgccgtaatcctgcagcagcaaatcgcgcatcatgccgccgcccataccggtcacgcaggcgatgaacgcacagccgaacacgtcgtagcgggcccgtactgccgacatagcgccggacagaccaccggtcatgacggccagaaactccagccagtagggcatcgatatggctacttcaagctcacccatggtcttccaccgaaacaatcatggcccgcgtggggcggccggagaagttgatgctgtcggtcaggcgaaacgccgcctcctcgtcgaagccctcgcctgccaccacggccgcgtccgcctgagcaagcgccaaggcccgctcgtacaaatcgaagaagctagcggtggactccccctccaggaaggggtcgcgccacgccgtacgctggctgttggcgaaagggctgtcttccaattggatatcccggtgcgacatggccttcaagaacgaataggggcgcaccagccgttccatcgatgccagcacctcccgcttcaatccgcgcggggaatacagcccccgcagcgccaggcgatgggcgcccaccgcggcggcaaaggcctcgggcgccacggccatctggaaaacatcagccgcaacctgcgcgtacatctgggaaatgggggccagcacctcgggcgagccgtgcaatatgcgctcggcggggttgaaggtggcaatggtctgcccgagccgcttccacagcaccagctcgtccagctcgctctcgatgagggcgtgcacctcgtgcccctggcttgcatccagcccctctacgccggcatcgcacagctggtactgctgggcgtacacaaaggggtgcaccgtgcggtcgaggcgccagtgggcggcaaaccccagcacataggcgcgggcgatggccccttgttcgccggaaaacacggcagcggcctggcgaaatgcgggcaacagctcggccggatcggcccgatgcatcagcgcccccagccgcaccgccggagcatgcagcggattcagcgccacataaaacagcgggtcggggccctgattgcccagcaagaaggcgtccgactcttccttggtggagcccacaagaaagcccacacggcccagcaggtcgtttccaaaagcatcgtgggtgatgatggcgggcatggcggcacttcccttgcgaaccagcggccgagggctaattggccggttcggcgccgaagcgggcgaacacccggcgccgctcggcaccgatggtggtgaggtcgttatggcccggcagcaccgccgtgtcgtcgggcaaggccgccagcttcttgatggaggcccgcatctcttccatggagccgccctcgaaatcggtacggcccacggtgcccgcgaaaagcgtgtcgccggaaatgagcaccggcaatcccccttcatggttgccgaactgcggaatgaggaacaggcagatggagcccttggtatggccgggggtggaaatgaccttccagggcatatggcccacggttaccaccgagccgttggccaccgtctcgtccaccgggcagggctcgcaggcctccacgtaggtgccgtcttgtggcgcctcgatcaccggcgcgtccaccgccgaagcgtacaccttcgcgcccgtggcggcccgcagctgggcggcagcgccgatgtggtcgttgtggaaatgggtgagcacaatggcgtcgagctttttgccctcaagggcggcgatgatggtttccggctcgcaggaagggtctaccaccagggtgcccgcaccgtcggagatgatgtaggtgttgttctgcagcggccccaaaaccaggtacttcacatcaatgcacaagccgctgacctcgtacaacgtaggcttcatctacttaacccctttctggcccggcaccatgcgacgggcatcgaacacaccgtccagctcgctgaggtgcttcgttatccagtcgatgttgttcaggtcggacacctggaacagaaagcgcatctccaccacgccgtcgcggtgggtggttgtggaacacgatagcacgttggccgccgcctccgaaaacactctggtaacgtcaagcagcagattcatgcggtccagcgcctcgatgtaaagctccacctggtaggtggtgtctttggggcgactgccctcccaggccacctcgataatgcgctcggggtgctgcttgagcgatatggcattggggcagtcggcccggtgcaccgaaacgccgcggccgcgggtgacgaagcccaaaatctcgtcccccggcaccggattgcagcaacgggacaggcgcaccaaaacgtcgtccacccccttcaccacaatgccattggaagagtgggtctcgtgcttcttgggccgcttcaccgacgtgatcatgggggccatgacgccggtggaggtggccgaagcccccagctggggcttctccgattcctccgtggcgcggtccaccaaaatcttcagcagccggttggccacgtgctgggcgctctccttgccggtgccgatgttcaccagcatgtcatcggcatcgcggaagcccatggcctccgccaccgccttcaacgcccgaatggattgggcgttggagatgcccagcccgtgcttgcgcatctcgcgggaaaggcggtcgcgccccatctggatgtcgtcagagcgggttaccttcgagaagtaggagcggatcttcgaccgggccgaaggggttttcaccatggtcagccagtcgcgggaggggttggcgctcttttgggtgagcacctccacgcggtcgcccacctgcagctcgtaggacaagggcacgatggcgccgtttaccttggcccccacgcagtggttgcccacctcggtgtggatggcataggcgaagtccaccggcgtggcgccggcccgcaggctcatcacctcgcctttcggggtgaacacgaacacttccgtctcatccaggtccatcttcaacgacttcaaaaactcgcgggagtcttcggtttcgtcctgccagtccaccatctgccgcagccatgccagctgctggtccagcgcgtcggccgagccctttccgccgccctctttgtagcgccagtgggcagccacgccgtattcgctggcccggtgcatgtcttcggtgcgaatctgcacctccagcggccggcccgccggccccatcaccgtggtgtggaggctctggtacatgttgaacttcggcatggcgatgtagtctttgaagcggccgggcatcgggtgccacaaggtgtgcaccgcccccagcgccgaatagcagtccttcaccgtcttcacgatgatgcgcacggcaatgaggtcgtagatttccgagaagcccttgcccttcttcgacatcttctggtagatggagtacaggtgcttggggcgccccatgatctgggcgtggatacccactttctccatctcgcccttcagcacgtctatcacgttgcccagatactcctcgcgcttggcgcgcgactcggtgaccatgcgggacacctgcttgtacttgttgggctccaggtagaaaaacgataggtcctccagctcccacttcaccgaattgatgcccaaccggtgggcgatgggggcgtagatttccaaggtttcgcgggccttgaaaatgcgccggtcttcccgcagggccgacagcgtgcgcatgttgtgcagccggtcggccagcttaatcacaatgacgcggatgtctttgctcatggccacgaacatcttgcgaatggtggcggcctgctcgtcggagaggctctccacctcgatgcgggtgatcttggtaaccccttccaccagctggcgcacctgggggttgaacagccgctccacatcttgggcagtggcgtcggtgtcttccacggtgtcgtgcagcagcgcggcgcagatggtttcggcgtccatgcgcaaatcggccaggataagggccacctctaccgggtgcagcacgaagggctcgccggacttgcgcttctggccggcgtgcttttcgctggcgaattggaaggcgcgggccagcatagtctcttcttcggggggaagatagtcggcggtaagctcctgcagcccggcgaagcgggcctcaggggtgacaggggcatcggcgtcgttgcgattcaggcccggcaccggcttggccgcgctttccggccggccgatgaggctgtccactgcttgccgcgtggccacgccgatgggcacctgcccgggcgccgtgacgccttcgttccccggggcgggattctgcgatacatcagcgctcatgcgccgcacctccttaccaagccgcttcgggcgtgaacttgcatcctaccagttggacggcagcacgccgggcacaatggggtgggagacgcgaatcgtcagcccctgggaatcacaggccaaggcccacgcgcggaaggcctcgaacaccgagcgctcccccagcccctcgctgtagcgcaccgagtcggtgagctccacgcggcccgcctcctcgttaacccgcacgaagtaggcagccggctggcccccggcggaggcgcggccggccggctgcacgtcgatgagccccagctcggtgaacaccttgaggccgcaagccaccgatgccgggcttacttccttgaagccggcggaggcttgggccgctagatcgtcggggtcgagcgggaaggggttgcccggctgttgccgctgccgcagccgcagctggcggtacacctgggccatcacgtcgtggtcgggggtggcctcccgcaggatgccttcgttgatagcgatgtcgcgctggccgaacagaagatggatggtggcggggtttccatcgcggccggcccggccgctcatctggttgaattccacctcgttgaaaggcaggtggtacagcaccacgtggcggatgttgggaatgtccaccccttcgccaaacgcagaggtggccaccagcaccagcaggtcgtcgttgcggaacagctcctcgatgcgcttgcgctcggcccgggaaaggccggcgttgtaaaagccgatgaggggcgccagctggggcaccttcttgcgcaaaagccgcgccagggcgatggactgctggcgggagttcacgtacaccaccgtcttctcgccggaagccacgatgttggccaggtaatcgtcgcggttgcgaatgttgcgctggtcgtccagccgcaggttctcgcgacaggtgttgtcgatcacccgctcttccagcggcaactgggcatcgatgtcgccggccacctcggcaggggcggtggcggtaagagccagcaccgtggggttgcccagcttggcgatggccatgcccagctgagtgtaagcggtgcgctgccccgccttcgccaggccgatgtgatgggcctcgtccaccaccacaaagcccacgcgcccgctttcggcgaactgatcggcgtgcagcacgaagaattccggagtggtaagcacgatatccaccgcccccgttgccaggccgccccaggcttgctgccgctcttcacgggtgctctcgccattgagcacaacacaggtgatgccgaattgcagcagactagtggccaggtggaatgcctggtcggcaatgagggcccgtagcggatatacgaacacgctggccatttgggaggaaagcgccataagagcggcgtatacggtaaaggtgagcgacttgccacggccggtggccatcaccgcgaaggtggacttgcccgcccgcagctgatcgagcacatcccgctgcgactgatgcaaggggcgctgcccgatgagggcgcagatcagctcctgctccaggccgtcggggttctcgcgcgccatggcctcccacttcgcacggttttccttgagcgaggccgcagggccggcagcgtcgggctggggcttttccgcatcggcgcacagccgctggtcgtcttcggcgtacagcccctccagcaatgtttgggcctccgggttcaggcaggcgcgcagggcgcagcaggtgcgggccggcgctaacgccttcagcatggctttcaccgagaagcggccgcgccactcgtccacctgcagggtgaaggcggcgtccaccactccctcgttggccatcagctcgtcgatatcatcgcaatggaacatgatgcccgccaccaccacgcgcccgtcggtgaggccgcaggagaagtggttcttgtcggcccccaccgcccgcgggttcaccagcgtcacgttgcgggccatgtagcagggcacctggttgtcctggccgaacggcgccagcgcctctagttgccgcaccgtttcgatggagagttccggcagcgccaccagggcgtctatctgcaccagggggtggaaggccccttccggcagctgatccatgtaggcgcacagccgctcggcgaaggcctccaggttggccaccggcagcgtgatgcccaccgccgcctcatggccgccgaagcgggtgagcagatcagagcaggattccaccgcggcgaacaggttcaccgagcccacgctgcgacccgagccgcgcgcctcgtccccttcgatggtgaacaggatagccggcacgccgtagcggttcaccaggcggctggccacgatgcccttcaccccctcgtgccaaccttcgccggccaccaccagcgcccgctggccatggtaggtttcagccgcttgggcctgggcctgctcggacagctccgcttcgatggtgcggcgggcggtgttcacctcgtccaaccgctgggccagcgcgcaggcgtccgggtagctgtcggacatcagcaagtccagcgccagctgggcgtcccccatgcggccggcggcgttcaggcgcggcacgatggagtaggtgatgttggtggcggtaaccggcatggccgatgggccgcagatgcccaacagcgccgcgatgcaggggcgcgggttctcgttgatgcgccgcagcccttcggccacaagcgcgcggttctcgccgcgcatgggcatgaggtcggccacggtgcccaaggtggcaaggtcggtgtagctgcgccacaggtgcgggtaaccgcggcgggcgcccaaaatctgcaccagcttgagggccacccccacgccggccaaaatggagctttcgcagccctcccccatcttcgggtcggccactggcaccccctcgggcaccaggtcggccgcctcgtgatggtcggtcaccgccacctgcaccccatcggccacgatggcggccacttcctcgcggcaggcgatgccgcagtccacggtaacgatgaggtcgggctccagctgcttcacccgctgataggcggccgccgtgatgccatagccttcatcgaagcggcgcgggatgaagggggtggccttcgcccccagcgcccgcaggccgcgggtgagcacggtggtggcggagatgccgtccagatcgaagtcgccgaacaccacgatgtgcttgcgctcgtcgatagcacggcccaccacgtcggccacttcggaaagccccggtatctcatagggattgcgccagtcgcgctccagcgacgggctcatgaactccgccgcttgctcggaggtctcgatgccgcgggtggccaaggtggcggcgatgaaccgcggcagccccaaagccgatgacaactgcgccaccgttttcgggcaggcgtgcttaactgtgaactgtgcgcccatggacaattaccttacatgcttcgtgtcgttttttgctcaagggcattttcccacaaagcaagcgccgcaagcgccatgccgcccgcttttttgcaggaatagcacgggcactgccagacgcgctggcgccagcctccgttacggctttgtcgtcttttgcattaaacttacattatcgttagacctaaccttaggagaagctatggttaaccctcaaggaggacactcggtcctcggcctagacattggcattggaagctgcggatggtgcctgatcgacaccaaatatcagagaataattgccagcggcgtacgtctttgggacacgccgcaagagcctaaaaccaaggtgagcacagcatccacgcgccgcatcgccagatcatctcgacgaaacacgaaacgtaccgccgacagaaaaaaacattgccttcgccttctgaagcaaaacggcttggtgccaagcaaagaatcagcccaatggctccaatcgcgaaagaaagataaaccggttatcaagcttcgagctgccggactagacaggcctctcaacaaccgcgagtgggcacaggtcctttactcgctctgcgaccgtcgcggctacattcctcacggagaggggggagatagcgacaacgagtcaaaaaaggtactctccgccatcgagcacaacaaagagctgctcagccaagccggctttcgcaccgtcggcgaaatgatgtaccacagcggtcgctcgcgcaacacaggaggcgattactctctctgcatcgacaccaacgcgctcatagaagagatagagcttttattcgccgcgcaaaatcgccttggaaacacgaaggcatcggaggcttttagggaagctttccgcgaggtcttctcctggcaaaaagacgtaacagccaatgacctcaggatatacaaccaggtaggacactgcacgtatttccccgaagaaaagcgcgcagctaagtcatgcctatcatctgagctctgcgaagcctacgagcgcgtaggccacacaacttggattgatagcaaaggattagagcataaactgcctgccgatatacgccagaagatcattcgcaccttattcagcatcgagcccattaagggcaacaaatactgcaaggtcacatatagcaaagtcaggcaatggatgtcgctcgattccgactcgccctttaaggggatcgatgccgacaaagagaagacgctcgaactgtataagccgaaagcgtggcgccttcttcgcgacacgctttccagtgaattcatgcaccaacttgcagccgaccgtgagctcgctgacgacttctgttctgccatcactttcgcctctagcaaaaaaagcctgaccaaagagatggaaaacagggggttctccgaagacgaaattgaacatgcctcagccctcccctacaacgcgaaacttttttcgggctatggcaatagaagccttaaagcgctcaacctccttgtggatgcgttcgaggaggatgcggaagatatcgtaaccctgtctgatgctgaacaggcctcagggctcctccagaaacgcaattctccagaggccacatatacccaacttcccccgtacacgctttttgatccaacatgcaaaaaccccgttgtcctaagggtcatggggcaggttcgaaaagttgtgaacgccgtcattcgagaatacgggatgcccgatgaagtccacattgaactggcccgcgagctaaaacaatccaaacgagaaaaacagctagtttccgatcgcaaccgcataacaaaaaaccgccgagatgggattattgccaaactgagagaagaaaccggcgatgaaccaaggatgaagctaattcgcaaagtagagttgttcgaagagcagggaggccgatgcatctactgcgatggtgtcatcgagtatgagcgcttgatcaaagagggtcattacgctgaaatcgaccacgcgctacccttttcacgaacatgcgacgacagccaaagcaacaaggttctgtcgtgcaagaagtgcaaccaagacaagaaaaaccggacgccttatgaatggttttgccaagatgatctcaactgggaagaattcgagcttcgtgtttctaggaacaagaagcttggtcagattaagcgacagaaactccttaataccaatcttgaggaaaagcaggaaaacgatttcattgaacgcaacctcaacgacacccgttatgcatctcgagctgcaaaggattttatcgagcgttatctcaggtttccagacaacggtaaaaagcagcacgtatttgccgttgcaggaggcgcgacggccctattgaggcaatcttggggaatccgaaaagaccgcgaggaggactgcctccatcacgccgccgatgctgccgttatcgccgcttgctctccttcgacagtaatcaaaatagcaaaagccagcgagaagaaagctctgaccaaaaaggagaaccgggctgcgctatttgccgacacccaaccttgggagggattcgctgcggaggtcatgaggcaaaaggaaggcatcatcccaactcacatgatcgaccacaaggtctctggaagggcgttcgaggacacaatttattcctacaaaggcattcgcgaagacggtcaaaagggacagcttgcaaccaagaaaaaggggctgaaggtctcttcaaactatgttagaagagacgatggatccgccatcgttgtagacggcctcgcatacatcaatctttggctcgatgcagagggccgaaaagggaaagggcagtatctcctagaacccatctactatgctgatatccccttcgttgacagccagggttatatgcacagattcctccccgcccaatcggacaaaaagccgcgcgaatcgtgggatacggttccggaaaggcttttggccacaaaaccactcaccatctttccccacgacgcaattttggttaaaggaaaggtgcgccgcttcaagacaattggcatcgccgcctgctcctggtccctctacgaccccacaggcaagctcagcgacggagaagcgacaaaggggctcgcgttcgcatctcttacaaaagacgatcagctcgaactaatccatgaagacgtcttagggcgatgctacatcgaccttataagcaattcgggatcaaaagaatagggtcatttgcgcaccgtaatcgttcgaatggtcccgcctagccttcccaagcaggaccattcgatcttcaaattgcttctcggtcatcgaaaacaccgtcacgctgcctgtttcaggcaaattgtccttcaatcgcgcaatatggcttgcaagagcatcccttccaagagtgattcgcgaatacacactaaattgctccatgcagtagccatctttcaccaaaaactttcgaaagtcgctatacgcacgcctttccgcttttgtggcaatgggcaaatcaaacatgaccaggattcgcattgccctcatcgcctctccatatctgcaaactggaccgcgcaaagccttggaagcctcaggcaactagcgtcattgctccgaaccgcacgtttcagagagtcaagctcttcctcaattgcgctttgaactgagtatttctccccatcgatttcaacagtacattcgaaaagcctggtcaatatcatcttgttacccgctgatagcccctctggtacctcgcattcctttgcaagtaggtcaaccaccggcctaaaaggctcaataagatcatctaccagattgaatgcgttcaagtcgctgcaatgatgcagcccgcgagacacaagccatccccccgaaacggcgcagcgagcaatcccggccctaaggatagcgtacccataatccaacaacggagcgtacgggccctccctccgtgttccctcgctcaaatacgaacgaaaatatgaagaggcggcaaccgactcgcgccccgtcgtatcccccgagcgcacctctttcgcgagcgttaagagagagtcaaccccatcaaggccaagcatcgataagcatagcgcctggttttctatttttctttttattatcaactgccacaaccgcttcgaaagcggcttggaaatcaatagctgatcttcaacgattgctgcgtggcgagaatgtgcgcccagcggcaactgcaacgcaataggcatgtggtttctcccgcaaacaataaccccaatcccctccgatcccaaagcggcaaggagcgctgtcgaaatcacaacttcgtggctctccaggataaggacccatatatcttcgaggggtattctcgctgtcgcttctttaccgtcaatcacgagatggttgtccttgtactttagctttgcagcactctgaagacagaccgttcttttgggcacagtcgtccacaccccttcccatcaggacattcttacggtagaatactattgtctgggtaggaatttttataccaaatggggatttggatggattacgcctagacaaggggcccgctactgcgggtacccgcaaggtaaagcccccactgggggcttcctttttcctcaaaaacgggctcaagtcaaggaaacagagcagattatttgcttttctcgacataccgccatgaaaaaacgcctgttttacaggcgttttttcatggcggtattataccaactggggatttggatgggcgccaagacggcaggtgtcgtcatagttggaaatagacgattataccaactggggatttggatgggcgccaagacttcgacaaaaagctgatgagcagcgcctacattataccaactggggatttggatgggcgccaagacttcgataaaaaactgatgggcagtgcctacattataccaactggggatttggatgggcgccaagacttagccgattgcgaatgcgagttggctatcattataccaactggggatttggatgggcgccaagacacactcaagcccagaaccttggcgaatttcattataccaactggggatttggatgggcgccaagacgcggtagtccgcttataatcctcgccatacattataccaactggggatttggatgggcgccaagactctgataggtcggcgccatctacggcgtggattataccaactggggatttggatgggcgccaatacggaaacgcgtcacggcttaaacaccttgcgcagctcttgcgcttttcgcttgaatatcggggcgaagagggcaatctccttatccgggcagccgttccttctggcaagcgcctcccatcccgccaagccggaaagcacggcggacacctctttggccgcaacttcggctcccattcccgtgcagtccgccagccctttcagcgcctccgcttcatttgcccgcgctcctccgaaaatcgccgttgcccgttcggcgccctcgtaaggattggggttgatatcgaacgcaggtgacaacgcccacccattcgcagttttcaagaaagccaagttcctcagatggtcgtcggtattcgatattgcaacagacagggcgatgcgcctgaaaaaacgccgagcctcaaggctggggttgcgcacaaaaacgggcagagcctccaatagctccagatagtcgcggcgctctccatccgacgaccccaaagcagtcatggcgctcatgtagccaatacgcctcccatccaacagcgattcttcgcggtcgaagcgctccagcagcaaaacccgctgattgccgatgcgcacaagcttcgatgggggaacatcaatcccggctttttctgcgatatccagggcagttttctcccaagccatgacgtcccatttatcgcccgggtgggagaactttgccaaaaacaacttctccccatcgcaaacagaagccttcggacgcgcaccgccgagcgaagccgaaccagcctcaagcaactcctttacctggtcgcttcccgcttcatcctgcgccatcgaattgcttgcatgcagcagctccggcaactggataacggggggaatcggctgtgactggcccaaaaacggcccgtctggctgcttgaatcgaagagacccctcgcgcgtttggtcgaacaccccaaccaggtagtccacttcatcgagcgaccgcggcagggcgccacccgactccgcttcaagccgggcctccctgtctatgagccgccgcccccacctatccggcgaagtgtcccgaaacgaaccgggaatgccatcgcagtgatggacgcgggaggccaacggaagacggggctccagcggctcgaatccgaattcgccggcgatgaacccatcgtcatatgcaaatgtagtggtaatccgtccgcgccgcagcgagaagcgggcccttcccacaagcacgtcgttaccggaagaagaatcgtacacctctagcaccgggaccatggctatctccttacgcgcttggggagctcttcatcggcccgaatgcggccgtactccgtttcgtaagggtctacggcgtcgatcagccggccctcgatttgcaaaatgccgcagacgttcaaaaacgttgcgagtgaaaccgacgggtcaccgttttccagccgcgagacagttgcccgggaaacacccgcacggtcggcaagttcttgggaggagatgccgtacagttttcgccacgactgcaagctttcccctatggatttagcagccatcctggtgcgagctggggcattcatttttctcatcctttaatgtcgcatatctaatacataatcaactattgtgtcatctattttatacgttatattgcaaactgcaagtatagtcacaattgcgatgcgcagcgcgacgcagaagcgccctcctcgcccggcgcctcggccatggcagagggcaaacccgcctcccgttacggcaaatagtcgtagggcatgcggcgggcgaagaggtagaacagcagcaggatgagggcggcccagggcacccataggcacaccgccgccagtgtggcgaggcgcagggcgtagaacagcagccgatagccggtggtgcgcggatggttttcgcaggtcatgcgcacgaacgcaccaccaggggtggagccaccgcgaaaccacggcaccagcacttccaccaccagcaccgccagccagaagctagcccccagcagcaaggcggcggtttggttcaccgtcatgccgggcagttccagtggtgcctcccacaccagttccaagggcagggccacggcgcaatagggcaaaagcgacagcaggccgatgacgatggagtccagccataacgccacgcatcgctgcaagaagctggggttttccgtcactgacaccgggccggcctcctccggcgagcgcaccggccctagcacccgggcacacagccagccgataagcgcccccagcgtgttggtaatcagatcgtcggtgtcgcagcagcggtaggcgtaatcgtacacgccgaaaagccccgtcagctgcgccgtttccaccagggccgacacggcaagccccagcaacaccgtgggcacaaaccgcatgcggaagaaccgcgccgcaatgaaccccaacggcatgaagaacaccacgttgaagcccagctggaacaccgctttcaggccgtcctggcggatgttgtcaatagagttgaagggcatgaactgcggctggatgccgtaggtgatgccggggccgctatcgcccgaaggcagcgggtacagggtaaagcacacgatgcccagcccgtagagcaccgtgaggtaggcggccagcgacgagcccagccgcagccggccgtcgcggtggtagaggtaggccaagatgggcagcgtaagggcgaacgacagcatgggccacagcagcagcgccatcttgaaattgccgccgtaagcggacaagaagttccctaccgacctcatttcgccatcccttccctatcgcggcgagcaaagcacgccgacggcaagtgggccgccggcctttgccagtctagcgaagggcacgctgcggtgcagcataagtgacagcaaagtaagccaagcgatgccggaaacgcgtacaaaaccgtgagctttgtgcagtcgcaacatggcggcctgaccaggtgttgctcggtatagccgcaggtcaaaacagtgtaaatgcactgcacagaatgcacggttttgtacgcgtttccacacaaaaagggggcttgtcaccaagcccccattcgctgcagacgccgctagcgcttgttgaagggcatgatggtggcaggcatgccgttttcgtagatgatcttcggctcgccggcaatcagcgggcggaagtaagccagcgcctcatcggtgatgccctggtaatccggcagaatccattcttcggggaacgtgcgcacgaagttggcgaactggctggcgggcccggcgaagaacaccgggttgtagggagcgctgaggtccgtgcggggggcaatgcccaccacctggccggtgaatccggggcgcgccgagtgcatgtgagcggaaagccccagctcgtaggcttcggtcacgtccaccaagctttgggcgaagttagaggaacgggccgcacgggagaggtcttgcaccacgccccgcggagcgatgccggcatccacgatcatctgcttaagcgtaagggccgcgcctcccaaaaccgcatgggcgaagccgtcgttggcgctctcaccggcggaaatgtaggtgccgtccgcgtaatgggccccttcggacaccacgatgtagcactcgccggtggcgtccatcttcgcctgcacctgggccaggaaggcgtctttgtcgaaatccacctccggcagcaccagcaggtccacatccccggtggcgcaacagctggcggccagccagccggcgtcgcggcccatggtttccagcacgaaaacctcggggcgggtgtaggcgtcgtagtccagccgcgtagcgtgggttatctggcaggccagcttggcagcgctggggaaaccagggcagtgatccaccggcaccaggtcgttgtccaccgtcttgggaatgccgatgaagcgcttggccactccattggcggcggcccattcggacagagcgtccacggtgtccatggagtcgttgccgccgatgtagaacatcacttcgatgctgtgggcgtccatcacctccaccagccgcttgtaatcggtgtcgttgccgcgcttcagcttgtagcggcaagtgcccagcgctgaggaaggagtctgcttcaggatgtcgatttcgcgggccggcaagtcggtaaggtcgaacagcttgtcttccagcaccccctcgatgccgtggatgccgccgaacacgcggtcgtagacggggttcagctggttggcgcggatgacgccggccaggctggcattgataacggcagtggggccgcccgactgggcaacgaggcaattggccatgagactctccttcttcgaggctgcttctccatctgcggattctagcaggcccccggcccgcgccccggcgcccctcccattcgtttcccaaagcgacaaaaaccaagggagccatttattgctacactgggcgctatgacagatttttaccgcaccatagcaggcttcgccgaggcggagattgtggagaaaaagagccgcttcatcgggcagttgacccatgtggaaaccgaggaagaggcgctggctttcctggaggagattcgcaccaaacaccgcatggcccgccacaacgtgtacgcctacgtgctgcggggcggtcgggtgcgctattccgacgacggcgaaccagggggcacgtcgggcatgcccactttggaaacgctgcaacacgcggggctgcaggatgcggccattgtgaccacccgctacttcggcggcgtgctgctgggcaccggcgggctggtgcgcgcttacaccgcggcggcgcaggcagccatcgacgcggcgcaggtggtggtgatttcccgctgcgtggacataaccgtggaggtgccctacccgctctacgaagcggtggcgcggctggcggccgacatggaagcccgcatagtggaaagcgacttcggcgccagcgtgctgcttaccctgcgcatgttggcaggcacggaagagccgctgctggagcggctgtcggaggcgacccgcggtcaggcagagcccctggtgagcgccccgttcgatgccgcgttttaggagatgccatggacaagctgaccggtgccgagtttgaagcggtgattgaagaggcgctggacgccattcccgacaagtttctcgaagcgctgcagaacatcgtagtggtgtgggaagaggagccgaacgcctaccacctgggagaagatttcgagggcagcggcgatgggccgggcggtgccgggatgccggaaggctgcaacggggagaaaagcgcctggggcgaaggcggcggcgaggaagggtggcccgacgaggcagagcccctcgctgcggcggacggcgactgggacgatgagccctggggcacctggtgcaacgacgagctgctggggctgttcgacggcctttcgctggaagagagttgcggcggccagttcgacgatctgcccaatgtgatcaccatcttcaaagggccgcacgagcgttgcttctccacccgcgaggaaatggtggaggaagtgggcaaaaccgtcatccacgagctggggcactacttcggcctggacgacgacgccctctacgccatgggctactagcccgacaaatggcaccgcatcttcggcgagaagttcgagagctggtagggcgccgcgagcagagccctcctcttgcgcgggtcgaacgccctccccccgcctgcttcgggcgcggcccgttagcggttgtccaccttctcggggtacaggtcgtgctgagaaagccgctgccaggccacttcctcccatttggtgccggggcggccgtagttgcagtaggggtcgatggagatgccgccgcgaggggtgaacttcccccacacctcgatgtacttcgggtccatcagggcaatgaggtccttcatgatgatgttcatgcagtcctcgtgaaaatcgccgtgattgcggaagctaaacaagtacagcttcaggcttttgctctccaccatgcgcacgtcgggcacgtaggagatgtagatggtggcgaagtcgggttggccagtaatggggcacaggctggtgaactcagggcagttgaacttcacaaagtagtcgttgtcctggtgcttgttgacgaaggtttccagcacatcggggtcgtaatcggccgagtatcgggtgccctggctgcccagctgggtgagcccctcgccttcgcgagacgagaccgcttccaccggcgacggggccgatggctctgccgccacgatggtggccgtcgccttgggcgcttcgtccgtcttcatacgatccatctcgtcgaaggccttttgcaaatcgcggccgaaggcctcccgggccgtctcttccgggttcgtatcttcgccgctgctgaacacgtggcgctcccaatccagctgctgaggggcagccgagcggttgccccatccgctggcgcaaccggagccgtcgccgctggcggccaccgcgcgacccaagtcagacacgatgccggtcatgactggcggcaccgcaccggcatccttcgcctgctcgccggcttcgccatcgccccccttccaagaagggtccacaccgaaggccgaagccaaggaattgaaatcttcgctcataggttcacctagtctttcagtacgcaactgtctcaagccatcataagcgggtcttcggtgccgttggcgcggaaggcggcgatgcggtcgatgcaggtggcgcatctgccgcagggggcctctcccccttcatagcacgaccaggtgagctcgtagggaacttccagctccaaccccgtgcgcacgatgtccgctttggtcatttgcacgaacggggcccgcagctgcagctggccgccggtgccctcggcgatagcggcccccatggcgtccacgaaggcctgcgagcaatcgggataggcgtcgcccgcccagtcgtcgtgatgggcgccgtaatacaccgcagagcagccaagagagagcgccatcgatgccgccgaggataggaacagcccgttgcggaagggtacgtaagtgctcaccggggcgccctcggcttccgcttgctgctgggcgtaagaggattccggcaccgtttgagtggagtgggccaacagcgagcaatcgctttcggcgaagatgacggccaggtccaagaagcgttgctccacgccgtaatgggccgctaccgctttcgccgcctcgatctcgcggccgtgacgctggccatagctaatggagagggccaccacattggcggagccaaactgttttaccgccatcgccagcagcgtggtggaatcaacgccgcccgagcagagcaccagcgctttttcactatccatcggttcctcctatacgcccttttccacgttgggccagatgattttgtgcatttgcaattgtaggcgggcacgggcaaggccgttggccgccatggagtccacaatttgcgccggcgttatttcgccccacacgggcgagaacagcacgttggtgctgtcgaacagcccctgctccttgcagcgatcgcgggcgaaagccaggtcttcctcgctgcccaccacgaatttcactgcatcgcggccgtccaacagcgggtagttgtccgccagcatggcggcgctcacctcggcgccggccgatggggttttccagtccaccgtgaggcacagctggccggccagcccctccacttgcgcctgtgcacgcaactgcagtaacggctccaccgggcgcgacccgtttgtttcgatttccactcgcagcggatagggctcgcgcacctccagcaaagcccgcaccagatggggcaaattgggctgcagcagcggttcgccgccagtgagggtcacgcagcgcacgccggtctcccgtacccacgccaccaggttttcgatgctccagccttccacctccactaaggggtggtttgcccatcgggtgtcgcagtagctacaccacagattgcagccggcaaagcgaatgaacgcggccagctggcccgccgccagtccctccccgttcacggagacgaatttctccgccacaggcagaaattgcgctgagggttggt

SEQ ID NO: 3007 - DNA, 23075 bp, synthetic construct
  misc_feature 1..23075: note = Synthetic
  source 1..23075: mol_type = other DNA
tcaatgtcgtgaaggttgggcatgttctacctgccttacgccgtaaccgagaacgtctgcttgaacgagtcaagcgcggcgttcaggtcggcttcaattgcgtcggtgaacttcttctccttcacaatgctctccagcacctgaggtgccgaggcacgcaggtacgcgagcatctccgtgcggaagcgcacgacgtcgccaagcggaatatcatcgagatatcccttgttgccagcatagatggccgccgcctgttcggatgcgggcatgggcatatagcgaccctgcttcagcagctcggtcatgtgtgcaccgcggttcagctgatcctgtgttgccttgtccaagtcgctgccgaactgggtgaacgcctgcagctcgcgatacgacgcgaggtcgagacgcagtgagccagcaacctgcttcatagccttgatctgcgcagatcctccaacgcgggacacagagatgcccacgtcgactgcaggacgctgaccctggaagaacaggtcggtttgcaggaagatctgaccgtcggtgatggagatgacgttcgtgggaatgtatgcggaaacgtcgcctgcctgcgtctcaatgatgggcagagcggtcatggaacccgcaccgttctcatcggacatcttcacagcacgctcgagcaagcggctatgcaggtagaaaacgtcacccggatatgcttcgcgtcccggcggacgacgcagcgtcagtgacatctggcgatatgcgacggcctgcttcgacaggtcgtcgtagatgcagagcacgtggcgtccggggttatcggcacctgcgggtttgccgtcctcgccgttgtacataaagtactcgccgatagcagcgccagccataggcgcgatgtactgcagcggggcagagtcggacgccgtagcggaaacgacgatggtgtaatccatcgcgccgtgacgctcgagtgtttcgacgatctgcgcgaccgtggaggccttctggccgattgccacgtagatgcagatcatatcctgacccttttggttaatgatagcgtcaaccgcaatagcggtcttgcccgtttgacggtcgccaatgatcaactcgcgctggcctcgcccgatgggaatcatcgagtcgatagccaagatgccagtctgcatcggctcatgcaccggcttacgggcgataacgccaggagccttgaattcgacaggacgcatgccgtcagccttgatagggcctttgccgtcgataggaatacccagcggattcaccacgcggccaagcatttccttgcccgacggaacctcgacgatgcgaccggtggtgcgcacctggtcattctccttgatcgcggtgacatcgccaaggagcacggcaccaacctcatcctcttcgaggttctgagccaggccgtacacggtcttgccttcgccgctgacaaactccagcagctcacctgccatcgcgtccttcaggccatcaatgcgggcaatgccgtcgccgatctgaatgacggtgccaacctcacgggactcgacactggtgctcagcgcatcaagttgcctgcgcagagcctcgtcaatggactgtgcggtgatttctgtcacgagcgttcacctccatctgttgtgtctttgaggacggtacgcgcattctctaactgcgtgagaatactggcatcgatcctcttgccgtttgcgttcatgagtatgccgcccaacagggatgggtcgatatgctcacgcagcacgaccttggttcccaaatcggtttcggctttccgtacgataacctctcgcaggtggtcatcgagctctacgaccgtggtcacatcgacaacggtcatgttcagcttggcttcgagctgttgcccatacgcctcgctcacgcggggaagcagatccgtgtcgccgcgctctgccataacggcgagaacatcaacgagcacgggattggccgtggcgaacacgccgcgagccacctccgcacgctgctcagcggtatacgagctgtcgccgatcgcgcttgcaagatccatgttcgaccgcatgatccgcacaatgctctcaagctgatcgcgcacttcgagcacgtcgttttggccacctgcctcgtacacgccatccaaaaggacagcagcgtacgtggctacctgctctttaacgatctggcgattaatcggcattgaaactgcccgcctcgttcacatagcgttcgatgatcgcgcgatgctcatcgtcgctcaaatcctggccgatcaaacgcgacgccaccgcgatagaggtgtctgcaaccgaactctgcagctcggcgatcgcagccttcttctcgctctcgatggcaacgcgagctttctcaaccatgacctccgcctcgccttgcgccttggccgtgatgtcggctttcaccgactcgccggtcttcttcgcatcagcgataatctgcgcagactggcttttcgcttcctcgagctgcttgcgatactcctcgagcaggcgctcgctttcaatgcgcgccgcctccgacttctcaagcgcatccttcacagcagcctcgcgcttctcgatgatgttgtccaccaccggccagccaaacttggccaacacgacggcaatcaccaggaaggcgatgagcatcggaatgaactcgttcatgtcgggaaggatgagggcgatgcccgtcttccccccttcttcggaggcaaacgcagccaccggaagaataaacgaagaggccgcggacaaagcagcagtgaagccgagcgtacccagtatcttctttgcttttgctttcacgtgctctccttttcggtttctttagaacgtatctgcgctcaagccgactagaagatgaacgcggcaaccaagccgatcagggcgagcgcctctgcgagagcgccgaagatcagggcgttggtgaacagcttgccggcgagctcgggctgacgggcggagccgacgcacaggccgtagccgcacagacccagaccaatgccggggccgatggtgccaaggccatagccgacaaccttcaaggccgcgatgacgagagtggtttctgccattgtttcctccttttaccgtttccgggcccttcccagaaacaccagtacctatgttcatccggcgggagtttgccgggacaaaccaaaatcagcgtacccacgaggggcatgcggcgcaaagcgccacgtaaagacaaacctcttaatgctccgacgtagccagaccaatgtagacagccgacagaatagtaaacacataagcctgcaagaatgcaaccaggcactccagcacgtacatggcaataaggaacagcatccagatgatagagggaagcgccagcacggcgttagctgcgtagatggcatcctgaataaacaccgtggttaacagcgcgaagataccaagcaccatgtgtcccgcgaacatattgccgtaaagtcggacggccaacgtgagcaggcgaatgaccagcgagataaactcaaagaaccaaatgataggaaccattggcttcggcaggcccgacggggcaatggacttgatgtagcccaagccgcccttggctttgatgccgtagtaattaaagtacacgaacgcgatgaatgataacgcccaggtgacacccaacgtgcccgttgcagccttcgcacccggaatcaaaccaatcacattcgcggtgagaatgaaaaagaagagtgtggccaaaaacggtatgtgcttcttgtatccatgcccgatggcgccttcacccatgttccgcttcacggcgtcatagccccactcaaccatgccggcaaacttgccgttcggaacgactccgatcttacgtacaccgataagcaccaccgccagaaccaccgccagcacgataaacatccacagcgtgtactgggtgatgccgaagccgccgaagtcgacgacgaacgccgaatcgaacgaagaacgaagatgttcgatcggagcggcgatgtccgccaaagggttacccgtcagttccatgtagctctcctctactattgtcgcttcgatataagaccgaaagcaataaccgcaacgatgaacgacacaacctcggcgagcgcgtacgcaagcaaaacgtcacgtgcaatcaagccgcacacaacgataccagcgccgagcatcacgaaggaaacggcgatggcggcgaagaacaaacctgcaaggctgcccgtgtgcgttgggttgattgcacgcacgcggacggtggcataccgaaacggcaggcagctcaccacgcctatcagaactcctatgatgatcgcaatcgccaaaacaactgcttcccctccgcatgccgtacgaatcggcatgcatgaaacgtcatttgaaagtatagtagcgaaacgcgcggaaagcacctatttatatttatttttttgcctcgcaattcggtagatgatgcataaactctcactattatgaataatttctgattagtttgatttattatcaagataatgtaagttctggagcttttcccaagaatcgaaaaaagaattttttaacctgattacccatacagcttgggaaaaacgcataccgcatcgcaaaaaaacaaccttttcaccatttttgcatggaagctgttttgtacaaaagtattcgtctgtctcgatacacgccacagaagcgtacaaggggcgctgcgtgcaacctacgccgccccttgtagcaccgaaaaagccagtgattattcgtacactcgcagcttcatgcccgactcgcgcagcatatccatggcaagttcgtcgggatatgggttctgatacaccacctcggttataccggcgttgataagcatcttggcacataccacgcaaggctgcgtgttcacgtagatgcttgcccccgaaatgtcgatgccgtagcgcgccgcctggatgatggcgttttgctccgcgtgtagaccgcggcagatctcatgacgctgcccactgggaacgcccatctgctgacgcagacaccccgtctcgccgcaatgcgcaagaccagtgggaaccccgttgtatcctgtggccaagatgcggcgatccttcacaatgacggctcccaccgcacgtcgcaaacacgtcgtgcgcgaggcaacctggttcgccaatgtcatgaagtattcgtcccatccaggacgattatccggcgcgcccatgctaacccaactccggatacaggggatacttcgccaacaaggcatcaacccgttcgcgtacctcggcaagtttcgtcgcgtcgtcggcattaaacaccgtttcggcaatacagcagcccacttcgcggaagtcgtcggtgtcaaagccgcgcgtggtagccgcggcggaccccacgcgaatgccactcgtgacgaatgggctgagtggctcgttgggaatcgaattcttgttcaccgtaagccccactgattcaagcagcgtctcggcgtccttgccggtcacgccagctggcgtgagatcaacaaggcacagatgattgtcggtgccacccgacaccaggcgcaggcccccttcgaccatagcctttcccatggcagcacagttgactactacgttgtttatgtagtcggcgtacgacggcagcagcgcctcgccgaacgccacagctttgccggcgataacgtgcatgagcgggcctccctgcgtaccagggaataccgccttgttgatttttttcgccatggcctcatcgttggtgagaataaacccgccacgcgggccacgcagcgttttgtggctggtggaggtaacaatatcggcgtacggaacagggcttgggtgcgctcctgcggcaaccaaaccggcaatgtgcgccatgtccaccatgaacagcgcacccacctcatgcgcaatgtcggccatgcgctcaaagtcgataacgcgcggatacgcgctcgctccgccaataatgagcttcgggcgcgtttccttcgccaatcgctccatggcgtcataatcaatagtttcggtttcaggatcgagaccataatgaaccatggtgaaccacttgcccgagaagttcaccggcgagccgtgcgtgagatgtccaccatgatcgagactcatacccataacggtatcccctgggtttactgcagccatgtacgctgctaagttcgcgcttgcaccggaatgcggctgtacgttggcgaatgtgcagtcatacagtttacatacgcgctcgatggcaagatcctcaaccagatcgactttttcacacccaccgtaatagcgcttccccgaatagccctcagcgtacttattggtgagcacgctgcccatggcctccatgacggaaggcgacgtaaggttttcgctggctataagctcaacgcaaccgcgctggcgggcaagctcctgtccgatgatatctgcgacctcagggtcggtctgcgaaagaaatgcgtgcgccatactatgctagctcctttccaacgccatgatcttctgcacgcgaccagcatgacggccaccgccgaaatcggttgacagaaacgcatcgagaatagccttattctcgtcaagcgtaacgaagcggcccgacagcgtgagcacgttcgcatcgttgtgttcgcgggcgagctgggcaaattgtgtgttaaccgcgttcaccgcacgaatgccgcacaccttgttcgcggccacagccatgccgatgcccgtaccgcacacgagcacaccgaaatcggcgtcgccagcggctacatagcgcgcgacacatgcagcgaaatcgggataatcgaccctctcgtcggtatcgggcccgcagtcgataacgtcgaaaccgcctcgaaccaggtagtcaacgagactttgcttctgctcgaaccccgcatgatcgcttgcgatactgataatcacggaaacacaccttccctattctcgccgtatccttgcgtttgttgcacccgccttacaactgcttgggtgcaacagaaacactatagcgcccaacgcgcctgtgccgcgtgaaatcttggttaagttagagcgaggaagcggcaaaggctggcgaatgacgagtgtcgaaacggcgcgaacggtgcaggcagcacaggcagcacaggcaacgtaaacggaaagcagcgaagagcaccacgaaaaccgaagtgtcaccaccaggatacgcgtatcctgcaaacaaatgcactatccgatcacgcccttaccttccccactgcgcgtacccatccgtcaagcagcgcagcgcgttcatgggcttccatagtcggatgaaagcacgtatcagtcgtgcgtaaggcacgcaatgcgtccgtaccactccagaaaccggtggtaagccccgccaggtacgccgcaccaagtgcggtcgtttccgcatttgccgggcgacgaataaccgcatcaagcacatcgctttggaactgcatgaggaaatcgttcgccgacgctcccccatcaacggtaagtgacgtcagactctcgcaggcgtcagcttccatagcacgcaccaagtcggaaacttgatacgcgagcgactcgagcgccgcgcgcaccacatgcgcgcgagacgtgccgcgcgtaaggccgagaatagcgccacgagcttgcgcgtcccaatacggcgcgccaaggcccgtgaacgcaggtaccacatacacgccacccgtatttggcacgctgcgagcgatgtcgcaggtgtcagcggctcgatcgataagccccagatcgtcacgcaaccactgaatgagcgcgccggccataaacacactgccctcaagcgcgtattcgggctgggcaacacctggagcgctggcggctaccgtggtcaccaacccatgtgacgacgtacacgcctcatgccccgtgtgcatgagcagaaagcagcccgtgccgtacgtgttcttcgcttgaccaggctcgaagcaacactgaccgaacaacgccgcctgctgatctcccgccacaccacaaatgggaacccccgacaacaccgcagaattggtagtgtagccaaacggcgacgacgagggtcgcacgtcgggcagcatgcttgcgggaatgccgaacaggtcgagcaaccacggatcccaacgcatttcgtgaatgttgaacaacatggtgcgactggcgttggtggcgtcggtggcatgaacacgcccttgagtgagcgtccatataagccacgagtcaaccgttccgaacaccaactcccctgcctcagcgcgctcgcgagcgcccgcaacgttgtcaagaatccacgcaatcttacttgcggagaagtatgggtcgggaatcaggcccgtccggcgcgtgatctcgcgcgcgatggattcgtcggtacacaatgtctcaaccatgtcggccgtgcggcggcactgccacacgatggcgtttgttaccggctcacccgtgcgtcgatcccacacgatggtagtttcccgttgattcgtgatgccaatgctgtcgatgtcggcaggctccaagccgttcgacaccacaagctcggtaagcgctccgagttgtgagcttagtatctcgcgtggatcgtgctcaacccaacccggctgggggtagatctgacgaaacgggttctgcacgcaggaaacgacgtttccttgcgcatcaatgagcatagcgcgtgacgaggtggttccctggtcgagcgctacgacatacgttgctgacatgcgttgtcctccatccaaaccgctatatcttcgaacacctggcgccgaccaggttcgttgagtatctcatgacgcatgccttcgtacagacgcacgtcaacctgacgtgagccagcccgccgagccaggtcggctgcgcgctgcacacccgcaccgaaatcacccaccggatcacacgcaccagcaacgaataacagcggcagattagacggcaccttgcgcgcacaggaacgcgatgcaacctcggccgtaaggctggtgagcgcagcatacccacccaccgagaacatgactccgcacaaatcgtcggcgcggtaggtgtcaaccacggcgtcatcggtacacaaccagtcaaacggcgtgcgcgcatcggcaatttggtgagcataggcacccacccccaatcggtcgagcagtgagctgcggtagtcggcaccctttagcgccgcgagcgcccgggcgagcaggttgccggcacgcgaaacaataatcggctgctgccccgtgccgcacagcaccgccgccgccacgccctggccatggcgagcaaggtaagcgcgagcaataaagctacccatagaatgcccaaacaggatataaggaacctgccggggataacgcccttctacgatacgacgaagctcgtgcacatcgccgatgagaatatctttgccacaaaccggcagcacacccaactcatcggcgctggccacgcttttgccatgcccgatatggtcggctgcacacacaacgaacccacgaactgccaaaaagcgcgcgagctcgtcatagcggcccacatgctcggtcatgccatgtgcaatctgcacgatgccgcgcgggtgctgcgacatgtgagcgcgcgaaccccgcgcgccacgcacatcaaccggtgtccatataagccccttgatggcagttttttcatcgcacgattgaaaccccaccggcgcaacgttcacagcgctttcggcgttttcagcactcacagcgctttcggtactcgcagcacgctcggcactttcggtactcgcagctcgctcggcactttcgaaaaccccagcactttcggcgccttcgacactcaaagcgcgctcactctgattctccatgggaacccctccgtctttatttcacccatttgtcgttccccattataaccaggtcaaccctttgctgcatgttcatccaaaactgcggagtgggccgaacgttcccgagacaccgacatccgatgacaaaactgcaaaccaacgcgaactcttatcggcattggaagggatgctaagccccagttttgcatgcgccccacagagaattggtgccccagtaaggaaggattgtgaaccaaaagtggacgattcttgtcatatctccgcatgtcaagcgttatcctaaaagagcactgatgccaaccttaggagacgctatggttacctctataccccctcttactattcttggcttagatatcggaattggaagctgcggttggtcgctactcgacatgacgaacaagagaatcattgcttcaggcgtccgtctctgggaaacgccgcaagaacccaaaacaaaagcaagtactgcggcaactcgccgcgccgctcgatcagcacggcgcaataccaaacggaatgcagatagaaagaaacactgtctcacccttctcaaaaagcacaagcttgttcctgccgacgctcaagcccaatggctccaatccgtgaagaaagacaaacccgtcataaaactaagggcggaaggacttgaaagaggcctcacggatcgccaatgggcccaggttctttattctctatgcgaccgaagagggtacattcctcatggtgactcaacctcttcaggcgacgagggtaaggtacttaaggcagtgaagcagaatgccgaaaaactacaggctgcaggcatgaggacagtaggcgaaatgctctctcaagaaccacgctcccgaaacagaggcggagactactcgttatgcgtcacccacaatgacctcatcgtggaggtcaacgctcttttcgaggcccagagagagcatgggaaccctcgagcaacttcgcaattcgaagaggaatacttggatatcttctcttggcagaaagacgtgtcggaaaacgatcggcgaatatatgaccaggttgggtggtgtacatattttaagaacgagaaaagggcaccaaaatcaagcctttcttctcagatgtgtgaagcgtttgaacgcgtttcacatgccgtatggatcgacgaaaaaggcaccgaacacaagttaccacccgagataaagcaaagaatagtcgaagtgcttttcagccccgttcctctgaagggaaataagagctgcaaggtaacctacaagcgaattcgcgaatggatggagctcgattcggattttacattcaaaggagtcgaatccgaaaaggaaaaaacagaggagatctacatccctaaagcatggaaagtgatgcgagagaatctccccaacgatctaacagtggaactacgcgacaaccgggaactcgcagatatcgtcgcagggtgtctcacctacgcctcaagcgaaaagaaccttgttgccgtccttaaggaaaactgtatcgatgacaaggatatatcatccttgtgcagccttcctttcactgcgcaggttttcaccggctatggttcccggagcctgcgcgccctcgatctgctgataagctcattcgaggactacgaaaacgttactaccttagctcaagcagaagaggcatcggggcttaaagatatgcgccttgaaccaggtgaacgacgcgacacatcactaccaccatacaaactttacgaccccacatgcaagaatcccgtagtgctgcgcgttatgggacaggtcaggaaagtcgtcaatgcgatcatcaaagagtatggcatgcccaacgagattcatatcgagctggcgcgcgagctcaaacaatccaaacatgagaaacaggtaatcagcgaaaggaatcgcgccacgagagacgcccgcgaggcacgagttgcaaaaataaccgaagagcttggggtagtaccaaagaagagcctaataaaaaaggttgaagcctgggaagagcaaggcggtcgatgcgtttactgcggaaaccctatttcttacgaacgtctcattgccgaagatcattttgccgaaatagatcatgcccttcctttttctcgaacctgtgatgacagtcagtcgaacaaagttctttcatgtaaagcctgtaatcagaacaagaagaaccgcactccgtacgaatgggcgcaagatggaggaatcaactgggaagacttttctcttcgcgtgacaaggaacaagaagataggacagaaaaagcgcgcgaaactcctgtgtaccgatctttcggcagcaaaagagggtgagttcataagccgcaaccttaacgacacccgatacgcatcaagagcagccaaatcgtttatagagaactacttggctttcccggaagacggccacaaacagcacgtcttcgccgttgccggcggtgcaacggcgcttttgcgaagtgcctggggaattcggaagaaccgcgaggaagaccaagtgcatcacgccgtcgacgccgccgttattgctgcctgtacccgccaacaggtaatcgatatcgcaagggcgaacgagcggaagttatacactccgaaaagcgagcgcaaagatctttttaaggcgaccgaaccttggaagggtttttctgaagaagttgcaaaatggaagacaaccataatcccaacccacatggtcgatcacaagattggcggtcgcgtgttcgaagatacggtgtatgcatactgcggccttcgaaaagatggcaaagtgggacttctgggaagcggtccgaaaggcaaactagggacaaaagcctcatcaaattacattgttcgagaggacggctcagctcttattgtggacgaactggcgttcatcaacctatggctcgatcctgaagcgaagaaggggaaaggacagttgctgcttgagccgatttatcgggcggatattccatttgaaagcaaaccagggtatgtgagaaagtacattccacctcaaagcgataaaaagccccgagagttttgggatccagttccggaaagggcgcttgctttgaagcccctcaccctttttccacaagatgtgattctcgttaagggggagattcggagatttaagacaattaatatcgctacatgtagctggcagctctcggatccaagaggtgagctgactgacacagaagcaaccaaaggactcgcgtttttaacactcgataaagaaaacctgcctgttcacattgaagaagacgttctggggcttgtttttaaacgactctcgatcaagcaacaccaaaagaaagagtcagaagaataacgtcatctgagcaccgtagtcattggaatggttctgcttgcgtttcccaagcagaaccattctgttctcgaattgcttttcggtcatagtaaacaccgtcacacttcctgctgtggggatatggttcttcagacgagcaacatgaacctctgttgaatcgcgccccagtgttacccgagaataaacactgaactgctccatgctgtagccgtcttttacgaggaattttcgaaattcagtgtaggctttccgctctgctttcgttgcaacaggcaaatcgaacatcactatgattctcatcaccctcacttttcctccaaacgaacaaacgaaacaggcataagggaaggcaagttgagtaaataggcatccttagctaaaaccgcccgcttgagcgaggcgacctcttcctcaattgcactttgaaccgaatggcatttcccctgaacggaaaccgaacattcaaacaccctcgtaagaagacgcttgttgtcagttgaaagaccctcggatacatcacaacatgccaccagcaaatcaacgacaggccgaaacggttctatcagatcatcaactaagttaaatgcattaagatcactgcaatgatgcaaacctcgagagacgagccatccaccggaaacagcacatcgagcaattcccgctcgtaacaccgcataaccataatctagaagagctgcgtatggcccctcccttctggttccttccttcaagtatttccgaaagtatgcagaagctgcgacagactctctaccagaggaatcccccgatttcacctccttggcatactttcgaacatcttcacaaccttccagacccagtatttccaagcattgcgcttggttgagaatcttttgttctacgatcgccttccacagttgctttgcgaggggtttcgaaataagaagctgatcctccacaatagcagcatgtctggaatgagcaccaagaggcaattgaagagcgacgggcatatgacccccatcacataccaaaacccctatcccttcttctgccatcgctgcaagcagagcggttgacactactacctcattgctctctaaaacaagaacccagatatcctccagaggaatgcttgtctgaacgcctcgctggtccaccagcaattgattattcttgcagaaaagcttggcgggattctgtaaacaaatggttctttttgacatgggggacaacctcttttcacttgggaatatcaattgtataatgtccacctaggcatttataccaaatggggatttgagtggacaacgcctagacaaggggcctgcttcgcaggtacccgcaaggtaaagccccgttcgcggggcttcctttttcaaaaaacttgagattaaggatattttacaaccgtgtgttatagttttgcacgtaccacaacaataaaaaacgccctttcaaagggcgttttttattgttggcattataccaaatggggatttgagtgggtgccaagaccaagctcatcgaccggctttagcgcagcggattataccaaatggggatttgagtgggtgccaagaccgagtctgtaatatattcagtttcaccaaaattataccaaatggggatttgagtgggtgccaagacatacgccggacgtttttgataccgctgcaaattataccaaatggggatttgagtgggtgccaagaccccgtattcatctacggacttaacaggacgattataccaaatggggatttgagtgggtgccaagaccctgacccatcaggcaccaggcgacacgtcattataccaaatggggatttgagtgggtgccaagacggacgctgatattatcgcgttgcctgatggattataccaaatggggatttgagtgggtgccaagacaacgacggaataacaacgcccatttccgtaattataccaaatggggatttgagtgggtgccaagactacccatcagttatgtttgcagcacatggattataccaaatggggatttgagtgggtgccaagacgggtgcgcattcgatgattaacgcgcgtaattataccaaatggggatttgagtgggtgccaagaccgagtctgtttgcagctgtgcaaccggtacgtgcagagcagcgcgagaaatgtgcccccagtttcattggtataaaaccgataccactctataaacccagcaagtccacgcgatctaattcacgtcaacctgtaagacggagacaccagcctttctgaaagagtcgaacccctggaagaacggcaaacgccctttgatgcaaaagtaactatcccacagcctttgctaactcgggcacctccagcggcgccacctttttgatgtcttcgctgtgtagttccatcgagttccacagatcaaccttctgctgcatgttcatccagaactgcggagtggtgccgaacaaccgccctagtcgtagacacatctcaggactcagaccccgcttctcacgaatgatctcgttcaccgtctgacgcgtaacaccaagccgctttgccaaccctgccacactcaaaccaagttccggcatgtaatcttcccgaagaaactcgccaggatgaataggcgcacgaccgatgagtagggcgtcttctcttagacatatttcatcacacataatgcccctcgattcagtggtaatcgcaaacctcaacgtcgtaaacaccatcggacataaagcggaagcatatacgccactgatcgttaatcgaaatggcatgctgtccttccctattgcccttcaaagcatgaagcctgtttccaggaggaagtcgcaaatccagaagagccaccgcattgtcgacatactcgagcttgcgcaacgcacggcgctgaatgtccggaggcagcttttggcaagagcccgtttcaaacaattctcgagaatccgcgtcagcaaacgtccgaatcatagcacctccttgcaatgcagtgtatcatgtcacgtgacgctttacaatatgccatgaagtcaacaaccccgctgagtaattctgagttgttgcaaatattaatgcaacactgggggtgcggacgtttttctggactttgtagaacgggggggtgcgtataatagctcaatctatcctccttttctgcaccaggctggtgcagtgtttcattatctggcacgctggcgacttgatccagctgcacagaggccgccgaatccatttctccaccaggctggtggagttttttcttcgctcccacgctgccaacttgttcgagctaggaaggagtcacggcctctaattctccagcaagctgttggagaaatgcgtccccagttccatcggaataaaaccgataccactttttcatgtaccacaagtttgtagtgctgaatcccttggcatgcggaaactcgctttgcagatcgaggctcacctgctcgacaacgccggatccccagcgctcctcggctctttgtgtgacaaggtctcgtcccagctcccagttgaacaggagctgttcggagttgactttaaccgctgcctttacctgtgcgccacgataacgacgcttgatctcgcgaatccatttcgcgtattcggcgtccagtgacacgtcatgcgacctgaccattcgaggcgttctatcgttattctcagacacaacattatcagtcgtggcagagctcctttatttcactcgcgatgccgtcgcacatgcgctttgcatttctctgcttgtcttcctagaatgcagtatccaaccagagacaattcacaccgttagcggtgcagagagactgaagttttttgtcaaccgtaaagagagtggcacccaaacgacgcgccagtatgaagtagaacaggtcataggatgaatgaccgaacctgaccgactcagtcatagcttcgacccaaaggttgccatcgtcgtagaaatcatcaacaagagcgacagcatcccgcccgcaatcaattgcttcttcaggcgtcaggtgttttccgagcacatatttcgtaagtgcatgcgtgacttcgttcacaagcagcgttggcgctgcgattcgctcgtctttcaaacgcagtatctcgagcgcttccccgtattccgttcccatgaccatggcaagggcggcattcgcatccagcacaatcatcgtttttctcctgctacgtctgcagcgagttcaccaaacagcgcatcgcgttccgtgcgagcctcggcgagcatggtggacggttcgggaagagcgccgcatagtttgctttgtcgctcgcgggctcgtcggaaaacttcttcacgcttggcattgcgggcctcgcgctctacaaggggctctacggtaaacgaccctcgccgctcggaggcacactgcgcctggtggcacccacgaatcgcttgctcaaccgaagcgacggtttgttgcgcgatgcttctatgattgcgagctgcgaaaacacgcaactcctcgtaaaggtcttcagggaattctcttacttgcaaggccggcatactacactccttataatacatgcaatttgcatgtattataccctccatatacgagagcacaagaccttatccaccttatcaacgagacgaagctgtagcttcgtctgcgggacggacaagcatgataacgcgaccgcacagccaagctcgagggcaaaccacgttcagagaggtgcgggtggtacaatcgtttgacgcaagtccgcgaaactgctacctgtaaaactgccaggagagcctgatgagcaacgctttaaacccacaagtgaacacatttgacgaaaccgtgcagtggctgcgtgccggcaaggcagcggtgtttcctaccgacaccgtatatgggttgggtgtttcagtgatgcatgcgcacggccttagcgcgctctacgacctgaagcaacgcgatgcgggcaagcctatcgcgtggttagtgggaggtgttttcgaccttaaccgctacggactcgacattcccgattacgcgcatgacctagcgcaacgtttttggcccggagccttaacgctcattgtgcgcgcatcggatgcggtaccacgtgcgtttgtttctccatcgggcagcgttggcctgcgcatgcccgcaagcgacattaccctcgcgctcattgacgccgtaggatcgcctcttgccaccaccagcgcgaacctgtcgggatacgccgacacaggaaagtttgacgatttagataccaccctgcttcaacaagtaggatgcgctttgtgcgacgctgcgccgaaaagcggcttggcctcaaccgtggtcgactgcacaggagaaaagcctgtggtgctgcgtgcaggcggcgttgatgtaagctctgggaactcggattcttctattgggtcatgagggacaatagcctacgtccccgttgtcctgttatgagggacactagcctacgtccccattgtcctacatgagcgcgtacttccgcttgatccgctcgagcttggcacgccacggcacgtagagtgccgccaaaaacgcaaccgtagccgcaccgtgaatgcaatcgaagggaacggctgccacaaacgccgcaacaaccgccggccacgtgatgggatgcacgtagccaataacataccacccgttcagcagcatcccgtacaacagcgccgacgcgaagccgtacaccagcacaacggacgttcggttaaacgcacccgtacgtgccagtacgccagccacgtacccaacaagaccccacgcgtacatctgccaaggagtccacgggccttgcccaaagaagaagttcgacaccagcgccgcgagcgcgcctaccataaagccgcatcgtcggccgaacaccgctccggccacaatacaaatagccgacaccggtttcacgtcgggcaccggcgcgaacagcacccgaccagcagcagcgagcgccgcgagtaccaccgtaggcatgatctgccgcaacgcaggacggcttacctcaaaccccgcaaagaagagtcccaccgctgcgacaacaatacatagagtgagcgccgccgtctgatcaatctgcgcatacgcgcacgcaaccagagatacaggcacgaagccaagtaccacaggctcagcggcgcgcatacagaagcggaaagtgcggttcatgggcgctccttttcgcgattccccgcgcacccgcacattgacacacgctcacacgtggtcgcatgctcttccgcaagcctgctttcctcctcaaccacctgtgcgtcatcggccgccgacgctcgatcttccacgccgtcggctgccgtgtgatcttccgcaccgtcagctgctgcatgatcttccgtaccgtcagctactgctgcggccgctgtgcgagcatcccacagacgtgcgaactcatcgacaggcagacggtagaacagattgtcggaaaagaactcgtcggcgcgctgggtgcatgcgctctgtccgtcaaacaacagcgttaccttatcggcaacgcgcgccgcaaacgacaagtcgtgtgtggccagaagcaccgtagcgcccgcacgagcatagttggtaacaagcgtggccacaagtagctttgacggagcatcgagaccctttgtcggctcatcgagcagtagcaggctggggttcgtgagcagcagtttcgccaaggcgagcagctgctgctgtccgccggatagatcatacgggtgggcactcacgcgatgggttaaaccaatggaggcaagcatcttgtcaatggcggcatcgctgtatcctgcaccacgctgccattcacgcagctcatcgagcacggtgtcgcacacgaacagcgctttcgggttctgcggaagtagcgcctgggaatcatgcaggcggttttccactcgtccgcgcactggacgcacgatgtgtgcaacagtatgaagcagcgttgtcttaccgcatccgttgccgccgatgagtgcatgcaccgacccttctaaaacccgcaggtcaagcccacgtagcacaaaatcggactgatcgtagcgcatgtacacatcgcgacagatgatggcgtcagcatcggcgtgggtggcgtgggcgtgggctcggctggcgacatcggtgtgggtggtgacgccgacggcgtgggtggtagcgacgtcggtggcgtcagtatcggcgtgggtggcaacgacaactcgggtggctgccaaaggcgcagaaacagccgacgccgcagcagtgtaggcggtttccggacagttgccgaatgcgccatgcaggcctttcgacaccgagccttccgcacgctggacacaaacacgtccgtcggccaaatgagccaggtgtgtggcatacggcagcatagcctcaggcgagtgcgtcgcagcaaccacggtcataccaagctcgcggtttacacggaagagcgcatgaagaaatgtcttctcggctataggatcaagctgagatgtaggctcatcgagcaacagcacgctcggtcgcagcgccagggtactagcgagcgcaagcacttgttgctgaccgccggacagctcgtcaacacggcggcgaaaccacggctcgataccaaaaaagtgcgccacttcggcaatgcggcggtgcataacgtcgggtgcaacccctacgttctccagtccgaacgccatctcacgccacaccgtatcgcacaccatctggctttcggggctctgcgccacatacccaatgcgagccgccgcttcaaagcaactcaaatgctcgatcggctgccccaaaaccaacaagtcgcccgaccggcgacccataggcgcaatcgagggcttgcagctacgcaaaagcgtcgtcttgccactacccgtgccgcccgttagcacgtgaaactcgccgtgtgacacacaccaattaatggggccaacaccagctgtttccagccgttcgcccgcgcctttccgcaggtcagacaacccgtcttgatcatcgggcggttcgggatacgagaagcaaaactcccgcagttcaagcgccaattcactgctcatagcgcacgctccttcgccttcacgcccgcaacccacaaaaacggtagcgctccatacaacgcaaacagcacgcaataccacactggctcgatcccagaaacaaccggatagaacgaaaacgcgcgacatacctgccaacacatcagcgccgctgcagcggctactatcagaagtgcgacaagcaccagcgcatcaacagtgcggaagcgttcgcgcacgtacgctgtgcgccgttttgcagcaccccacccgcgcgctttcatagcgtcagccgtagtaagcgagtcttccatactccatcccaaaagaacgctcgacaaacgaaatgcatcgcgcatgcgctcgcgtcgactgagcgtgcggtgcggacgcgccgacgtacacgctcgctgcgccgagtcgataacgcgaccttgacgaacgagctggggaacaagtttcatggtcatcgacagcataagcccaacaacaggggcaacgccgccaaacagctgcataaccttatcggccgacagcacgcgcgcggcgttcgcaaacgtgatgagcatgccaacgagagcgaaccccatacacgtgccatagagcaagctttccgcatagaccgcacgaaatccaatgcggaaaagctccgttgaacccgatgcggaaaaaagcggatttgcaaccgcaataacggccaccagggaaagctgccatgcgagcgaacgagctacttcccttccgtccctgattaacgcgccttgggcaagggaaatggcgaagaacaacgccgtgacaaccggttggaaggcaagcataccaacgagcagtagcaccagccaatacacaagcaaaacaacaggatgaagcacgtcgaagcacgcgcacgcaccccgaccggcgtcggaaaaagcaccgcgttgcatatcgcgcgcaccgctaggcaacgtagcgccactgtacaacatcgccgtcggcgagcacgtatgcgctgcacgacattgcaggctccacgccgttgacggaatacacccagccactggtaccgccatgctccttctcggccaaaccaccgatggcactcacgtacacgccatactggctctgtgacgcattcaccgacaacccacacgccataagcgcgtcgtatgcggtggcacctcgctcgaacgtgaaggtaccacctccagacacgttgccgtaccccgacccgctcacaccgaccgacacagtaacagttgccgactgattgggtgctgcgggagcaccacccgccgtagatggcgtaccgccagatgacgaagaagtcgcaccagatgcgccggacgaacccgctcctgtggatgcgcccgcacccacaggcacatccgatgaagatgcagcgccgccgtttgtatcgtctgcggtgtcggtagcatcgacgtcggcatcgttggcattggggtctgtctcaccattatcgtctgcgacatcgctaccagcgtctaccgcgtcggagtcggcagataagcgcgctgctgctttgctttgttccggcatgtcggcagcaccgggcgaatcaggcacctggaataaaaacgctgatgacagcccaatgacagcaaccgacaaaaccgccacgacaacggcggccaccgttcgcgagcgcctaccgcgctttgacgctgagacacttcgggacacatcgtgcgacccacctgcgtcgacagcagcgtttgccgacgttaccgcgttacgtagcgcattgtctgttgaagtcgcgatgtcacgcaacacttcgccttcgataatggtgctagcaggcaagtttttctcgtgtgggatggcatcctttttttcgtcgaccatgcgcgcgccttcctatttctgttcttcgtcgtctttgcggcgacaacccaacaggaacacgagcgcgccgcccaagcctgccaatccggcaagcaacgtagcaagcgcaaccggattgagctcacgcgtaacacccgtttcgtttccttcattcagcacgcttgccccaacggcagcatc

SEQ ID NO: 3008 - DNA, 15156 bp, synthetic construct
  source 1..15156: mol_type = other DNA
  misc_feature 1..15156: note = Synthetic
tattcttattggaactcagatgatagccaaaggacatgactaccccaatgttactttagtaggtgtattgaatgcggatatcggtttgtctattcctaattttcgttctacggaatttgtctttcaattactcatgcaagtggcaggtcgttctggcagaagagagagggcgggagaagttgttatccaaacatttatgcctgcccattatgtaatcaaatctatccaaaatcataattacgagttatttgcagaatatgaattaaggaatcgtaaaattgtaggatatccgccatataatcgcatgattcaattcggcttggaagcagaagatgaaaaagaagtaaaagatatggtgtataatcttgtgcaatattctcgaaagaacttcaacttaaagcagattaactgtaatatattaggacctgctcctgctataatacgcaaggttcagggaagatttcgttggcaatttgcactattgggaaaagccacgaaaacgattaatgccatagcaagagatataaacaactattttcaaactcaaaaaacaagtagtaaactctaccttcgaattgatgttgacccttatgaaatatattaaaatattgcctataaaatcaggaaaggtgaagtatggaagttaaagcgtttatttttgatttagatggaactttaatggattctgaaattatttgggtatatgcgattcatgaatatcttttagataaaggatttgatgtaagctatgactatgccgttgaccttgtttatggcaattcttgggaatatatttatgaagaattggataaaaaataccctgagttaaagaatgaaatgcccaattttatagaaaaagtatatccctattttaataaacacgcggaaaaaatgcctctggcgataccctcttccatacaactattaaaagaactttcaacaaattatatttgtgctattgtttcaggttcttatcgtagagatgttatagaagccattcacagattaggtatagaggaaaacatatctttatttttagggaaggaagattactatcctggcaaacctcatcctgcaggatatttaaaagcaagtgagatgttaaaagtaaaacctgaacagtgtgtcgtttttgaagattctacggtaggggttaattccgcaaaatcagcaggtatgttctgtgtagctctggcacgacccgaccgccctaaacaggatatttcacttgcagattttgttcttcctgatttaggtcagttttccctggatttactgaagcagaaatgtggagaaaaatgttcagcgatggaataggcttaaagcaaatattatgagattgataatgatagtaagtattaagctcagaacgatagaagtggtcactggaaaataaaacttccctttttcccattcaagatttatatccccgggaagtttccctaatttgaagggcagaaaattggataaccagattattcctccgatgaataggaatataagtccaaaaataaaaaagtattttgcaaggttttccattttaaacctccatcaatacttgtctaaacactttttatatgtctcaagtgttttttgagcggtcttttcccatgtaaaattgttagcgtaaacaattccattttggctcatttcctgtctttttgtattgtcttcacagagataataaattgattcagcaatttgctgaatattataagggtcaaccaatagtgctttatccccaagtatttcgtgaagactaccacaattggaagcaattacaggtgtaccacaactcattgcttcaagaggtggtaatccaaaaccttcataaaaacttagatagataaaaatatctgctccacttataataacgggtaaatctttgtccgagatataccctaatctatgaattcgttctttatactttgatttatttatggattgttcaattgtatccgtcttccagcctgcacgtcctataatgacaaggtcattatgaattttgttagcaatatttgaccatgcttcaatcagagatgggatatttttgcggggttctaatgtgccagcatacaagacatattttgggggaagtttatatttatttttaatcatttctatttgttgttgtgtttggggtttaaagaaatcactcactccaaggtatattacatcaatcttatctttatcaatactgtaatgcttttgtatttcttttccagaaaagaaagagtcggtaataattcgttgagagaattttattgtttcttcgaccctttttttataaaaccattgataatggattggaaaccagtgtggattttctaagaaagcgaggtcatggaccgttgtaatatgaggaacatcccctaatttgtatccataggttgcgggataatggacaatatcaggttggaattctttgaagtacttttttaaaagaaatgattgaaggaatcttgtgatatatctgttatttggtaaatgttttacagttagtttatcagatgatatagataaagactttgaagcaggaagtaatatatgtaacttttcaggaatattaataagaacctttattaattcttccgtatatcttcccgttccacttagattacctatttgaaaaccgtttaataaaatgcgtgtcatattttccccaattctttataaacttcaaaatgagattgagccgtttttatccaactaaatttcgttgcctgtaaaatactatttgaaaccatatcatttagcatttttttatccgatagaacattgagtattgtttccgcgaaactatctatgtcctgaggatttaatgtaataccgttgggtccaacaacttcaggcaaagccccatgattagaaacaattgtcggacaaccacaagccatggcttcaagaggtggtattccaaaaccttcatcaaaactggggaaaacaaataaatctgcagagttatagaaccattttaattcagtatggtcttgtatgtagttcaaataaacaattttatctaaacattctaactgttgcattttgaaaagaatttcatctgcatgaaatccttttttccctaatagaacaagtttatggggtatctgacgatgtatcttttcatagatattaagtaaacctgttatattttttctttcttctatagtgccaacgaatagaatgaaaggaggcgaaatatgataatttttttctatataattttgtgctttttctttgtccaatgggtgaaaaatagtatcgtcaaaacctggatatgcgacagataatttattaggtggaatacctaataatacctctatatcctttttgcttttttcggaacaagtaataatttgggtggctctttgagcagaactcaaaatattgggtttgaataagtttataatttgaggactaacccatttcggatttgttaggaaggataaatcataaatagataaaactgtttttttgttttgaattggcggtaagtaatagttcgtgaaatgaagaacagaattatcttttacaatatagtctatttgtggataattaaagtgcttccaccatttgtatagtatttttacagggacaggaatatgtttgttcctatgtaatttttttactatttcatgagaatctttttgaaatttgtgaatgccaaaagaaattccatttatttgcaaatcattatattctgacaataaatatttaagcgtataatgaacataattgccgatacctgttttttcccctcgtaatggagtgatgtctatggttacggataaattatttaaatcggatgagtcgtgcataaatgtctgcttttgtaatttaatatgtttaagcgataaaatattataatgttgggtgtttatgcaatttaaaatccaaatttcaaataaacattaactttaaaagaaggagtttttcaatgcttattgattttggtgggacaaaagaagaagttattacccgaaaagaatttcctatggcgaaggcaaggaaagttttaaagaacgaagtaattgcaattatcgggtatggagttcaaggaccggcgcagagtttgaatctgcgtgataacggtttcaatgtaattataggtcaggacccaaattttaaatctgattgggaccgcgcagtaaaagatggatggaagcccggtaaaactttatttggtatagaagaagcctgtgaaagaggaacaattattcaattgttagtttccgatgcagcacaaaaagccatctggccaaatgtaaagaaacatttgaaacccggagacgcattgtatttctctcacggtttttctatcgtatataaaaatttaacgaaggtaattccacctgattatgtagatgttattatggttgctccgaaaggttcaggaacctctgtccgtagaaatttcttgagtggtgcaggtattaactccagttatgctgttgctcaagactatacaggtagggcattggaacgctgtttagcacttggtatcggtattggttctggtttcttattcccgacgacattcgaaaacgaagtatacagtgatttgacgggagaaagaggtgttttgatgggagcccttgcaggtattatggaagcccaatatcaggtattgcgtgaaaatggacatacccccagtgaggctttcaatgaaacagtagaagaacttacacaaagcttaatccgtcttgttgatgagaacggaatggattggatgtatcagaattgttcggcaacagcacaacgcggtgctttggactggaaacccaaatttaagaaagcaacacttcctgttttccgtgaattgtataaacgcgtgaaggaaggggcggaaacaaaacgcgtattaaagtcgttaggcaatcccaattataaacaagaattgcagaaagaacttgctgaaatggcaaatagtgaaatgtggcttgcagggaaggcatgtcgtgcgttaagacctaaagagcctgcaagtaagcagattaagtcaaaagttgggacgcaaggaagaaccaattattaattgaatacttgtgtgttgataattatgtccgggaagtgaaacttcccggacttttttgtaatgatgtaattatgaaaaagtcaattattgaaacatatctttgtaatgaacaaggaccaccacagattttacaacctttgttaaaaggtttgagttatttccagaggtggggaatgtgggttcgttcaaagagagcagtatatacacctaaaatttatactgtgagctttggtggtattacggtgggaggggttggaaaaacacctgcggttatagaacgggcagaacaggaacagaaagataacaggaaaaatgtttgtataattagtcggggatatggagctgaaaaatttaaggggattgttgaaggtgttttcaatgaaggtaaggttggtatccgaaaatataattctgaaaaaaatgacttaccacaaaaagaaactatattgccatggaatagagcatataaagttttaggggatgagctttcgttgatattatatcgtttgcatgatattcatgttgttaaagacccaaatcgtgtaagagcggtaaaatgggcagaacgcaaaggatttgatattgtcatacttgacgatgcttatcaatatttaatgttgggtcgtaatgaaaatatattattgataagtgccttaaatccatggggtaatggacttatttttcctgcaggtattttaagagaaccattaagtgctatacatagggcaacggaaatatggataacccattgtgaccagataccaaaagaagggttggagaagttaaaaagatttttgaaagatatgtatcctgagaaaaaaatgcgatgggtatatcataaacccttatattggacaaaaataaattcttcaagccaattccctgtggattacttcagaggtaaggatgtggatgtattttgtgcaataggtagccccaaatcttttttaaatatattggaacagcaacagataaatataaagaatacttatatatatcgagaccatacacctataccaagtaggatattaaagggagagagagtaatcctgactacagagaaaaatcttttaactttggaagaagagcaagcagaggtgtatgctctttgtattggactttctgattacttatgggattaattttgtagatttttattcgctcgtagatattgattaaatctcttatcgcaaattttcctatgtcccacatcatagcattggcggtgcctaacgcaacacctaacctccccgtatcttctatggaaaatcccttatatagaccaactgtaaaaccagcaacaagggcatctccagaccccacaggattgatttcttttatttttggagggagtatgtgaatataggtattattccagcagacaagtgccccttctcgccccatagataaaactacacaggggattttatgctttttgtgtaaatgtttaatagcttctattttcgagtttatatccttcaagtctgtatttaaaaatttggttagttcctctacattgggttttaccatataaggattgcttttaatcccttcggaaaattcatttccataggtatcaagaataactttaatcccctgtctattggctattttaattaaatcccgatatagaaaggatactttggggtcaggaacggttcctgaaagaacaactatcgggatgctatgagaatatataactttattaaatgtttggataaaatcattatattcctgtgaggatattagaggtccgggctcgaaaaaagcagtttgtcttccgtattcttcttcaagaatagttgtgattgtccttgtgggtatttctgtccaaacaggaaaacatttaactttgtcgttttcccgaagcatcttgactacttgtttgcctgtataaccgccgacccataataaagcccctgcttgaaaaccaagtgttactaaaacacgagcaacattgttcccttttccgccggatatttgtgtatatttgttggaacgaactctatcaccgggtttaaatttggggataaagattgttttatcaatgcagggatttggagtaacagtaagaaacatagtctaattatttatgttcatcgtaataccgtgttaatgcacagccggcacatccaattactccgctatcttcacctaaacctgcgggaacgatttcgcatcgttttgccgggacttcaaaggcattattcataaccgtttcgcgaacgggattaaataaaatatctcctgcggctatcattcccccacaaagaatgaccctttccggatttaacatattcacaatactggcaattcccagaccaagccatacggcagtttcattaaaaacttctttggcaagagcatcccctttttctaccgcttgaaaaatcattttccctgtgatagcatgaatattgttgttgcacatttccgtcagaatcgtttttttacctttttcaatttcttcctgtgcggttcgaaccatccccgttacagaggcgtatgcttccagacaaccttttgacccgcaaccacataatctgccatctctctgaactttcaaatgccctaattcacctgctgtcccatcaatcccgcgtaacaactttttgaaaacaacaatccctccacccactccggtgcctaatgtaagcacagcaatacaatcacagccctgaccggcacctaaccagtattcgccgaaacatgccgcattagcatcattttcaatgtaacagggaacatccaatcgtttttgcatttcatcggctaagggaacattgtgccagccggggagattgggtgggctatacacaattcccgtttgccaattcatgggacctggtgcacctataccaacggctaaaatatcttgagtggttataccttccttattcattaattcatgcaccacatttgccatagcatccatgatggctttaggtccttcctgtgtcggagtaggaacacttgtcttaacgataattttcttttcttctgaaacaatggcggattttatgtttgtgccacctaaatcaacaccaacgatatatttactcacagtctatacctcctttgttatgtaaatattcaatggctctggaaagtcgttccaaagttttctcttttcctaataattccataagttcaaagaagcctggacccacggatttccccgtgagtgcaagtcgagtaggatttaccaatgcccctaatttcacattcagttcagcacaaacttcctcaaatgccttttttaatgggtcatgttcccagattgatacagaagatagtttgctctgaatattttttaggtagtttatggcggtttctggtgttttccatagttttgcttctgcttccgtttcataggcatcgaaatctttaaaaaagaagtcggaaaggaaaataatgcgattcagcgtgggcaatttttcctgacagatttgagcaagtttggtcaaccattccttacttttcgaggatgtatcaaaaccatgtttttcaagtataggaatgagtcggtctcggagattttcaacgggtaaattgcgaatatgcaagccattgagccattctaattttttgcggtcaaatcgggcagatgacttgttgattcgttcgattgaaaaatgttcaataagttcaggtatcgtaaaaaactcacgattctcctcttccgaagtccatcctaaaagtgctacataattcaaaatggcttcaggtagataaccgtcatcacgccagtctaatacattagcaccatggagccttttgctatattttcgtccttgttcatcatgaactaatggatgatgagcgtagttaggtaaaggtgcgtctaaagcattaaagagcatgatatgacgaggcgtatttgttagatggtcatcaccgcggataacatgggttattttcatagtaatatcatctacaacaactgcaagatgaaaaacagggtctccattcgcacggagaataataaaatcatcatactgactatttttgaacacgactgtcccttggatgaggtcattgacaaccgtttccccttctggcacacgaaaacggataacataaggagcatcgcctttctcacgaatttgttccggtgttaagtttctacaaaatccggggtagtataggttacctgtttcatctttataagattccagactttctttcgaacagaaacacttatacgctttaccctgttctaaaagttggtatgccatttttttataaagttcttttctctgactttggcgataaggtccgtaattccctttttctggaacatcaccaaacggaggtccctcatcccaatcaatccctaaccatttaaaaccttcgcacataccttgaacatactgttcatcagtccgttctgcatcggtatcctctaaacgcaaaatgaaggttccatgattctttcgggcaaaaagccaattatacaaagccgtttttgatgtccctatatgcaaaaatcctgatggagaaggcgctattcgtgttcgaaccataatatcccttgttagaattcacaatttcgttttattgaataaagaggttttataataccatgaatatctacaatttttcacatagataagaagacataaaaacgaacagtagcaaccaatcaatatttatatcctacccatttttttagagaataatatttagcgaataaattaataatacttttaattcaacccgttttattaaatgggaaagtaaagaggtttaaaaaaataatgcgccccactgggaggcgctacgcttgaccttgacggctacacgcacggagcaaaactccttactatgttaagaggagaaatgctcgctctgctataatcttttataattataccaaaaaaaacttgacatgtcaagtaaaatttagtaaattatttaataaattattgacaactatataaacacttttaaaaaggagacattataatgtctgattcaaatttttatagcccttatgtattaggtcttgatttaggttctaattcaattggttgggctttaataaaactggataatgacgataatccctgtggaattgaaaaagtaggtgtgcgtgtgtttgaagcagggatggaagggcaatatgaaagtggtaaggaagaatcgcgaaacaaaaaacggcgtgatgctcgattggttcgacgacagattgaaagaagagcaagaaggtatcggaggttggcgaatgtattacagcaaataaaacttttacccgaaggaaatttgaatgatagtttagaacgaaaaaatattattgataatttagatgtagaattacgaaagatgtatataaaagaagatttgcctgaatatgagaaaaatcgtttgaaccagatttttttgtattatctgcgatctttggctgttggacaaaaattagaaccttatgcattaggacgagttttgtatcatttaggacaacggcgtggtttcctgagcaatcgaagagggcaaaagaaggatgacgaagagaaaggaaaagttaaagagggtattgcagaaattcgaaaggaaatggcatgtttaggagcaaggacattaggtgaatactttgctaaaattgacccgattgctgaacagaaacgaatacgcggaagatggactgcccgtgatatgtatgaacaggagttttatacaatatgggaccagcaggctcaattttaccccgatatattaaacgatgaaaataaaaagttggtttttaagaccattttctatcaacgacccttaaaatcacaaaaagaaaaaattggtttttgtcaatttgaatgtatcgcccgtggaggacaacgcaatcgtagacgggctccctgggttatacttaaagctcaacgatttcgtttgcttcaaaaggtaaacgacttagaaattaaagaggataaatttaataaaagaccgttgacaggtgaagaacgaaaagtagtgattgattatcttgaaaaaaatggagatacaacttttgcacaactcagaaagattttaagtttgccgaagactgtaaaatttaatttagaagaaggtggtgagaagaaaattccggggaataagacagcaagtgccattcgtaatgtgattggtgaacgatgggataatatgaatgcggaggaacgcgataaattggtggaggacatttactcaattgtaaacaataaagcattagagagaagattaataaagcattggaaatttagcgaggaggaggcacttcaaatttcagaaatgataattgaagatagttattgcaatttatcgcgacaggcaattgataaatttcttcccggattagaagaaggcagacgatatggagaattggtaaaagagatttatggtatggacaatgttcgggatgaattcaaagtagacctgttgccaccgttagaggaagcaccgattggcgaaattcgcaatccaacagtaacacggacattagcggagatgaggaagatcgttaatgaacttgtaaaacgatacgggaaaccaagatttattcgtattgaaagtgcaaaagatttgcgaaatacgaagaaagaacgagaaaaaatatggaaaaataaccgcgatttagaagaaaatcgaaataaaattagacaggaacttataaaccgaggaattccgaatccgacgcgtagtgatatagaaaaatacatgttagccgaagaatgtggctggaaatgtccttacaccgggcgtcctattaatggttttaatgcattatttgggagtgaaccccaatttgatattgaacacatcattccattaagtcgctgtttggatgattcttttaagaataagactctatgctatcatgaagagaatcgaacaaggaaacataataaaacaccttatgaagtgtatgcttttgacgaaagtcggtgggaagcaattttaggacgggttgaaaagtttaattcgcattgtgctgcagagaaattacgacggtttaaattgcatgggaaagcgttggaagattttattgataaattttccagttctcaattaaacgatacgaggtatgcatccagagaagcgtgcatgtattgtggattattgtatggaagtgaatatcgcaagcatatatttgccgttagtggttcagcaacttcagttattcgccgtatgtgggacttgaataagattttaggctctccggaaaagaatcgcgaggaccatcgtcaacatgcgattgatgctattgtaatcgcgataacctctccgtcaatggtaaaacgcatttcggaacaggctgaaaatattcctattaaggaaagaaaaaataaaaattggtggcgatttattgaaccaccgtgggctacactttcaaaagaggcggaagagaaagtgttgagtattattgtttcacatcgtcctgagcggaaagtaagcgggcgacttcatgaggagacgaattacagcccaccgaaaatagatgaaaatggtgaaacagtggtgcatgtaagaaaatcattgagcaatatttccaagggcgaaatagatgatattgttgacccaattgtaagaaaggctgttcaggataaattaattgaattaggtggtgacccgaaaaaggcttttgcagaccctatgaattatccacttatgccaaataagaaaggtcttcaaatccctattaaatctgtccgcgtaaagaaaaaagtgcctgtgttccccgttggagaaaaggaacgagtgagatatgtaacttcagatgaaaatcatcatattgaaatttttgagacgaaagataaaaaggggaggactgtctgggatgcaaatgtggttagtatgttcgaggctatgcagagaaaaaagagaggagaggaaattatccagaggaaattaatacgcgatggaaaagaagttgaggatgcaaaattcttattcagcctgtgtaaaggcgatattgtctttatgaaggatattaaagatgaaagtaaatatgaatattttaaattaataaaaatggacataaattgtgtgcttatgtttcttcctatttacatggcaagaatacctgaaaagaatggtaaaaaagactttacaggtttaacgagaagattaagttcattattatcatcagaagcgaagaaacattcagttaatatattaggagaatctcagatagcccatgattgatcacataatagacttgtccgaagatggaggacggctcaacatagatttagagcgattagcaataatacaaggggaaaaggaaacctttattcctctggcggaaatagccgtggttatcgtttcaaatcctgcggtaagtttgacacaacctgtgttatcaggattgatgaaacatggtgccgtttttattacctgcgatgaaaagcgaatgcctattggtatgatgtatccgttggtggggcatcacttacaaatggaacggttacaatatcaaattgaatcttcattgcctatacggaaaagagcctggcaacaaattatcaaagccaaagttcaggcacagggaagattgttgttcgaactatatggtgatgaccgtggtttaatcccattagcggatagggtgcagtcgggggacccagataatgtggaagggttggcaagcaggaaatactggaattttctatttccagcagagtatgagtttcgtagaaatcctgaagggggtgggattaatgcgttgctgaattatggttatgcggtattgcgaggaattacggcacgagctatcgtaagtgcagggttaaatccatctattggaatacatcatcataatcggtataatcccttctgtctggcggatgatttgatggaaccttatagacctattgttgatttcgctgttgtccagtttatgaaagggaaagatgtctttgttgaactaaataaagatgcaaaacagtttctaatacaaagtttacttaaaaaatataaaatggacgatgaagaacggaatctatttgatattactttccgaacggcagtatcacttgcccaaatgtttgaagggaaaagaaaaacattaatattacctgaaattgtataaattattcgtgtcaattcgtgtaatttgtggttaaaatgccacgaaatcacaaatgaaaaacgaatgggaacataaataaaacatgagcaaaggaaaagataaaaatagaacccttcaaatatcaggatataaaggtatgtggatgattgctatgttcgatttgcctgtggaaacaacagaagatagaagacatgcaacacagtttcgcaatatgttattgagagaaggttatacaatgttacaattctccgtttatggaagatactttcccagtgaagaagcaagtgaaccttataaaaaacgagtgagacaagcaattccaccgcgaggcgaagtccgattactctatattacagataaacagtttgaaaaaatggaaatatttatggcgaagaaaagaaaaaaggcggaagaaccacttactcaattaatgttattttaaaatttttttcaaaaaaactcccatttttcgctatgtttgaggtacttataaatattagattatagcagagcgggcatttccctcaaaacatagcgcacctgcattgaagcgtgcagaagcatgcattatagcagagcgggcatttccctcaaaacatagctagtttgtaaactgcaattggtttattaccattatagcagagcgggcatttccctcaaaacatagcacaaaagttagtgcttgcatatccattcatattatagcagagcgggcatttccctcaaaacatagctccgaaattccttatgtggcagtggagaatattatagcagagcgggcatttccctcaaaacatagcagttcacatctgcaatggtgcggatataccattatagcagagcgggcatttccctcaaaacatagcttttgcattcaaaaacggttgatacggatgattatagcagagcgggcatttccctcaaaacatagccaattatacgaagcaagcactaattaattgattatagcagagcgggcatttccctcaaaacatagcaaaagatgtcgtccctttccccgtttgaaaattatagcagagcgggcatttccctcaaaacatag

SEQ ID NO: 3009 - DNA, 9251 bp, synthetic construct
  source 1..9251: mol_type = other DNA
  misc_feature 1..9251: note = Synthetic
cctaaggtaacattagtagggacggatatatcggtttctgtagaggatggcggaggcgattgggtcataaccactccgtgcgtttcgcctgcccaagtcccctgttcccacgcctgggtgtttaagtgtgaattttgattggatttagttttactatttgattaattttacaagattcaaaaaaattttattgtttgtagaaagttgtttgtttaatagataaaaggaaagtagtaattttttattttttaaaaaagttggttttatgtaaattttttagaggcggatatcgtataatatatataacaacagttgaatagtttatttggtgatgggggcgaaaaggtttcgacggggatggttgaggtgtggaacgcatgccgaggttgaccggttggcctcgttaaaagccggtcgcaaacaactgccaatcaagaattggccctcgctgcctaatattgagcagcgcgtcccgctcgtgattgcttgctaacgggtaggggcgtcaaccagcaagtctgtcctttcgggggttgcggagcccgagaggcagtaacaattccgcatagcggttgcggtgagccagccctgaggcgctccgtaatggcgaatctgtaaaggatgggataagcatgtagttgggccacactgaaacatcttcggacgcgggttcgattcccgccgcctccaccatttttttcatagttaaaaaacttcttattcggttcattttgaggttaaatggggtctcaatgttaaaactaaaaggataagggagaaggtgtttttgtatgggggatgggatgggttaaaataatggaaatgtgttttattttattaagtaaaggctattctacgattatctgtcgaatgttattatgctaatgaaaaatagagcggagcgaaataggagcattactttaacaaatcaagaagtggctaaatataggaaacggttattccgacttgaccgcgtggtatcggctgaagaagtaacgaataagataatttatcaagatttgttccagatgattcatttgttgccggagtcgtttgtagatttgatgtttgtagacccaccgtataatttaagaaaagaattcaattcgaataggttttgtgagatgtcctctgaggaatatgaggtatggcttgaatcgtggctaaacccattaagaaagatattaaaaccgacggcctctgtgtatatttgtggggattggaagtcttcacccgctatttttcgtgtgatgtctaaatattttaaggtccgcaatcgtataacttgggaacgggaaaaggggcgaggttctttgcggaattggaagaattgttcggaggatatttggtttgcgacggtttcgaatgagttctattttaatagcaaggccgttatgttgaagcgaaaggtgatggcaccctatcgggatgaggaaggaaaaccgaaggattggaagacagaaaatgaggggaattatcggcttacatacccctctaatttgtggacggatataacggtgccattctggtctatgcccgagaatacagaccatcctacccagaagccagaaaaacttttggcgaagattattcttgcaagttctcgggaaggtgatttcgtatttgatccgtttgccggagtgggcacgacggcggtagttgcaaagaagttgggaaggcgctactgtggaatagagatagatgagacttattgttgtttagcagagaagcgattggaaatggctgagaaggacaagtccattcaagggtatatagatggctttttttgggaaagaaacacattacgagaccagaaaatatcttaattcgtaatagttgaaatagtattatattctccctgttcttgaaataatagttttaacataaaattaaagaaaagaaaacggtatgggtaattcagagagtgttaaacaaggaatccctttgttgggggatgattttccgactatgaatgtaatgacaacgcagggtaagatggaattgcctaaggcgttcgccggtaagtggttcgttttattcagtcatccagcagattttacgccggtatgtaccacggaatttgtggctttccaaaaaagataggataagttcagggcacttaattgtgagttgataggtttaagtatgaaccaggtttttctcatattaagtgggaggaatggatacgggaaaaattaaatattgagattgaatttccgattatttcggacaatggtgctgttgcggataagttagggttggttcattctggtaaagggataaatacagttcgggctgtttttattgtggatgataaggcaaagatacggcttattatttactatcctcaggaggtgggaaggaatattgatgaagtggttaggatagtttgaggctttgcagattgcggataagtacaaagttgcgatgccggagaactatcctaagaatgaattgattcaggaccgtgtgataatttcttcccctactgatacgaattccgctaaagagagattggctaaggctaaagagggcgggtatgagtgcttcgattggtggttttcccacaagaagttggagaggtgaggcggacgagtcgagcaggtcggacgggttagatggaataattattattcatggtagaagagttttactccccgggattgaaggcggttgagaaaaccatctacatcatctatggcggattctgcggaatggacgccgggcttatgtagttcgcctcgagcaatcattaatgctccttcgacagcggggatgctcgttatgtctgcgatatgtccaacgcctgaataataatgatgggttgattgaccgttcttctcaccataaacatcgatacggaaaacagattggtcaatacctcctttcgaaaaaatccctgcattaaccagcggtaagagcagtttactcatgatttctcgttttttgggtgtattcgtaagtcctaatctaccgagaaatgttgccaatctcgcaatataaggcggatgtaggcccccatgcagggatacatgtttaagcccgggaagatttcgtggaacggataccgactccgcatgtcctgtgatatacaccggcaatttacccataggttcaggaaattctaccacttttcggtctgtccctgtttttatttggacttctttcccatctcgccattgcaaagtataaccactgaagatatgcaaaacatgtttcacattcgcaggtcctatgtcttcacccgaaccccctgcccagttaatctcaattcgttcagatttatccatagaacaataaccttttttagccagaaggtttgttattccgggcgaattacctaatcccgcaattactgttatgcccaattcttttgctttatgatccagggtaatcgcagataggtaggcatcataatcatcgcagatacttacatacgggacttttgcttcaagacatgcatcaataatatcccgttcaaaaatataaaaaggacctataaagcctaaagcgacttcatgttctctaacagcctcaatgatagatgatttatccttcgcatctacaaactttgcgatgaactttcatccgaaatgctctgcaatctgtttggctttatcaagattaatatcagcgacggtgacagatatcacatccgattcttcagcgagaatttcgagtgccacttttgccatgtccccacatccacccaaaacacatactttcataaaaggtctccttttttacctttacataatataaaaccggatggaggcgatgcattattttggtttttaggaagagatagaaaagttggacaattcggatgaaaatggctatttaaaaaatttatgcgccccactgggaggcgcttcgtttcacctaatcggctacacgcacggagcataactccttactatgttaagagagaaatgctcgctctgctataatctgtataaattataacataaaatacttgaaatgtcaagtcaaacatcataaaatgaaaattaattattgaaaaaaaaaatgacccaaaaaaaggaggtcaaaaaaatgagtaaaacagatagtattagctcatatacattaggtattgatttaggttcaaactctattggttgggctatcgttaagttggatgaaaatgacaatccttgtgggattgaaaaggtgggtgtgcgtgtatttgaagcgggcatgaaaggacagtatgaagagggcaaggaagagtcccgaaacaaaaaacgaagagaagcaaggttggttcgccgacaaatagagcgccgtgcaagaagataccgtaagttagccaatttactacaacaaataaaactccttcctcaaggagatcttaacgatagtggggaaagacagaggatattagacgaattggataaagtattacgaacgaaatatattaataaccatctttctcccgaagaaaaaaatcgattacatcaaatatttatttattatttgcgttccttatctgttgaacaaaaattagagccgaatgccttaggtcgtgtcttatatcatttgggtcagaggcgtggatttttaagcaatcgccgaggccagaaaaaggacaatgaagaacaaggtaaagtaaaaaaggggattgcagagattcgagtcgaaatgagtcgattagggactgagactttaggaaaatattttgctcaaattgacactatggatatcaatcagaagaggatacggggcagatgggttgcccgcgatatgtatgaacaagagttttacactatttgggattttcagtctcaattttatccagagttactaacagaggagaagaaaaaacaagtattctttgcaatatttttccaaagacccttaaaatctcaaaaagacaagattggtttttgtcagtttgaatgcatagcgcggggtaaaaagagaaatagacgacgggctccgtgggtcattctcaaagcccaacgatttagactcctacaaaaagtaaatgatttattaattgtagccgataaaaatacaaaaaatcccttgacagatgatgagagaaaattggtgattgaacatctggaaaaaaatggagatactacttttacacagttaagaagcttgttgagattacccgaagaagttaaatttaatttagaagtagccggtgaagaaaaaatccccgggaatagaacagccagtgaaattaggaaagttatcggcgaacactgggacggaatgaattcagaggagaaagataagttagtggaagatatttactccatagtcagcgatagagccttaaagaaacggttaatgagacactggaaattcacagaagaagaagcacaaaaattatcagaaatacccattgaggatggttattgtaatctttcccgtcaagcaattgataagtttctacccggcttacaacaagggagaagatacggcgaactggtaaaagaaatatacggtatggatgcaattcgagagggatttaaagtggacttgttgcctccaattgaagaggcgccgattggcgaaattcgcaatcctacggtacaaaaaaccctctcagaaatgcggaagattgtgaatgagattgtgaaactctacgggaaaccgcgttatatccgcattgaaacgggaaaagatttaagaaatacaaagaaggagcgagagaggttatggaaaaatagtcgtgacatggaaaaggagcgcaagaaaatcaaagataatttgatgaaaaatggtattgccaatcccacccgtgatgacattgagcggtatatgttggctaaagaatgtaggtggatttgtccttatacaggtcgttcaattaaatttaagtcgttatttgaagagtcccaatatgacattgagcatattattccgctcagccgttgccttgatgattcttttaagaataagacactttgttatcacgaagaaaatcggaaccgaaaacataataaaacaccctatgaaacgtactcacaagacgagacccgttggaatgaaatcctggagcgagtaagcaaattcaattcggcgcatgcaaaagaaaaattaaagagatttaatttacatggaaagacactggaagaatttatagataagttttccagttcccaattaaacgacacaagatacgcagcaagagaagcagttattttttgtggcttgctttatggtagtgaatatcgaaagcatgtttttgctgtggcaggacctaccacagcagtaatacggagaatgtggaagttaaataagttattaggtagccctgaaaaaaaccgcgaagaccatagacaacatgctatagatgctattgtcattgcaatcacttctcccgctatgattaagaatatttctgagcaggcagaaaaaattccgaaatcagaacggaaacacgacaggtggtggcgattcatccaaccaccgtgggatacattgtataatgaagcaaaagaaaaaatattaagtatcatagtttctcacaaacccgagcgcaaagtgagcggtagattgcatgaagagacgaactacagtccgccgaaacagggagataacaaagatgaaacagtcgtccatgtgaggaaagcaattgccagtttgtcaaaaggagaagtagaagaaattgtggaccctgtagttcgagaaacggtcaagaagaagttggaggagttaggaaaagagaatccgaaaaaagcatttacagacctgaagaattatcccctaatgccaaatagaaaaggtctccaaattcctatcaaatctgtccgcatcaggaaaaaattaagtgtattccctgtaggcagtaagcatagagtgaggtatgtagcaacggacgaaaatcatcatatcgaaatatttgagactaaggataaaaaaggaagaattatttgggatgcaaatgtcgtcagtatgttcgaagccatgcaaagaaaaagaagaggcgaggaaattattcaacggaagttaatccgtgacgggaaagtagttgaagatgctaaattcctctttagtctctgtaaaggtgatatggtatatatgaaagatagtgaaggtgaatatcaatattataagttggttatagtttctgagtatgcttctggtgcaaaggttatgtttttcttacctcatcatgtggcaaaaataccaaaatcatgggttggtttaacaaaaacttccagtgctttacagaaatctgaagcaaagaagtgttctataaatgtattaggagaaacacatatagcccatgattgagcgtataatagacctttccgaagagggtggtaaactgaatgttgatttagaccgcctggcaataagccaaggcgagaaggaaacctttgttccactatcagagatagcagtggtgattgtttcacaccccgcggtgagtataacccatcctgtgttatcaggattgatgaaacatggagccgtatttattacttgtgatgagaaacgaatgcccgtcgggatgatgtatcctttggtgggtcaccatctccagatggagcgattgcaatatcaaatagaggcttcattacccacccggaaacgggcatggcaacaaattgtaaagtctaaaattcgagctcaaggaagattgttaatggagttatacggcgatgacagaggtttgattccattagcggagcgggtccagtccggagacccggaaaatgtagaagggttagcaagtaggaaatactggagatatctattcccgccggaatttgaatttgtccgaaacccggaagcaggaggaattaatgccttgttaaattatggctatgcaattttgcgagggataacagcccgagccattgtatccgcaggtttaaatccgagtataggaattcaccaccacaatcgttataaccctttctgtttagcagatgacctgatggagccatatagacccattgtagattttgctgtagtgaaatatatggaaggtaaagatgcatttgtagatttaaataaagagacaaaacgatatttaattgagaatctaatgaggcaatataaagtaggggatgaagaaagaagtctgtttgacattacctttcgaacagcggtgtctttatcgcgaatgtttgaagaaaagacgaaatcgcttgttttgccggaaatagaataagaaaattttttatagatggaactatgagtaaaaagaaagaaaaaaataaagtttttgaattgtcagggtataagagtatgtggatgatagctatgtttgacttacctgtcgatacagcagaagaccggagacacgctacacaattccggaacatgcttttaagagagggcttttcaatgttgcaattttctgtgtatggaaggtttttcccgagtgaagagtcgagtgagccctataaaaaaagaattcgacaaggaataccaccccgaggtgaagttagactgctttacataacggacaaacagtttgagaaaatggaaatctacatgtcaaaaaacaaaaagaaagtcgaacaaccttcccagcaattattacttttttaatgaaatgtcctcccttttttgctatgtttgagggatttatgaattttagattatagcagagcgagcattcccttcaaaacatagcatttcttctattaatcttgtggctgtctctattatagcagagcgagcattcccttcaaaacatagcttattaactaacttataaatagaactatttatcatattatctttaactaaaccaactattatattaggaactgttacaatatctttatccattatatcatctaaatattctaataaaatttcattattaactattaaatctcgattatttaaataaacctctttgaatcttttaacaaatctaattgattccaaactaaacctatcaaaatcaactataaataaatccagattatcctttaacgattttaatattttttcaaataaatcattatcatctatcggatcataattttgtgtttcatttacaatatcaattataattggtttaattacatttgtaaaaaagttattaagagtattaaataaatttttacaatcattatatgctttatatattaaaccataatcataagaagtaatagacgtttcgggtatatccactttcttaatatctttagcataataaataggaaacttattttttaactcttctatatccatcttttttaattccacatccatttactttccctaataaattttttaaactccatttttgcttctggtgatgc

SEQ ID NO: 3010 - DNA, 23507 bp, synthetic construct
  source 1..23507: mol_type = other DNA
  misc_feature 1..23507: note = Synthetic
cgtgccgcgcagcacgggaaacacgatctgcctgaactccttcatggtcagccacagcgaattgaccttgttgatcaggccagagcgggcttcttcgtcctcgagattcttgcagatttccgccaggccgaagaggcccatggcaatggcgacgaaatcgaagccatccagcaactgcacctgcccgaaattcagccgcggcgcgccggtatagatatcctggcccaccaggcccagcagcacgccgagcacgatcatcgccagcgccttgacgacggagccggacgccatcgcgatggaggcgataagccccagtaccatcagggaaaaatactcggccgggccgaatttgagcgccacgctcgccagcagcggggccagggtggcgatgatgagcgttgcaacggtgccggcgaagaacgagccgagggcggcggtggccaatgcggtgccggcccgcccttccttggccatgcgatgcccgtccagcgccgtcaccaccgaggatgcttcgcccggcaggttgatgagaatggccgtggtcgagctgccatattgggcgccataaaagatgccggccagcatgatcagcgccgttaccgggtcgagcccaaaggtcatcggcagcaggatggcgatggtggcgaccgggcccaggcccggcaagacgccgatcagcgtgccgaccaacgtgcccacgaagcagtaaaacaggttgttgaggctgagcgcagtggaaaaaccgagggcgagatcactgaataatgtcatgacgaggctcctttcagccgaaccaggaaccgaacatgcggaaggacagccccagcagcacatggaagagcacccaggaggcgaccgccaccgcgagagccagcagcagcccttcgaccagccggaagcgctggctcgccatggccgcgatcaacaccgtgccgaacaccgcaagtggcaggcccaatccatcgaggcagagtgcgaagaacaatgccgcgccgcagaccagggcgacgcgcgaccagacgaacccggacacgccggtttccggtgacgccgtgcggaagccgttgaccaccgacagcaggccgagcaggccaagcattccggtcaacatcagcggaaaatagcccggccccatacgcagcgtcgatcccaggggcaggcggaaggcggcatagccataggtgcccgcgatcagcaggaatatgagacctgccagcacgttcttgtcgcgcagcagcacttcggtccgtgacatagtctctccccttgatgcggtgcccgccaattcaggcctgccgcccggcggccagccggtcggcataggccagagcggccagcatgttcacgtgattgaccttgcccgtaccggcaatatcgaaggccgttccatgatcgaccgaggttcggtcgatcggcaggcccagcgaaacattgaccgccgtatcgaaggccacgagcttgatcgggatgtgcccctggtcgtgatactgcgcgatcaccaggtcgaacgctccctgataggcgcgatgatagaccgtatcggccgagatcggcccgaccacgtcgatatcctccgcctggcagatcgcgacggccggccgcaactgttcgtcatcttcggtgccgaacaggccgttttcgccgcaatggggattgatgcccgccacggcgatgcgtggccttgcatggcccatgcgctgcagatgttcgtgcccggcgcggatggtggcgaccacgcgctcggtgcgcgcccgctcgatggccccgcgcagcgacacatgggtcgagacatggatcaccttgagccgctcggaggccagcagcatgaaggacgatttggctccggtcagcgccgccagcatgccggtgtggccgtcatagtgatggccggccgaattgagcgcttccttgttgatcggtgccgtcacgatgccggctgcgcgcccgtcctgcgccatggcaacggcgcgctcgatatagcggaaactggcctcgccgcaggccgggctcagcacgccgaactgccccggcagcccgtcgacggccacatgctccagccggatcgcgtcaccctcgcccgtctcggacaggccgatggtcacactacaggcagcaagggctcgcgccagcgtatcgcggtcgcccaccaccacatagcgcgcccggtccgccgccggcttctcggccagggccttgacgatcacctcggcgccgacgccggatgggtcgcccatggtgatggcgatgggcgcgcgatatgtgtcggtcatggtcgtctccttgcgcccggttctcccgcatcatccgcaacttgtcaactcgtttccaattttgctggataggtagtgcctatgtcgcaaagtttctaagcatttcaggtgttatcggccaaatttcgcaccgatgcctgacaaaaacttgtaatttctttgcatctgtgatgatgaaaaatcatgaaaaagatcctgatcgtcgccgatgacctcacaggcgccctcgattccgccacggccttcgccgcgcgtggcctcaaaaccctggttctgcgccggccagaggccctgcccgaggccatgcgagccgagcccgatgtcctggccatcgccacgggcacgcgcgaactgccggcaccggaggccgtccggatcgtcgaagccgccatcgctccggtggccgggtgggccgatatcgtgctcaagaaggtcgattcgcggctcaagggccatattgccgatgaggtggccgtcgtggcgcgcctgtgcaaacggcatcaggccgtcattgccccggccattccggaattcggacgcatcgtccgggatggtctgctgaccgggcatggcctggatggcgggatcgacattgccggccgctttgccgcccttgccctcccgctgcgcattccaacggtcgccgcgccggacgacttcacccccctgctggccgatctcgacagcacgctgctggtcggcgcgcgcgggctcgccgcggccctggcccaggcgcagccggagggcggccgcgagatcgcgctggcgccccaggctccgctgctgattgccatcggatcgcgggatccgatcacgctcgcccaggtcgatgcgatacgcggcaagtcgctgatcgtggcggcgccaaatggcaccatcccgccgagcgtatcgccggcccatcccctgctcatccagatgacccagggccatgagcccatcggcagcgccgcggcgacggccctgttctcgaccgcgctcgccgaactggccgatcgcatggcgcccgccaccattttcgcctcgggtggcgaaacggccgatggcctgctcggcatcttcggcgtcaatatgctggaggtggcaggcgagttcctgccgggcattcccatgtctcgcttccgccatcatgggcgcagcctgaccctcgtcaccaaatccggcggcttcggcccgccggaaacgcttgaaattctgctgcggcggatagccggctagagcgccgccggcaccgccacatgcagcgttgccgccgcatggcgcagtccatccatgatcccggcatacagcaccacgccctcggccagcgctgtccggcgccggtgcagggcggcctgccccggcaggcgcaccgcttcgacgcccggccgcggcggattgctgcggcaggcgtcggccaaccagccggtctggcgcaagaaggcgtcggcgccgccgaaggccgccggatcgtagacctgcacggtcatcgccgcattggtgcccttgggcgcatcggcgcgaccgtagccggccaggccctgcgtcaccacctcggcatggagcgccatgccatagcccttctggccatggtccagtccgccggtgggcaacagcgtgccgccatcggccagcaccgccggatcgttcgacgcattgcccgccttgtccatcagccaggcatggtcgagcttgcgcccttcccgcgtcagccgctggctcatattgaccgtggtgatcgaggccgaaatatcgatcaggatcggatcgcccggcgtgggaatgccatgcgccaccggattgggggtatagatgcccttgagcccgccgaatggcgccacctgcgcacccgatgggctcgagctggcaatactgatcatcagcccgcgcgccgtcgcctcgggcagataggcggcgaggcacccgatatggtgactattgccgacgacgacggtcgccgcaccatgcgccagggcccgctcgcaggccagcgccacggcctgagcggtgagccaggcgcccggcaggcgccgtccatcccagcagatggccgcaccgcgatcggacaagacgtccggctgcccgcttttgcccatcacgccatcggcgatgctttgcaggtaccacggcgccagcgccaggccatgggtcgtgtggcccatcaggtccgcctcgaccagatatttgccgatggcacccgccttgtcggcctcgaggccggcggcggtgaaaagctgctcggcaaaatcgaccagcgccgccggcgcgaaacgctccgccgtcatcgtgccgtcctgtcatagacttcgggattgagcgtgcggccaggccgccccccggccagcagttcttccatatcggcaatattcatcaggccgacattctccacggactcggccgtgtcggcgccggtatggggcgtgaaaatggcccgcttctgcgcgaagatcgggtgtgaccagtccggcggctcggttggataggcatcgagcgccaccccgccgagcctgccggcgccgagcgcggcattggccgcatccaggtcgagcacttcaccgcgcgccaggttcagcaggcatgccgtcggcttcatcaatgccagcttttcgcccgtaatcagggcgccgccgccaccgaacacatgcagcgatacatagtccgcctgggccagcacctcgtcgaggctcagcatttcgatgccattggccgccgcgaaagccaggtcgggatagagatcggaggcgatgacccgcatgcccagcccgatggccttgcgcgccagcagcttgccgatattgcccagcccgacaatgcccagcaccttgccggcaatctcggtgcccaccatgcgggtccagctcttgccgacaatgccggcattggcggcgggcaggttgcgagccagggcgaacatcatgcccacggccagttcggccaccgcattggaattggcgccgggcgtattgagcaccggcacgccacgcgcggtgcaggcagcaatatcgatgctatcgacacccacgccatgcttgagcacggccttgagccggggcgcctgggccagcgtttcatcggtgacggcgaccagccccgcgatcaggaaatcgacgcgcaccagatgatcgccgaggccgccatcggcccggtttgtatccacgcagcggatgaaatcccagcccagcgcctcgatccggccgggtacgcgcccatagcgtccaaagccgggcgaggtcgtggcgataacagtcatggtcagtcctggatcaatttgtgcttggcgagaatggcccgtatctgcgcatcctgtgcgtcattgggcagcaaagccggctgccggctggccccgacgctgctgtccatcagatagagcgcgcgcttgaccagcgccggcggatagccgagcgcgtagagatcggtgcgcaactgggtgaaccgggcctgctggcgctccgcctcggcgatatcgccggcattgaaggcccggcagatcgccgcgagcacgtcgggcatcacattgcccaatccggaaatgcagcccttggcgccattctggaacgaccacagtaccagggaatccggccccgaatagacatcgaatccgcccacgtccctcgacacggccagataggcttccagcgtctcctggctgccgccgctatccttgataccggcaatattgccatgcgccgccagcgcgcgggccgtctccggctcgatatggttctgcgtgcgcgccggaatgtcatagagatagaccggcgtcgacaccgcatcggcgatgctggagaaatggcgcaccagcccatcctgcgtgcaggcgatgaaatagggtgtgatgaccgcaatgccgtcgaccccgatgcggtcgaattcacgcgccagcaggagcgtttcgtaggtcgccggcatgccggcattgacgatcaccttggcgcggccgcccacttcgtcgacgatttcctcggtcagcctgaccttttcatcgaaagtcagggcggtgaaatcgccattggtgccggcgcacatgatgttgttgccggcgtccatctgccggcgcgcctgggcgcgcaccgccttgtagtcgatagcctcggcctggtcgaaacaggtgaccagggcaacaaaggtttcacgcgagtccatggaagctccttgccgtcctggtctgttcgagttgaggccctactgggcgttcatgccatacatgccgagttcacggatgatgccttcggccacgccgctgtcgccgcgcgccagggcctcgtagccggccggatcgcgatagtccacgaactcgcccatctcttccatcttggtcaggaattccggatcgttgatggtttcggccagcgcctggaccagcttgtcgcgaacgtcttccggtatgcccttgggcgcaatgatgcccttccaggacgaccaggtgaagtcgatgccgttttcaacggcggtcggcacgtcgggcatgctgcccaaccgctcgcgctccatgatgaacagcgccttgaccgcccccgattccagatgcggacgggcctcggcgggcgtggccgtcacggcgtcgatatggccaccggcacaggccgtcagcgcttcggatgcgccgccgaacggcacattctcgaacgaggtgcccgacgccttggcgaaggcctcgaccgacaggtgattggcgccgccggcacccgaattgccgatcagcaccatgcccggattggccttggcataggtcatgaactcctcgaaggtgctgaaaggcgcatcggcgcaggccagcacgacctgcaggttgcggcccatcagccccaggaaatcgacatcgtcgatcgtgtagctggtggcgccgtaatgcggcagcagcgaaatcggcccctgggcgccggtgcccagcgtatagccgtcggccttggcggccagcgccgagccggtgccgatggccccgcccccgcctgcttcattgcgcaccacgatggtcgatccctccagatgcttctgcatcacgtcggccagcacgcgcaccgacaggtcggtaccgccaccggccgcatagggcacgatgatttcgacgggctgggacggaaagtcctgagccatggccgggccggccagcatcagcgatacccccgccagcagaattgccgacaacttgttcattttcttgttaggcacaggacgctcctcctctgagctctttcgaatttcgtccagcgttatcgacacgaacaaatatcttgtcaaccgttcaagttgaaaagattgcatgtacgcccaaccagcatcgacccaaaaatcagatcataccactgatataacatcatattttccaatttttttctgaacccgagcttgcgtgatgtcacgaacttcgtcgaaatgaccagacaactccttccatgttgacaagtcgataggtcccagcctatctcctgatggcatctgcatgctgtttcccccggagttccccaatgaccgcgagactggacgacaagatcgacctgcgccgcccgcctctcgtgcgttttggcgcgggccagttggccggttttgcggactgggttgccgaacggggcttcaagcgcccctttgtcgtgtccgacagcttcaacgccgcgcgtctggtcgaactgggccttgggtcggtctcggtcttcggcgagttgcgcgccgagcctgacctggcagcattggcggcggcgcgcgcggccatgcaggcggtcggccccgacctcgtcatcggcttcggcggcggcagcgccatggatctggccaagatcctcgccgtgctggccggcaccgaccagcctttcgattccatttccgggctcaaccgggctccggcgcgccgcgtgggcctcgcccagattccgaccacggccggcaccggcagcgaggtcggcacgcgcgctttgatcaccgatccggccacgctcaacaagatatcgaccgaaagcccgcatatgctggccgatattgccatcatcgaccccgtcctgaccgcctccgtacctcccgcggttacggcagcgacgggtgtcgatgcccttgctcactgcgtcgaggcctatactagccgtcgcgcccatccagtggtcgatgcctatgccatcgagggcatccgccttatcggccgctatctcaagcgcgcggtggccgatggcggcgatctcgaagcccgcgccggcctcagcctggccgccttctatggcggcgtgtgcctcgggccggtcaacaccacggccggccacgccatttcctatccgctgggcaccgtgttcggcattccgcacggggtcgccaacgccctggtcttcccccatacgctggccatcaacgccgccgccgttccggaaaaaaccgcggcgatctgcgccgcgctgggcctgcgcagcacctttggcgccgagctgctgcaggaagcgaccggcttctgcgcggcattgggccttgccatgcgcctctccgatcacggcgtgacccaggatgcgctgcccggaatggccgagcaggcccatgccatccggcggctgttggatttcaacccgctcgccctgtcagccggcgatatcgaagcgatctatcgcgccgcctattgagcttgccagctcaacaggcctcggccgtcatggatcgtcagcgcaaggtattgatcgagccatctaaatggtggcgattcgaagtgttcctgttgtaaacagggatgcaattggcgaaaccgggaacgcgagatggagcaagctgagcggcgcagcgccaaacatggcaggcagggaagcggcggggcgcgaatgctgctggccgaccgcgtctaccatgtcatgcacagccgcatcgccaacggctcctatgccgccgaccagcgcctgccctccgaaaacgagctggccaccgaactgagcgtgtcgcgaccggtgctgcgcgccgcgctggagcgcctgcgctcggaggggctgatctattcccgccagggcgcgggcagtttcgtccgccccggcgacgcccagcatggcctgggctattcgcccgtcgaaaccattgccgatatccagcgctgttacgaattccgcctcaccattgagccggacgccgcctattacgcggcgcagcgccgcaatcaggaaatgctggacgagctcagccaggtcctgaccctgctcagcgatgccaccagccagcacagccaccgcgaagacgccgactacgccttccacatggccatcaccgcggcggccaacaatcactactacgaagcctcgatgaaggctttacgcgagcatatccatgtcggcatgcgcctgcatggccgctccctgatgaacgaccgggacaccggcctcgaacatgtgttcaaggaacatgccggcatctatgaggccatccgcgaccgcgacgccgaggccgcccgttcgcggatgcggcaacacatagaaagctcccgcaaccggctgttcgaggaccggctgttcgatctgtcgctgaaataactttcgccttgcccaccgggcacccgcccatggccgcaaaaccaaaaagcccccgccggagcgagggccttatttggtgcgttcagcttttacgagctttcgcttgttaacagccggtccgccttctctgaactgctaggcagtgcagagacattagcggaagtctgccaagcgggcaatatcgccgcgctcgggggaagtgcgtagggcgcgatagttattcctacggaatagatcgcggcgaatggcgcatctattctttcccggtggatgcggacgcgcgggattgccgttccactggcaggggccaccgatcaggtaagcgaaattcggggcatggccacccgcggtcaggcgaatgcagttattcctggttgccgtcggaacatcttccctggactgctgggcggcagcatccacgccatggcgagagccattggcgtggatgccggtgtttgcaaatatgcaggtcatatgggggcaacaatagtgacagacatttctcgttcggcctttgcattcgacatcggcaccaagtcaatcggctcggccgtattgcggctcgatgaccgaggcgagcccatcggcatcatcaacgccgcagtccgcatctatgccgatggccgcgagcccaagtccggcacctcgctggccgaagggcggcggctggcgcgcggcatgtcgcgccgccgcgaccgttacaagcgccgtcgccggacccttctcaataccttgaccgaattcggcctgatgccgcccaccgacgaggcacgcaaggcgctgctggccgaaaccaacgaccggcgcttcggcgcggtggccggcaatgtctatgcgctgcgggcccgcgcgctggacgaaaaactgccgctccatcatctggggcgggccctgttccatctcaaccagcgccgcggcttcaaatccaatcgcaagaccgacaagcgcgacaatgaccagggcaagatcgcctcgggcatttcgcgtcttggccagaagctcgatgaagccggcgcccgaaccctcggcgaattcctgcatcggcagcattccgccggaaaatgggtgcgggtgcgaccctcccgtgttccgagcaaggatgacaaggaggaggacggctacggcttctatcccgagcgcagctttctcgagcgcgaattcgctgcaatctggaaggcgcaggccgccttttatcccgaactgctgaccgaggagcggggcgatcatctgcatcgggtgatgttttttcaacgccccctcaagcgcccgaaggtcggcaaatgcagtttctatccagacgaagaccgcctgcccaaggcgcatccgctgttccaggaattccggctggtcaaggagctcaatgagctggaagtcgtccatcggggcgatcggcgtgaaaaactgacgcttgaacagcgcgatacgctgttcaaccagttgcgcacccagcgctcctctgccttcaccgcgctgcgcaagaccctcaaggcacccacgggcacccgcttcaacaaggagagcgacgcccgcgacaagctcaagggcgacgaagtcgcggccgaaatgagccataaggaccgcttcggccaggcctggatcggcatgccgctggccgagcgctgggcggtgatcgagatgctgctcgacaccgaggatccgcttgaggtcaaggcgtggctcgaagagcattatggctttgccgccgacaggatcgatgccatcgccgccgccaaactgccgcccggctatggccgcctgggcgagacggcattgcgggatatgcttgatgaactgaaaaacggcaccgtcaaggacgatagcgggcgcgacgtggtgctgaccgagcggcaggctatggacaatatctggaaggacaaccccgccctgcagcgtgtcgtggccgatgcgcgcgaacttccgccctatcaggaggttctgggccggcgcatcccgccgggcaccggcaagcctgaggatccttatgacgtgcaaaaggggcgtctgaccaaccccaccgtccatatcgggctcaaccagctcaagcgcgtcgtcaatgccctggtgcgccgccacggccggcccgaccagatcgcgctggaactggcgcgcgagctcaagctcaacgaggaacagaaggccgagaaagaccgggagatcgcgcggaacaccaaggcggcccaggcccggtcggagaagctgcgccagctcgacatcgacgacaacggctataaccgggttctgctcaagctgtgggaagacctcaacctcaggcagccggaaaaccgcgaatgcatctattgcggcaaggcgatcggcatcggcaccctgttttccaatcaggtcgatatcgaccatatcctgccctggtcgaaaaccctcgacgacagccaggccaatcgcatcgtctgccatgtcgaatgcaatcggcaaaagggcaatcacgcgcccgccgaggtgccgcaatggcatgatcgatatgacgacatcctggcgcgggccgaacggctgccccgcaacaaggcctggcgcttcggccgcgaggcgatgaagaaattcaaggacgatgagagcttccttgcccggcaactgaccgacacccagtatctctcgcgcatggcgcatgaatatgtcgccgcgctttatcccgatgaagaaccggacgaatggggggtgttcacgcgccggaaccatgtgcgcgtcattccggggcggatgaccgagatgctgcgccggcaatggggcctcaacgccatcatctccgaccacgaccagaagaaccgcaacgaccaccgccatcatgccatcgacgccatagtcgtcggcgtgaccacccggcgcctgctgcagcgcatcgcgaccgcggccggcgggcgggaggctctggcgctcgaggaaacgatcggcaagatcgagccgccctggccgggtttttacgacgacgtgaaggaagccatcgacaggatcgtggtcagccataagcccgatcacggctccctgcccaaaccgggcgagccagcccggacggccggccaattgcacaatgacaccgcctacggttttaccggcgaggaacggaagggcgtaccaatcatggtgcatcgagtccccttcgccaccctgaccgaaaaggacatcccctcgatccgcgatcggcagctcgccgaggcgctctatggcgcgatagccggcatttccggcaaagccgagctggcggccgcgctcgcccgtttcagcgcgagcggaccctataaaggcatccgccatgtgcgcgtggtcgagccggtgagcgtcatcgccataaaggaccgggacgggacgccctacaagggctacaagggcgatgccaactatcgctacgatgtctgggaactgcccaatggcaaatggacccacgaggtcgtgagcatgttcgacgcccaccggcccgactggcaatccgaaattcgcaacaaaaaccctgccgcccgcaaggtgctgagcctgcaccagaacgacatggtggcctatgagcatccacaggacggctacaccatcggccgggtcgtgaaattcggctcgggcggccagatggcgcttgcgggcaatcgggagggcggagcgctcaagagccgcgacgccgatccggaggatcgcttccgttatttctacaagtcaggcggcgccatgcgggacgcgcgactccgccaggttcgtgtggatgagaccggtcgcgtattcgatccgggcccgcaggaccgcgagagcagaaatgcgcgcaagcagagcgccgccggttaacactaaataaaggaataaatttcgcctccattggcgacggcatagtgttgccgccatggaacggatagtcgacatagaaaccgatggcctgtttctggcggtgcatcgcggattcttgaccgtgagcgaggccggcgaggagcgcgggcgcattgcactcgacgatatcggtggcttgattgtccatgcccatggcaccagctggtccaatagcgtctttacgcgactgagcgagcgcgccgtgcccgtggtcatctgcggcagcaaccatgcgccggtcgcctgcgtgtggccgctggagggacaccacctgcaggcggcgcgcatgcgggcgcagattgcagccacccggccactcggcaagcagatttgggccaggatcgtggccagcaaaatccgcatgcagggcgacgttctggcgcgccgcggtgtcgaggccggcgctttcgacatgctcgcccgcaaggttcgttctggcgaccccggcaatgtggaggcacaggcggcgcggcgatactggaaagccctgttcggtccggacttttcgcgcgatcaagacgcagccggtctcaatggcctgctcaactacggctatgccgtcttgcgcgcgatcgtgtcccgcgccatttgcgcagcggggctgcaccccactatcagcgttttccattccaatcgcggcaacgctttcgccctgtccgacgacctgatggagccctaccgcccgctcgtggacgaattggtccgacgccttgccaccgaaggcgtcaccgaggtcaatcccgacagcaagcggcagttggcggccatgtccacgctcgacctggcgaccggcgacatcgtctcgccgctcgcggtccacgtgcagcgtttcgtccattcggtggcgaccagcttcgaaaccggcgaagcccggctcgccctccccgccggtcttgtgctggccgagcgccgtgaggaggccatcgatgacccgacgggagcttagggccaatgccgaaccgtcccacctcagcggatatcgattcatgtggatgctggtaactttcgacctgcctgtcgagacaccggcccagcgcaaggccgccactcggttccgccacgacctgctcgatcttggctttgaaatgagccagctttccaactatcttcgcttctgcaacggcaaggagcagttcgactcctacgtgcgcaagatcggcgcaagactgccggagtttggcaatgtctacatcttccagttcaccgaccggcaatatgaaaacatcgtgcgattctcggatcaaggccgccgcccagccagaaaaatcccgaccagatggcccttttctagctccgaccgccaatttccagacgccgaagtggccgaaatctcctgtatttacagagatttcggccaacatcgagcctagcagttcagagaagacgggccaacggcaactcatcgcgcatggtgtagccgggcggcagttagcctagcagttcagagaagacgggccaacggcaacagtggcggcctctgccgtgttggccgcggaagcctagcagttcagagaagacgggccaacggcaacctgtggctgttgccgccgcttggctcgcttagcctagcagttcagagaagacgggccaacggcaacggttcgcctgagcgagtgtcgaaccgccttagcctagcagttcagagaagacgggccaacggcaacctggcggcggagttgtcgtttcgcgcaccgagcctagcagttcagagaagacgggccaacggcaactgctcttctgtgcggggatggaataccgaaagcctagcagttcagagaagacgggccaacggcaacaaaccacgctgttccccgaacgccttctggagcctagcagttcagagaagacgggccaacggcaacttcattgcaaagcatgaggtcgagcgtgttagcctagcagttcagagaagacgggccaacggcaacgcagcgccgccatggtattcaaacatctgcagcctagcagttcagagaagacgggccaacggcaacaagccgagaagcggagcggtagtttttgccagcctagcagttcagagaagacgggccaacggcaacttcttgagcttctggtacttgcgcttttggagcctagcagttcagagaagacgggccaacggcaaccgccatcagcacgagtgcgaataccatggcagcctagcagttcagagaagacgggccaacggcaaccttgcagtcggctaatccgtccgcgttgaagcctagcagttcagagaagacgggccaacggcaacaccgttgcgcctagatcatcaccatcctcgagcctagcagttcagagaagacgggccaacggcaaccgcattcgcctccgtgtgctgcctgggcttagcctagcagttcagagaagacgggccaacggcaacagcatcaaccaccgcatcatcctgctgcgcaagcctagcagttcagagaagacgggccaacggcaacgtcgggggacacgttgcgaagggccattctagcctagcagttcagagaagacgggccaacggcaacgtcagcagagtttcggcctttttcgcgttgagcctagcagttcagagaagacgggccaacggcaacagcgaacccatgaccccatccacggatgggagcctagcagttcagagaagacgggccaacggcaacgcgaagctgctcattcagccgctcaacctctagcctagcagttcagagaagacgggccaacggcaacggatgcgccgcgcaatgcccttcaacgactagcctagcagttcagagaagacgggccaacggcaacccctggccggccagaccggagcactggacaagcctagcagttcagagaagacgggccaacggcaacaccatcagcgcgatgatcgccagccccccgagcctagcagttcagagaagacgggccaacggcaacggtgacgtcgagctgatgtcgttcggcaagagcctagcagttcagagaagacgggccaacggcaaccgattggctgatgctcaacgaaagccgcctagcctagcagttcagagaagacgggccaacggcaacgaaaacacggttgttccgacgatcaccgggagcctagcagttcagagaagacgggccaacggcaactgatgatttttggggtcgcgcgtttcacacagcctagcagttcagagaagacgggccaacggcaacagcagaaccttcagggcaccatgcgcgacaagcctagcagttcagagaagacgggccaacggcaactgttcatccaagcctgcattgaggaagcgcgagcctagcagttcagagaagacgggccaacggcaacatgccctgcgacggttgaggcggcaatcatagcctagcagttcagagaagacgggccaacggcaacagatggggtcagccctcgggcggtggcggcagcctagcagttcagagaagacgggccaacggcaactgcgttactttgtaaccggcgagttcggtaagcctagcagttcagagaagacggccaacggcaactccacgagtgccgcagggcgctggccatgagcctagcagttcagagaagacgggccaacggcaacttgcgcgatcagcacctcgcgtagaggtccagcctagcagttctcgagcacgtctctatcctgctactgtctcgcgatagtggcgcaggacggcgtcggcgttgacggcggtacagatcaggtgcgccgggcggttggcccagtcggggtgcccgcccttgcgggctgccggcatctggatggtctggccggcggcgatgccgtcgcagacgacgcagatggggccggagcgtgtttcgaaccagtcgggacgcagtgcgtaggtcacggccagcagatcgtgccccaccacgccggcaagacccatgacctccttgtagaagcgcgcatagtgatccgacatctggcgcagcaattcgccattttctccggcttcggccgacaaagcggcgagataatccccggtgaggatgatgtcatgcgtcacatcgagccccaccaccacgacgggccattcggccgcgaaaatctcgtcggcggcgaccggatcgccatagatattggcttcggctgccggggtgatattgccgctgcggccttcatagccgaaggccccgcccatgatcaccacctgtttggcgaggccggcaatggccctgtcctgccgcagggcgagcgccaggttggtcatccgccccacggcgatgatcgtcacctcgcccggatgggcgcgcaacgtatcgatgatgaactgcgatgccgcgcccggctgcaggccggtctcgtcgaccgccggaatatcgatgtcgcccagcccgttgtggccatgcacgatgaccggttcgggcttgatcttgccatcgagcgtctggccggcgccctggatgactggcgcggcgatatggaagcgctcgcgcaggaacagggcgttgcgcgtcgtggtcgcgatatcggcattgccgacgacggtggtgatgccgagcagttcgatgtcgggcagcttgctcaggtagagcagcgccatggcgtcgtcgatccccggatcggtatcgaagataaccttcatatcgtggtccaatgctgtgtcgcgcccgaccattgtggggcgcggggaggaaggcggggaccaatcacagccggtgatgcccgtcaagcgccgccgagctgattgacatttgccggggcgggaactagctaaatcctgacttcggagttcatatatcttgacggcaatcgacgcgacggatggtttgccgctgcggcagtttctcgagccgctgcaatcggccgaaaacctgcagctctccatcggcgcggatcgcgccgggcatgagcccatcgtcgccctgcctcccgccgtggtcgaggcctggctggccgctgtcagccgcgaccacgcggatatggaggcgcggacgtgcgccgcctacctgatcggggatatcgcctgggccttcggacgcaacctggcggcgctgcacctggccggccccggcctgcccgatatcggggccggttccatcgccgccgcgccgcaatggtatcgctgggaggaggatggtgaaggcggggaggccctgcgcttcaccctgcggctgcttgctgcccccgacgccacccaccgtccgctcgatatcgatggcatccgcgccctggcggtggccgcccatgccccgctgatcgaaaccttgtccggcctgacccggctggggcgcagcgccatgtggcggctggtggccgatgcgctggcggcgggctggctgttggtcggcaagcgcatcggcctgcccgagcacgccatgcgggtggccaatgccatcatcggggcccctggctcgccgctggccaacaagcaaaccgggttcgtcgagatcgtgctgcgcgacgagaccgatcccgagcgcgtcctgggctgcgaatggttccgggcgcggggcggctgctgccgctattacacgacgggggaatcagcaggcgaatattgcaccacctgtgtcctgcgtccgcccgagtcgcgcgaccagcgcctccgcgatcacctcaaggcccggctgcagatgcccgtctgagcaggccgaaggccgcatcatggctcagtgaacaaataacatttttaacgatgctgtgacgtggcgttgttcgtcgtgtaaaagggtttgtatgaatagggggcatcgacatgatcggtcttggcccggacgcgtacgcgtcggggcgaaagccttgcggcggagttggctttgcggtccctatcgacatctgcgctcgccgaactgctggagcttacggcccgcatgctgcattcgcgcggctatgcggccgacctgtttccagcacaatggacggctttgcgttatttttcccgcgccccgatcagccagcgtacggccagcgagctggcgcgtttccagagtctcgccaacggcccggtaagccgcaccgtgcggaccctggtgcagaagggcttgttgaccaaggcggcagagcagcccaaggggcgcgccgagctgctcgagctgaccgatgcgggtcgggcgatgctcgaccaggatccgactttggcggtcgaggaaatcatcagcgggctggaggccagcgagcaggaatgctttgcccgctcgctcgaactcatcgtccggcggctatcggtgctgcgctagcgagccgaacagcgccctgatatcggcgatcagctcgcccatgtcgaacggcttcacatagaccttgcgggcaccccagaccagcgccagcgccgctgctgtggcgatggacaggcccggcccgcccccggtgaccacgaatatctcggctgccggcgatgcggcgcgcatcgactggatgatggcgatgccatcggcgcgcggcatccacagatcggtcaccaccacgtcgaaggcttcccggcccaatgtgtcgatggcctccatgccatcgtcgacctcgacaacagcgaagccggcgtcgctcagcgcgtctcgcagcggccggcgactgtcggcactggcgtcggcaatcagcaccgtgcgcatcggtgcatcaatcatggttcccccagcccaatagccgcgccgcctcgcggcgacaccagaatagatgtgtccatccgttgctcactgagcagtaaaatgtcaagcaaaaggccggcacgaggccggccttttcagtcttttacagaggtttagcgcttggccaggatgttccaggcacccgttacagtcagcgcggccagggccatcttgagaatatcccagacgatgaacggctggatggcgccggcaaaggccgaggcgaccacgttgttctggtcgatccagccggcattgccggacaaggccagcagccagacaaagcccagcaccagcagcaccgcatcggccgcgaccatggcggcaaacagggtcagcggcttgcccgaggcgcccttgtcggcggcatagccgatgatggcggccatcaccaggaacccgagtaggaagccgccggtcgggccgacgagataggccaggccaccgccggtagcgaagaccggcaggccgaaggcgccttcgagcaggtagagcgccacggtggcgacgccgatgcgcaggccgaaagccgccgacagtgccgcgatggcaaagccctgcagcgtcaccggaaccggccataccggcacgttgatcttggcgcagatggtgatgagcagcgtgccgagcacgatggttgcgagattggctgccagcttggcagtatcgcccttgggctggaatacgccgagcagcgtattgggcgtggtcaaagtcacggccatttcataccttccatgcttgtctgaaccggcgtcccctcccgggccgcgctgtcgttcaaatcacgacttctttagtctctcggcaaagtgagtgcaatggcatcacccgttccggccctgtccttcgacagggacttcgacccccagactggccgcgccgtacccgtcgccgacggtatcacccgcatcaccgcgcccaatgccagcccctatacctttaccggcaccaacagttttctgttgggccacgaacgccttgcgctggtcgatccgggcccggacgatccggttcacctcgccgcgctgatcgatggcatcggcggccgccccgtcgatgccatcatgctttcgcatacccaccgcgaccacagcgcatcggcatcacggctggcgcgcgatctgggtgtccccctctggttcggcggcaagcatcgcctgtcgcgcccgctgcgccgattcgagcgcaatcccatccgcaactcctgcgattgggatctggtgcccgaccgcaccctcattgatggcgagaccatcactgcgggcgacgtgcccctcaccgtccacgccacgcccggccattgcgccaatcacctggccttcagcgccggtgacatcctgctcagcggcgatcatgtcatgggctggaattcgaccctcgtctcggtccccgatggctcgatggccgactatttcgcctcgctcgacaaggtcatcgccctgccctgccgccaatacgtgccggcccacggcggccccatcgtcgacggcccggcctatgccgccgctctcaaggcccaccggcagatgcgcaaccagcaggtcgtcgccgccgtcagggcgggtgcccgcaccgtcccggccatcgtggcggcaatctaccccgcccagcccctgcccgtccgccgcgccgcccgcctgaccatcaccgcccatgtggaatatctcgaagggctgggcgcgttgagcgtgtcgcggggattgctggggatgcggatttccgctgatacctaaatcacggtgtcattcccgcgcaggcgggaatccattcttgtcgatccccgcaccttccaaagagtggattcccgcctgcgcgggaatgacgttctggggcattgttcgggatgcgggcccagatgccatgaagacctcatggtgagcttgtcgaaccacgaggtcgagcgagtggaggcctgggtgccacgacctcgtggttcgacaagctcaccatgaggtctactgcaggctactccgcctcctccacccccgcctccaacggcacattggcattgggattgtcgcgcagcagccctgtcaccgcatcgtccagcgccgccaggaattcctcgatccgcgagccgttcgagccgaaatcatgcaaggcgttgagcgaggccgagcgcatgtcgaccgtggaattggtcagcgtcccggtcacccggatcaccacctcctcgcgccagcccggcagcgtcacgatctgggcattgacctgccccggatcgaacccggccgtcggctcgcgcagcaggcggatttcccagccattgccggccaccaaagcccgcaccagcccgaaggtcggcaccagccccagcggataagtgcgcgtttcggcattgggaaaaaccgccgccatggtctcggccgacagcattttcggcgccggcatggcctgcatgcctggctcgaagaccagcggcagcaggctccggtcggtggtggcgatatcggtcacgggcggataggtcagcatcaggctgccataccaggcaaagggcagcaggctcagcgtgccgaacagcagcccggccagtgccctgccccagccctggtcgcccgtctgccacagccgcgccagcgcgatcagcgcggccagcaccgccagcaaggccaccaggcccgccgccagcgccgccaccaggaacaggtcgctggtgatcagccggaaccagtgcagcagcaccgaaataacgacgagcggcaccgcgacgctgcccagccggcgcgccacgattgcccatttcgatgtccggatcagtatgcgcaatgccgccccttcacatgcgccgcgagattacccgcaaggtattgcgcgaatttgaagatttccccgggtggcgatcatttgctcttggtcttgggatcgggcatgccgcacatggagcggatggcgttccactccgccgtggtgaagggcggctcaagcccggtcggccgctgctggctcagcgggtccagcgccgccttgcggtcatcggtcagcgggtgggtgctgagcagcgccagggcacgggcgaattcatcgtccgccccgacccggttgatgagatcggccagcccggccgggttgaaatccatgcgctcggccacatgggcggcaaaggcatcggcctgccgctcggcatcgcgcgagaaacgggcgtcgatgatcgtcgcgccgaggcccgccgccaccgaaatgccggtcatgtcgcccaggatgaagccgatcagcgcgccggtgccggcggtggaaatcaattgctccatgccgtggcgataagccacgtggcccacctcatgagccagcaccccggcaaactcgtcctgcgtctcggcctgttccagcaatgcggaaaagaagaatacctgcccgcccggcagcgcgaaggca

SEQ ID NO: 3011 - DNA, 23363 bp, synthetic construct
  source 1..23363: mol_type = other DNA
  misc_feature 1..23363: note = Synthetic
gaggccgcacgccggccggcaagcggttttatcggcattgagccatttgtcaacggcatggcaaaaatgctggcggctctggctgccgcaccgcaaaaagcggccaatatccgcctttatcataatgacgcgctgcaaatactaaattggttgcccgctaacagccttgccggcattgatattttttaccccgatccatggccgaagaaaaaacactggaaacgccgttttatcaatgccggaacgcttgagcattttgcccgcctgctgcaaagcggcggtattttgcgttttgcctctgatatagacagctatattaaccaggttttgcaacttatgcgcgaccataaggctttttcatgggctgcagaaacagcaaaagactggcaaataccgtataacgcctggcccggcactcgttatgaggccaaagcccggcaggcagggcgcaaacccgcttatctcacttttatccgccgctaattgccgcagacgcattcttttatcgcccttttgtcacctgccctgcccggcgccgcaagcaggcgcggttcaggccgcctttgcctgcccccaccaagactatgcttgcattttgccccaaacagttctatattgggcgaaattcttggtcggacaggcaagagtgggccctaaagcctgctcttttttgttaataaaggcagcgtaatacaggtttttcatagtggcaatacagcataatcagcagcagacagaggcaaattcttttgccgatgagtcgtttttgcagccgccggccggggtggaggcgcgtattattgcccttattgccccggtttgcgaagaggccggctttcgtcttgtgcgggtgcgtctgcttggccttaacggcctgaccttgcaaatcatggccgagcgcggcaacggcacgatgacagttgaagattgtgagcaattaagccgcgatatttcgccgctgcttgatgcggaaaatgtgattgaccaacattataatctggaaatttcctcccccggtattgaccggccgctcatgcgcaaatctgattttgctgcctggtgcggccatttggcaaaaattgccatgcaaaacccggttgcggggcagaagaaatttcgcggcataattatggcagcagaaggggattatctcactttgtgctatgaggcagaggcagccggcgaagttacaataaacctgccttttgccgatattgccgaggccagtctggtgctgacagaggcgcttatccgcgctgtcctgcaacaaggcaaacaaaaagcgcggcaatcagacgcaggcagaacattgaaggcataaagtacagccggttgggcgggtctgcaagagccgccgctattatcaggctgagattgagtaaatttgaggagaatactgatgactgtgagtgcaaacaggcttgagcttttgcaaattgcagatgcagttgcgcgggaaaaatcgataaatcgcgaggttgtccttgccgctatggccgatgccattcaaaaagcggcgcgctcccgctatgggcaggaaaccaatattcgggcgcagataaacgccagaaccggcgatattaaattgcagcgcctgcttgaagtggtggaaaatgtggaatttcccgatagtcagattacgctggcagaggccagggcactgaaggctgatgccgaaatcggcgattttttgactgaagctttgccgccaatggattatggccggattgccgcgcaatcagccaagcaggttattgtgcagaaagtgcgagaagccgagcgcgaccagcaatatgaagaatataaagatcgtttgggcgaaattgtctccggcacagtcaaacgggtggaatatggcaatgttattgtcgatgtcggccgcggtgaaggcattattcgccgtgatgaattgctgccgcatgaggccttccgcaatggcgatcgcgtgcgcgcttatctttatgatgtgcggcgtgagcaaagagggccgcaaattttcctctcgcgctctcacccgcaatttatggcaaaattattcactatggaagtgccggaaatttatgacggcattatcgagataaaatctgtcgcgcgcgaccccggctcccgcgccaaaattgccgttgtctcgcgcgatgcttccattgacccggtgggggcctgtgtcggtatgcgcggcagccgcgtgcaggctgttgttgccgaattgcaaggggaaaaagtggatattatcccatggtcgccagatgctgccagttttattgtcaatgcattgcagccggcagaagtagcgaaagtcgtgcttgacgaagaagcagcgcggattgaggttgtcgtccctgaaagccagttgagcctggctattggccggcgcgggcaaaatgtgcgcctggcttcacagctgaccggctgggatattgatattatgacggaaacggaagaatccgaacgccggcagaaagaatttgccgatcgctcaaaattgtttatggacgctcttgatgccgatgaaatggtggcgcaggttctggcttccgaaggttttgcctctattgaggaaattgcttatattgagccgggagaaattgccgctattgagggctttgacactgatacggcggcagaaatccaggcgcgggcgcgcgattatattgagcaggtcgagaaacagcatgatgaaaagcgccggcaactgggtgtggtcgatgcgctgcgtgagctgcccggcatgacaacggccataatggtggccattggcgaagacggcgttaaaactattgaggattttgccggttatgcggctgatgatctggttggctggcgtgagcgcaagggggcaaaaggcgttaagggcgaaattattgaccataaaggtattttcagtaattttgatgtcagccgccaggaagccgagcaaatgattttggccgcgcgggtcatggccggctggattgatgaaacggcaatgcctgcgtcaatcgatgcggccgaggaagaagcaggcgtgacgacagcagaggcagaggccgctcatgtgagcgcggcaatcgatgcggcaagtgaggcgaaagacggcgcgcaaacggccgataaacataatgcctgatttgctgagcggcttgaaccggcaggatagcaggcgcttcaggccaaaatcctgcgccggttcagcgggctaaagcgggtggattaaggcttaaggcataaaggcgaatctggtggaaacagtgtctcacggcgacaaaaaggcgcggcgcctgaaagaaagacgctgcattatttcgcgccagacagcagcggcagaaaatatgctgcgttttgttgccggcccgcaaggtgtgcttgtcgccgatattaagggcaatttgcctgggcgtggggcgtggcttctggcgcgccgcactatggtggaagaggccgtcaggcgccgggcttttgcctgtgctttgcaaacggcagtggaaacaccgtctgatctggcaggacaagtggataaattgctgctgcgcgctgctttggcaaatctctccttggcacggcgcagcggcaccgttataacaggggcggaaaaagtgaatgcgcttatccgttccggccgcgccgctttattgctacatgccgttgaagcagcggcagatagccggcgcaagcttgctcaggcggttcacgcagcgacagatcagcgcagcgatacagcaaattccgccgcaaaagggcaaggaaatatcaaaatcctgtcccctttcactgtagaagaattgcggctagcctttggcgggcagaatgtgatacatattgctgtcaccaaagatagaggcgcggcaggttttatcaaggcgatagcgcggcttgttgcctatcgtaatgcggcctgagcggcaggcggaagcattgtcaagcaaaacagccagggcaatttcggccggcggataatggccgattgcagcaaatgcaaaaagcggaatgaaaattgcggaaaatatggcataagccatgatagggaagcggaatgaccgataaagagactgaagataatgcacgacagaaaaaaacattgacgctcaagcgcagtgttgaacacagcacggtcaaacaaaatttcagccacggccgcagcaaggctgttgtggtggaaacgaaacgccgcaaaattacccgcccgggtgaaaagcctgaaaccctgcttgccggccggcccggcggtcaggcggcaaaaccggcggccgccattgccagaccgcatgtggctgtgcgggcaaaggcggcaaaaaccggtgatgaagcaacaggcggccggccggccttcaaaagcggcacgctctcttctactgaaatgcaggcccggcggcgggcgctggaagaggcgaaaatccgttcagatcaggagcagatccagcgggaggaagaagccagacgccgcgctattatcgaaacggagcgggcagcagcccgacaggaaaggctgaaacagcagacagaagcagaaagtgagttactgcgccgcaaacaggaacgcgccgataaaagcggtaatattaccggtggccatggaagccgtgagacaatggagaggcccggaggaggcgggcgggccggcggcagaccggcggcgggaagcaccgcagctcagccggacagcgctccgctgccggaaaaagcacgccgccccgcttatgggcatcatattcgctctaaaaatgacgatgatgaggggaacagcgccggtgcgcgccgcacggcggcggccaggccggaactgcgccgtccgtcaccggttaagggggcggaagagcgccgccgcggcaaattgaccctgactacggtgcttaatgatgatggcgatgctgtccgcggccgttccatggcggccatgcgccgccggcaggaaaaattcaaacgcgcgcaaatggaaaccgtgcgggaaaaaattgcccgcgaggttattgtgccggaaactatcactcttcaggagctggcgcagcgtatggccgagcgctcggttgatgttatcaaattcctgatgaaacaggggcagatgatgaagcccggcgatgtcattgacggcgatatggcgcagcttattactgaggaattcggccatacagtgaaacgcgttgccgaatctgatgtggaaacggggatttttgatattcccgataatgccggcaaaatgcagccgcgcgcgccggttgtaactgttatgggacatgttgatcacggcaaaacttccttgctggacgccttgcgccgcgccaatgtggtggccaatgaggccggcggcataacccagcatattggcgcttatcaggtagagcgtgacggtcataaaattacttttatcgacacgccggggcacgctgcttttaccgccatgcgcgcccgcggcgcccaggcgaccgatattgccgtgctggttgtggcggctgatgacagtgttatgccgcagacaatagaatcaatcaatcatgccaaagcggctaatgtgccgatcattgtggcgattaacaaaatcgacaagccggcggctgatccgcagaaagtgcggacggaattgctgcagcatggtgtttttgttgagagcctgggcggcgaagtgctggaagttgaggtttcggccaaaaccgggcaaaatctggataaattgctggaagctttattactacaggccgaaatgctgaatttgcgggctgaggcagatcgttctgccgaaggtgtggtgattgaagccaagctggatcgcggccgcggcccggtagcaacagtgctggtgcaaaaaggcacattgcgccccggcacaattattgtcgccggtgatgaatgggggcgcgtgcgcgctttaatcaatgagcatggcgaccatatgaaggaagccgggccttctaccccggcagaaattctgggtatgcagggcacgccgcaggccggtgaccgtttcgccattgtcgccaatgaagccaaagcgcgcgaaatttcagaatatcggcaacgcctgtcgcatgaaaaggcgatagcgcgggcggcaggctcacgcggctcgctggagcaaatgatgaatcgcctgcaaagcgatggcgccagggaatttccgctgcttatcaaggccgatgtgcaaggctcggctgaagctattattgcctcgctggaaaaactgggcaatgatgaagtgcgcgcccgcattattcatgccggcgccggcggcataactgaaagcgatgtggcgctggccacggcttctgacgcagcgattatcggctttaatgtccgcgccaatccgcaggcgcgggaagctgcggccaatcagggcatagaaattcgctattataatattatttacgatctggtcgatgatgttaaggccgctatgtccggcatgttgtcgccggagcggcgggaaacctttatcggcaatgccgaaatattggaagtatttgatatttccaaaatcggcaaagtggcaggttgccgcgtgaccgagggcaaggtggaacgcggtgccggggtacgccttatccgcgataatgtggttatccatgaaggcaagctgaaaacactgaagcgctttaaagatgaagtggcggaagttcctgccggtcaggagtgcggtatggcttttgaaaactatactgatatgcgcaccggtgatgtgattgaagccttccgcgttgagcatattaaccgttcgctttaagccccggcgaggcagtttgccggcatgctgccgcccaataggcggagcctgccggctgggttagcggcgtgggagtgtgcccgggcggcaaatagaaaagcggcatggccgggcataattggcggcagtcggttgcgctgctttggcggcagttgaaatcgctccgggttaaagctgttattcttgccggccccgggataaacagggataaaatatgaagcagcataaagagccgtcacaaaggcagttgcgcatgggagaagaaattcgccatgcccttgctcttctcctgcaaaggggcgatttgcgcgaccctttattggccagggcaatgatttcggttgccgaagtgcgtatgtcgccggatttaaagctggctacctgttttattgcgccgctggattctgctaatcctcatgctcctgcgcgagccgatattattgcggcgctaaaccgccgggcaaaatatattcgcggccaaatagccggcgctttgcgcggcttgagatatatgccggaattccgcttccttgccgatacaagttttgacaattttgccaaaattgatgctctgctgcgctcacccgctgtcgcgcgtgatttgcagcatgaagatgacgccgaagacgcctgaagcatctgtgaaaactccacaagcgcctttccctttcagtccaatatcctctcagagcaggtatgaaaatgagattttttttcgcttctatcgcattattatctgcctttttcgctatttcctctgctcaagcagaggtggttataacctgcgacattggcactttcagaatatccgctgataatttaactttagaagacggacatctttctgcaaaaggccgtttatatcttaatctcagaggaaataataacagtcagatcctgataggcaacaaaaatgacagttcaaacgctcttgatattgtatgggagggaaacggtaatattttaaagacaaaattcgggaatataattctttcacccgcgaaagatagtccgcgtgtagatattcaatttcctgatataaattttacagacttttataatggcaataaactattaaatcccgatggcccattaaaacagcaaggctgtattcggcaataaataatacaaaaccaggttacacaatatggcaagacacagcaaaagaaaaggccgcccggtggcaggctgggttattctggataaaccgaaaagcatggggtcgacagaggccgtggccaaagtgaaatggctctataatgccgacaaagccggccatgccggcacattagacccgctggcttccggcctgttgccaatagcgctgggggaagccaccaaaactgtgccttatgtaatggaaggcaccaaagtctaccgctttaccgtggcctggggggaagaacgcgcgactgatgatctggaaggggaaattacccataaatccgataagcggccgaatgaggccgatattctggcgctactgcctaaatataccggtattattctgcaaacgccgccgcaattttcagccataaaaatcggcggtgaacgcgcttatgatattgcccgcaatggcgaagccgtggccattccgccgcgcgaggtggaaattgatgtgctggatttgatggaaatcacgccggaaggccatgccgtatttgaagtggaatgcggcaaaggcacttatgtgcgctctctggcgcgcgatatggggcgcgatatgggctgctacggccatgtcgtagatctgcgccggattgaagtagcgcccttttctcaggaagattttgtcagcctggaggctttggaacaggcttcaccgcgagcgcaggcgcaaaagcggctggaggcagaagcggccgcgcgcgcggcagaagctgcggcagcggaagcggcaaaaaccggcggcaaaaaccgggctgagcggccgcgcctgccggcggctgagctgcaaaggctggatttttctcctctggacgctttattgatagagacaggcgcggcgctggaatgcctggcgcaatatccgatagaagaggcgcaggcagtgcgggtgcgcagcggcaacccgattatcctgcgcggcagcaaagtaccgctcgatgaaagcgaggcctgcgtaacgcataaaggcaaagtgctggcgctgggagcgatagagcaaggcaccttccaccccaaacgcgtatttaccgcctgatcggcagtatttttatagtaaaagggagtttttatgcacctatttttcttataaaaacaggaaaaagtggcaggcaacctgataatgagcacagagtcaaaaatccctccctctcttattaaattcaccgcagaagaaatagctgcttgctaccatagccacagaatcattggccagcaaataaagcaatccaacccacctgccctgcttttgtttattctgaatattttaaaacaggcacccgcagaaacctgaccgaatgccttaccctttttctaaactatgtaaataataaaaatccgcctgctccattcgctttatttggccgtctcatttttactatagctgaagattcagaagaattcagagagcgaattcaaaccaagttgaaggagattggcctcttttaccaaggcgaaggaattataaccccattagaattaccatctttaagcgttcaatattttcttaatgcactaaaaaatgattggatatttagctattggcaaagaattttctcgtttggagcgtaacattcataccgattatttaagtgcggccttgaatgctgctaccatgctagaggcaagctgtaaattttacttaggagaaaatcactatcatcaaaaagatacccttaaggcgttaactgaaaaaacgctaaaagctataaattgcaatatgttggaaagtagtgggaatctaatcaaaggcctgtcctgcctttgcgcagctatagaaatatttagaaacaaatactctgccgcccacggaaagagtcaaactgagcagcgaaacattgccaatatcatcactcaagctgaagcgctattatatatacaaacttcaaataacatctgccaatatattctctccaagaaattagataaataaaaatatactggtaataaaaaaagcggttcccggaggaaccgccttatttggtgccatcaggcttgttaacgacccgaccgcattttctgattagctattcagctatgcccctttttatagcgccggctcttgcctgtcaataaataaaattaagtcttgtgcttttattctcacctttataaaaattaccaatctgcattgtctggagttttgtcgtggcacctgtttccgattataaaaatacggtttttgcttttgatattggcacgaattccctcggctggtgtgtattgagcggggaaagagatgctgacggcctgttaatccccaatcgcattatcgatattggcgtgcgcattttctcagacgggcgcgatccgcaatccggcgcttccctcgctgtcgcccagcgggaggcgcgcggggcgcggcgcatgcgtgaccgctatcttaaacgccggcagcaattattggaacgcttgacggaatacggcctcatgccggctgatgaagcggggcgtaaggttttgttgcgtgaaacctctgaccgggggcaaaataccggcagcaatgatacggaaaaaaccgacccttataatttacgcgcccgggcgctgagcgaaaagctgccgctgcaccatttagggcgcgccctcttccaccttaatcagcggcgcggctttaagtcgaaccgcaaaaccgaccgccgcgataatgataaaggcaaaatcgccatgggggtggaagaattgcaggcgcaactgcatttgagcaagacccctaccctcggcacctggctggcgcagcgctataatcaaggcaaagtcgtccgtatccgccaggattctgaggcttttaccggtgagaaacaggaaaattatctcttttatccggaacgatcgatgctggaagacgaatttgcagcaatctggcaggcgcaggcggaattttacccggaagaactgacggaaagccgcaaaaaacagctttttgatgctattttttatcagcgacagctaaaagagccgaaaatcggcaaatgcgcctttaaccctgaggaagagcggctgccgaaagcgcacccgctctttcaggaattccgcctctataaggaagtgaatgagctgaccattgaagcagccggtaaggcatcagggcagaagctcagcaaagagcagcgcgatacgctgatagatattctgcgaccgcaaaagaaaatggcctttagcgccattcgcaaaagcctgaaactgcacggcaccacctttaagaaggagaaaaatgcccgtgaggggctggcgggtgatgaaatttatgccgaaatgaaggataaaagccgttttggcaaccaatgggcggattttgcgcgcgaaaagcaatgggacattatccaaaagctgcgtgatgaagaaaacccggaaaagctcaataagtggctgacagagcaattccctaatctcagcgccgaacagcgcgataaaatcgccaatgccaaattgccggaaggctatggtcgactggggcgcaccgccctctcccatatgctggaagaaatgaaaactgatgtcattccggaagcggaagcggcaagacgctgcggctatgaccatgctttattgggacgcgaccgtgaagagctggatactctgccgaaatatcagcaagtgcccaatgtggcgcgctctatcccgcccggcgaaggcgggaaagccgtagccgaaaacgacccggattatgaccggatcatggggcggataaccaatccgactgtccatattgcccttaaccagttgcgccgtgtcgttaatgcgctgataaagaaacacggcaagccgcgggaaatggcggtcgagctggcgcgcgatttgcagctttctgacgaagaaaagaagaaagtgaataaaagcattgctgacaataccaaagaggcgattgcgcgctccgataagctcgtggaaataggcatagaagataatggctataatcgccaattactgaaactgtgggaagagctgaacgaaaacccgcaagatcgctgttgcccctatagcggcaaaccgattagccttaccaccctgctttcttctgatgtcgatattgaccatattttgccattctcacgcactctggacgacagcaatgctaataaaattgtctgcctgaaggaatataaccggcaaaagggcaatctctcgccggcggaagccgcaaaccgccttgacggctgggattatgaagccatgctggctcgcgcgcaaaacctgcctaaaaataagcgctggcgctttgccaaagatgcgatggagcgttttgaacaggaagataattggctggcgcggcaattaaccgatacccaatatctcagccgcctggcgcgcgaatatctctcagctctttacccgggggaagaagccgatgaacagggtgaattgcgcatgcgttatcatattcgcacgattcccggcaaattgacggaacttttccgccgtaattggggcttgaatgatattctgcatgaccgaacggcagccaatgatacggccaagccgaaaaaccggcaggatcaccgccaccatgctattgatgccgcggttatcggcattaccacccgttcgcagctcaagcgtatatccacagcttcagggcaaatggaagcgcaggatttggagaattttgtcaaaagttcggtgcgcgatacgccgccctggccggatttgcggcgcgatttgcagatagcggttgacggcattattgtcagccataaagccgatcacggcactttgccgaaagccaaagacaataaagccggcaaaggcaaaaccgcagccaaattgatgaaagagaccgcctatggcttgccgatcgacgataaaggcgagcgcttgaaagatgcaaaaggcaatgagctggttgtctggcgggtgccgctgcgctcactcaaggccaagaatctggagaatattcgcgattcacatttggccaatgcgctaaaagagcatatttataccgaggcaagggagctgaaagacggcaaaaattttgagcaggctttattaagctttgcccaaacgcataaagattataaaggcattcgccatattcgcctgattggcgcgcacaacaccattcctatccgtaatgctgccggcaaagcctataaaggctattggaatgacggcaattaccgttatgatgtctggcagacattggacggcaaatggaaacaggaagttatttccatgtatgacgcccatcagccctcttatcaatcgccttttcatcaggcaaatccaacggccaaaaaagtgctcagcctgcagcaaaatgacatggtggcctataataaccccgaaaccggcaagcgtattattgcccgtgtagtgaaattcggcactaatgggcaaattgttttcgctccacataatgaagccaatgtcgaccaacgcgatagagataaaacaaacccgtttaaatattttatcaaaatggccggtgccttaaaagaatggaagctgcgacaaatccggattgatgaaatcggtcagatttttgacccgcaacagcagacaggcgcttaagcgcgcgctctgccccctttcattccattttctttttaccgccttcgcgcctaatcggcgcggaggcgtttttgttaaccactatataatttttttatcatttaaataaactcgaagaaggcggatctccgtcttcttcgaacagcgttaattagagttgataatgtgtatctatggatagaattgttgatataagcactgacggcctgcatcttggcatttaccgcggttttctgacagttgccaaagacaaagaagaagtggggcgtattgcccttgatgatataggcgcacttatcgcccatgcccacggtcttacttggtcgcataatgtttttatccgcctggcggaaaataaagtgccggtcgttttatgcgcccagaatcatgcccccattgcgataatctggccgttggaaggccattatcatcaggccaagcgcatgcaggcgcaggcggaagcccccctgcccttgaaaaagcagctttggaagcaaattatcacggccaaagtcactatgcaggcccggcttattgaagcgctggacaaaacaaccaaaagccagagccataaatcccttaccatgctgacgcgccgggtgcgctccggcgattcccaaaatatagaagcgcaggcggcgcgcaaatattggccgcttttattcggcagcgattttcgccgcgatcgcaatggcgacagcaccaatagcctgctcaattacggctatactattttgcgctctattgtctcgcgcgctttatgcgcttccggcctgcacccgactttaggcctgtttcattccaataattacaatgcctttgccctggctgacgatatgatggagcctttccgcccttatgtcgacgccattgtgcataatctgatcaaggtcggcaaaacagaaatcaatactgagacaaaacagatacttacctcgctttctacttttgacctggaggggatagagggcgtctctccgctttttatacatattaaccgttttacccattctctggcgaccagttttgacaccggccaggccaaacttgtgtttccgctgatgcccagcaatagcgaattacgccggcttggctgcgagggcaccgaagctgccgccctgccggagcataatgacagagacggagcctttgccctgccggcaaccggcacaataatggaatagaaaatgacagcctatcttaaacgcgcaaactcagaacccagacatttaagcggatatagaattatgtggatattagtcacttttgaccttccggtagaaacgaaaaagcaacgccataatgcaacaaaattccggcagaaactgcttgatattggctttgaaatgagtcagctttctaattatatgcgattctgcaatggcaaagagcagtttgagtcttatatcaaaaagattgaggcatttttgccggaaaagggccgtgtctatgtttttcagtttaccgaccgacaatatgaaaacattatccgcttttccgatcaatcacgccaggcagcacagagaaacccgaatcagttggcgctattttagcttttctccgcttttttatgaaaaaagaccccgggtaaattattgcaaaaacaacaacttacccggggccaaagtatagctaatcagaaaatgcggtcaagccgcaactgtttatttccctcatatatctgcccttgcagtatagctaatcagaaaatgcggtcaagccgcaactatgcaaccccattataaagcatctgctttagtatagctaatcagaaaatgcggtcaagccgcaactattggtcggccgaagaattcgtttcaataagtatagctaatcagaaaatgcggtcaagccgcaactgatgtcgtgccggtagtgagtaataaaagagtatagctaatcagaaaatgcggtcaagccgcaacaaagcccgctctcatcaaacacatgccgccagtatagctaatcagaaaatgcggtcaagccgcaactgatttatcgctgtattttccttctgccgaagtatagctaatcagaaaatgcggtcaagccgcaacaagagtagtcctcaaattcgccgtcagcgaagtatagctaatcagaaaatgcggtcaagccgcaacacctgctggcttagccagtgaagcattgggagtatagctaatcagaaaatgcggtcaagccgcaacttcgcatgaagtattgcaggatacggtcggagtatagctaatcagaaaatgcggtcaagccgcaacacaaaaataacggttgacagccggacgattagtatagctaatcagaaaatgcggtcaagccgcaacagatgccaaatgggattgcgatgctattgcagtatagctaatcagaaaatgcggtcaagccgcaacccaaatttcctccaaccaatcttttgcagcagtatagctaatcagaaaatgcggtcaagccgcaacaaaaaaatggcggcgccgcttttgcaccggagtatagctaatcagaaaatgcggtcaagccgcaaccacaggcagctacaccaggtagctatattaagtatagctaatcagaaaatgcggtcaagccgcaacaatatttaactcccccaatgcttcactggcagtatagctaatcagaaaatgcggtcaagccgcaaccgccagaccgcgcgccccgtccaccgcgcgagtatagctaatcagaaaatgcggtcaagccgcaacagatacatactctattgcttttggccgataagtatagctaatcagaaaatgcggtcaagccgcaactaatcataagaaatgtcaatttccgaaaatagtatagctaatcagaaaatgcggtcaagccgcaacgtgagactaaaaccccccttatcttcccggagtatagctaatcagaaaatgcggtcaagccgcaactcctgcaccgtattatttccactatcccgaagtatagctaatcagaaaatgcggtcaagccgcaactaatagccgttatcgccaaaaatcaaatcaagtatagctaatcagaaaatgcggtcaagccgcaactcgtccaccggccgacagcatctttataggagtatagctaatcagaaaatgcggtcaagccgcaactcacatttctgtgaaatatacgccttaccaagtatagctaatcagaaaatgcggtcaagccgcaactcttcttgggttgacttgccttcaggtcgtagtatagctaatcagaaaatgcggtcaagccgcaacattaaagccgaagctaacgatatgccttgtagtatagctaatcagaaaatgcggtcaagccgcaacacaaacattacaccgccgccttgcttgccaagtatagctaatcagaaaatgcggtcaagccgcaacagagatgaggcagttaaacttttatttcacagtatagctaatcagaaaatgcggtcaagccgcaacagtagtaaacgattgaccgcttacaccatcagtatagctaatcagaaaatgcggtcaagccgcaacctaatgaccgaaattgtgggtgtggatagcagtatagctaatcagaaaatgcggtcaagccgcaactaaatatgtcgtatgtggctatataactggagtatagctaatcagaaaatgcggtcaagccgcaacaattcggcacataaccagtaatatccatgcagtatagctaatcagaaaatgcggtcaagccgcaacatgaaatggcctataaggatggtgttaggaagtatagctaatcagaaaatgcggtcaagccgcaaccggtctgccaatgggcaattattatccaatagtatagctaatcagaaaatgcggtcaagccgcaactggcatgctgtcattgattgcgcgtcctgtagtatagctaatcagaaaatgcggtcaagccgcaactgtagtatcaaagggcttgatttgccgtttagtatagctaatcagaaaatgcggtcaagccgcaactgcccccagcgttttggccaaggcaacaaaagtatagctaatcagaaaatgcggtcaagccgcaaccctcccgcatcgacagagttttttccaaaaagtatagctaatcagaaaatgcggtcaagccgcaacccttcaaagactgtgtcgctttcataaaagagtatagctaatcagaaaatgcggtcaagccgcaactcctgaacttgaagattttgacagtcgtgaagtatagctaatcagaaaatgcggtcaagccgcaacgccccggtgcctgttttgggggcaccaaaaagtatagctaatcagaaaatgcggtcaagccgcaacggtagggacttgactatccttgagtgctgaagtatagctaatcagaaaatgcggtcaagccgcaaccctgtctgggctctgcacgattgaggaaggagtatagctaatcagaaaatgcggtcaagccgcaactaggccaagccgctcattagcggcggcagcagtatagctaatcagaaaatgcggtcaagccgcaacgttgtgtccgctattgtgtctgtattatcgagtatagctaatcagaaaatgcggtcaagccgcaacgcagtatcacttacgataattcctttatctagtatagctaatcagaaaatgcggtcaagccgcaaccacttttgacgctggcaggctgccatattcagtatagctaatcagaaaatgcggtcaagccgcaacgtggtgacaggagagataggatatggaaacagtatagctaatcagaaaatgcggtcaagccgcaacgtatgggggcgtgggcgcatagcacagagcagtatagctaatcagaaaatgcggtcaagccgcaacctaataaagttaagcaacagcttggcattgagtatagctaatcagaaaatgcggtcaagccgcaacctctccctatcaaggagagtatctcctccgagtatagctaatcagaaaatgcggtcaagccgcaacaaccccgaagccatgcagacaatgggagaaagtatagctaatcagaaaatgcggtcaagccgcaacagacaaaggcacaggcgcttattcactctaagtatagctaatcagaaaatgcggtcaagccgcaacggcacagcggccgcgtcctgcataagctcaagtatagctaatcagaaaatgcggtcaagccgcaacgccgccagcgccggataagccgtccgcctgagtatagctaatcagaaaatgcggtcaagccgcaacgcgccaatgattatagagaggcgacagagcagtatagctaatcagaaaatgcggtcaagccgcaactcctcgtccatatctcgcttttcgtccaatagtatagctaatcagaaaatgcggtcaagccgcaacagaaaagcactggaaaagcactggaaaaggagtatagctaatcagaaaatgcggtcaagccgcaaccggaagcaatcactgtttttttaggcggagagtatagctaatcagaaaatgcggtcaagccgcaaccaatgaatacatgcttaggtacgcatatgcagtatagctaatcagaaaatgcggtcaagccgcaactgtggcggctgcattaactgccgcctccggagtatagctaatcagaaaatgcggtcaagccgcaactaatgagccagtcttaccagtcttatcgccagtatagctaatcagaaaatgcggtcaagccgcaacttccggccagcatcacggaagtgccagatgagtatagctaatcagaaaatgcggtcaagccgcaactccagagtcgcgcttggaattcataagcgaaatatagctaatcagaaaccgaaggggcgcgcggagcgtgcgaaaggtggtcagaccgcaaccaaccaccccgccaggcaattattgctgcatcgcagcatagccagtcaaaaaatgcggccacacccataccaccaggagacggaatctatcatggggggaaaacatagccagtcaaaaaatgcggtcaggcccgcgcctatgtttttcgtttatttttattgcctctctcatcgcgctggaaataggcggctaaagccaataaaagcagagcgccgataccgtcagccctccagcagggctttgccttcttctccgtagccacgaataatcagaaatatcccgccgcccaaaacagccaatatcagagccaggaaaaatataacccagattatatcacggataaaattatatttatgtactttcatttgcccgttaatcatgctgtcacgggcggcattatcggcgcgttgcccttcttccgccatggctggcagacgctctggagaatccggtattatttgcgcatagccgtgcagcatttccggcggcggcaaaggcgaaaaaaccggctcatttcaattttttgcagagccgttacaatctttttctgcttttctttcggcagtggagaaatgattttcgacaattcttccggtattttatgggcagtcacacgctcaggcagagttttatcgcgcttttccacgaccttgccccgcccgattacctaaagcccgatataaatggcggccgacattttcccatgctttctcaacactgggggactgaggatagcgcatggttttcaacgggcttatggcaagactatcatcaattttggccgtattttcccagaaatccccattctcccggccctcaacccggcgaaatacagcagaaaaaatatggcgcataaaaccactccctgtctttaaacccaattacagctatatgttttttatcgcgctatggcaagagcaaaacatgtataaacagcaaaacaataacccacacactgctttggcaagcgccggcataaagcctaaaaccggccggcgccggcagttttcccgccgcttttttgccttaatgggcaggctcccactgccttgccggctataagcaggggtaaagccggctcaatttgcgccgccacattgcggccattggcgaagacggccggcaacaaacctccctcattagcaaacagggcagccctcaagctctgtgttttaccagcaagtccagacagctcccgaacagcgcgcacagcccaggcgctaacaggcaggcggcaggaaattgtcagacagcagtcattactatccgctcaggctgtgccgatacgcagcaaatcatgaaaagtgacaatgccgacaggccggccgttttctgtcaccggcaaagcggtgattttatgcttattgataaaactgatagcctcagcggcgattttatccggcgcggcagttttgggcgattttgtcatgacatcatcaactttgagctgtgacaggtcgcggctgatattgcgcgccaaatcaccatcagtcacaatgccggcaagcttgccctgcttgtcaaccacaatcacgcagcccatatgtttggccgccagaacctgcatggcggccggcataattgtgcccagctctaccagcggcagcgatgagccggtgtgcataatatcgcccagcggccgcaaggacgctcccagtgagccgccagggtgataaattttaaaatcaccggcagaaaactgccgcgcttccagcagcgccaccgccaaagcatcgcccatggccagttgcagcaaggttgaggttgtcggcgccaaaccatgcgggcaggcctcctgcgctttgggcaaaagcagcacaatatctgcctgccgccccaaagcagaagcttcgcccgcagttatcgcaatcagcggaatgccaaatcggcgcgcatgggtaataataccgctcagttctgctgtctcccccgaccatgacagcgccagaataacatcatcactgccaatcatgcccaaatcaccatgattagcctctgccgcgtggacaaaaaaggccggcgtgccggtagaggcaaaactggcggcaattttggcgccaatatggccgcttttgcccagaccggttacaataacccgccctttggcgctgccaataagccgcacagctttggcaaaaggtaccgccagcgccttttccatctgctcagccagcgcctgcagcccgcggctctcaatcgccagagtgcgcaggcctgattgcttgagcgccgcctcaccggcggcggcagcaataaccggcttgcgcggaattgtcggtattttcggcataacacagcctctcacatcacaataatacaggcacagagcctgaagacagccggcggccggcttgctgccgacattttccctctgcacagcagctccgctgcccgcaaagccggccgaccgccatttggaagcgcgcccggccacattttcaactgccggtaaaaaaacggtatagccgattttttggcctctcatctggaataacggccgcagcttcggtgattaacggccaccatagagacgatattttatatgttgtttcctgcgctgaaaaacggtctataaaaccttgatataaattatctgatatacggtatagttttccctgctgttccgggtcggcattttcctctacgcagaagatctttgcgcggctcaagcgcgccaataatgcggcgagcttgcgcccggtttccagagtgccgccttctttccgcttaacaacaaaaatcttgttatcatcacgcaatgatagcctgaatttatcaacaaaatgtgcaatcttgctcttttcctgttgatatatctgcaaattttccggctcagggaagccccaaacaaatgcgccggactcttcatgaccggtcatggcggaatggaaggcaatttgatattttctatctaaaacgccatcgctgtcatcaccccctatcggggttaaattttcaaacagaaataagtcctgaaaatcattttcaataagttcgataagtttattataatcatgaataaacgtccacctgaacaggctgctgatttcctgcttgttttttctttggaaaaaaccgaattcacaattttcgcccaggctttcaaaacgcggcaagcattttttcgcaacccaggacaagcgccttttccgttttttcatttttacctgcttcacctgcagaatccagaccttctgtcagccccgctttacgctgtcaggcaaggctcacgtgacagagcaaaccccagcccgcttatttattgccgttcagctctatttcctgccccggttgcgcaattcagccagcgccacggcaagcggagcctccaactggtcatgcaaatcggcactttccagcgcaaaagcaatattggcctcgataaagccgatttttgagccgcaatcataagtgcggcccttaaaatgataaccgtaaaacggctcttttccctgcaatttcaccatagcatcagtcagctggatttcatcgccggcgccgcgtgtctgcccggccaggatagaaaaaatctccggctgcaaaatataacggccgttaatatagagattggaaggcacctgccctttggccggtttttctaccatagcggtaatttcaaaaccatgcgccacctcctgccctttgccgacaatgccatatttatgcgcatcttcgggcgcgcattcctgcaccgcaataatattgccgcggcctgctttttcataaagggcaaccatatcggccaggcagcctttaccctgtttttcgccgtttggcccttgcatcagcatatcgggcaaaagcagggcaaaaggctcattacccaccagatcacgcgcgcaccagacagcatggccaagccctaagggctcctgctgccgggtaaaggaagttgtgcccgccggcggctgcatggtcagcatttgctttaaggcctgggttttgccccgcgcctccaaagtggcataaagctccacctgcgaatcaaaataatcttcaataaccgctttattgcgcccggttacaaaaataaaatgctcaatcccggcgcgtctggcttcatcaaccacatattggataaccggtttgtcaacaatggtcagcatttccttcggcacagtttttgttgccggtaaaaaccttgtccccaggcc

SEQ ID NO: 3012 - DNA, 23354 bp, synthetic construct
  misc_feature 1..23354: note = Synthetic
  source 1..23354: mol_type = other DNA
gcgagcacctcgtgaaggatgagggcgaaggaggccgcgtgatccagctgcacctcgaaatccgggccggtgacctcgaccacgacgtccggaacgcccttcgcgtccttcatggagcggacgagcgattccacgaagggccgcgcccgcagcgtcgtgctgccgacctcctgcagctgctcgtggacggcggccatggcggtgatgcggtccctgagggcttcgagctctccgacggggccggccgatcgccggacgtggagattgacgaggctcgcggtcacctggagattgttcttcacgcggtggtgcacctcgagcagcagcagccgctcgtgctccagcgcctgctgcagatcggcggtggcccgctccacggcctcctccagcgtgcgccgggccgccgccggcgacgccagctggaggatggtcggcaacaggtaggtgaagcccgctgccgtggcgagcgagacgatcgcggtgccgacgacgacggcgagccccaaccagccatgcgggctcgcatccgtcagggcatgcagggcatggaccacgtggctgagcccgcaggccgtgatgaagaggacgaacccgatccagagccagcgatagggcagttcctcgcgccagcgggtgaagaccgcagccatgacggcgggaatccagaaataggcgagcgcggtgccgagattcgccagaacggtgatctcgcgccagtgggcgggaggaggggcactcgtgcagatgtcgtagacgtagcgcagccactcaatcatggtgtctccggcgccggtgtcgccgccccgcctccgcccgccgacatgcgcccgccgggggcggatcatccggcggcacgtcgaccgcccgggagcgattccggcaattccgtttcacgcgcaccggcaccgcaaccccctgtcgaccggcgggatcgaccgctcgagcacccgcgcaggccttcatgtcgcacttcttcacaacttttgcgacgacgaccggcgtcgcaactgccggcaagggttatcatgcggatggttcgtgtgtcactaattcgtagttcactaatatgttgaggcatcgtcggccctgctgatccgcgagaggctctgcgtcgcgaccccgccggtcttctgcggagaaccgcgatccggcgcgcgcggacgtgacgaggacgtcggcgaacgggggcgcttgcggccgtcaggccagggagggacgatgatcgacggtctggcggcgagactcgacgtgcaggtgctggatgcggcggccgaggcgttgccgcggctcggcaggaccgaggacgtccgcttctcgccggcgaaccggaggatcgccatcgccggctatctggagaattcctgcttcgtcttcgacgtggcgatcggacggggcggggccgggccggccgtgacgctgacggaccatctggagatccgctcctcctcgctgaaggagccgcacggcttcgacttcatcgacgagcagacgctggcggtcgccaaccgcgccggcgacgtcaccatcttccggcttcccgccgccggcacgggcgagcggctgcaccggctcgatccggtccggacgatccggcgcatcgggttgcgcgggaaggttcggtcaccgggctcgctctgcgtcgcgaaggcggacgggcggcgcgcgacgctctacgtgtgcaacaattatgccgatctcgtctcgcgccacgacgtttcggccggcggatctttcggtcttccccgcaattcggtcctgctgaagaaggggatgtccattcccgacggaattgcgatcagccaggatcgcgcctggctcgcggtcagcaaccacggcacagggtccgtcttcatcttcgacaacacggtggccttgtcgccggagtcggaaccggcggcgatcctgcgggggacggcctatccgcacggtctgcgtttcacgccggacggccgcttcctggtcgtggccgatgccggccggccggtggtcctgctctaccgccgcgcggcgggacgctggcagggcgagcaggaaccagcggccgtcatgcgcgtgctcgacgacgagacctacatgagagggcgctcgaaccccgccgagggaggtcccaaggggttggacatcgacgccaccggcaccatcctggcgatcacctgcgaagagcggaacctggccttcttccggctggagacgctgatcgccggtgcggcctcggatccggcctgacgtcacggcgcggcgggatcaccggccgccgcatggtccggacggtggcgggcgccggcctccggcagccccgggttgcccgaaatattatattaggaagttctatgatagccgtgaccgggtacgacctcctcgtgcagccggtggcgccatgacacgtccaattcccctgaacgaggccgagcggctggcggaggtcgtcgaactggacattctggactcgccgcgggagccgtccttcgacgcgctcgtcgaactggccgtcgaaatgctcggaatgaagatgggcctcctgtccatcgtcgaccgggacaggcagtggatcaaggccggctgcggcaccgacatgcaggagacgtcgcgcgcggacgccttctgcagccacgcgatcatgagcgacgacccgctggtggtggaagacgcgctgctggacgagcgcttccgcgacaacccgctcgtgcgcggacggcccttcatccggttctatgcgggcgtgccgctgtcggtgcggccgggcgttgccgtcggctctctgtgcgtcctcgacgacaagccgcgccgcctgtccgcgatcggccggtcgacgctgcgccgcctcgccgacgtcgcccgcatgctgctgctcggccacatgaacgcgcgcaagatggagaaggtggcggaggaactgcgcgcgcgccacgccgagatcgagcgccagaaggaacggctcgaactgcagaagcgggtggtcgacgcgggcagccagctggcgaacatgggcgcatgggagttcgacctccagaccggccagtacagctggagcgacagcatgtacgtcctccacggattgccgcgggaccatccgctgacgctggagagcgtgcaccgcctgtaccccgagcacgagcgccggcggctgcaggacgcgatcgagcatgccacccggacgaacggcgagttcaagttcgaggggcagatggatgccgccgacggaacgcgtaaggtcgtccgcatcctgagccgcgtggaactggcgaacggggtgcctgtccgccgctacggctggaagcaggacatcacggaggaacatgcggcgcggcagaagctgatcgacctggcggagcgggatccgctgaccggcctcctcaaccgcaaccgcttcaaggaccacgtcgccgagcagctggcggcgggagtgaatccggccgtggtgctgttcgacctcgacggcttcaaggacatcaacgacagctacggccacgcgctgggagacgccttcctggtggagatcgcgcggcggctccggcggttccccctcgattccgtcgtggccgcacgcctgggcggagacgagttcgcgctctgcctgccgcacaccgaccgtctcgagatggcgattctcgcggaatggctgtgcgcggagatccggcgcccctggctctggggtgcacggaccttcgaactgacgacctccgtcgggatcgcgcatctcgagggcgctccggccgggctggacgatctgatccgctacgcggacctcgccctctatgccgccaagcagtcgggccgcaacggctatcgcttctatgacgagaccatgcgcgaggaggccgaccgccgcatggaggtgctgcacgacttccgccgtgcgctgcgcgccggcggcgacgtcgtgctccactaccagccgaaggtcgatctccggaccgggcggatcgccgggctggaggccctgctgcgctggcagcgcgcggacggcacggttctgggccccggtgccttcaaggatgcgtttcacgacaccgcgctgtccgaccggatcggcacccacgtgctgacgcaggccctggcggccgcgtcgcgatggcatgcgtgcgggcttcccttcggctcgatcgccatcaacctcagcgcgctgcagtttcgcgaccaggacctggcggacgtcatcctgcacggcatcggcgaggccggcattccggcgcgctgcctgcaggtggaaatcaccgaggaggtgctgctgtcgaacaggttctcccgcgcggtcgaatcgatcgacacgctgcgccgggcgggcgtcaaggtcgccttcgacgacttcggcacgggttacgcgtcgctgacccatctgtgcgactttcccgtcgacatcatcaagatcgatcgcagcttcgtgacggggctcgaccggcagagccgcaagaaggcgatcaccgcctctgtcatcgagctggcgcgctcgctcgacctggaggtggtggccgaaggcatcgagacgcccgcgcagcgcgacatcatccgctcgctcggctgccgcttcggccagggctacctcctgggcaggccggtcgacgccgccgcgatggaggcgcggctggccgcaggagacgccggcgcccgacgcgccggatcgtgagcgcccgccgcggaaccgggatgccggccgcatcgcggtcggtcggcaacctctcgtcgacgcgggccgcagcaggacgctcccggccgcgggtcgggcggcgatggcctgcagtcccgcgatcccggtcgggctgcagccgaaccgcgagacgggtccgcgacgtcacgtcccgccgccggtccggtccggaagcgccgccaggccctccgccagtcccttcgtgctgatggcgaacgggacgccccgtccatcggcggagaagaccatcagcgcgatgtgctcggcctgcgagagggccttccgcgtttccggagccagatcggcccgcgcgatgcagccgccggtgaagcaggcggaataggggacgacgtgttcggtgccgggcgtgagcaccagcacgacgccgcgatcgaaggcgatgtccgtcggcgtccggatgagcgaaacgataccgcctttcccgtcctggaggagttgccagacgagcaggggcgtcttcgaaccggcaccgaccagacgctgcgatatggaacagacggacggcttgccggcctcctcccgggagcagccatagcgccagtcgccgaagctggtgaagcgatccgcagccggctccccggccgatgccgatgccgaggccgacggctgcgcggccgccgccgaacggccagcaccggcgtccggccccgggctcccgggcggcggggcagggacgatctggtcgcgcctcgatgccagcatctcctccagccgcccggtcacgctccagccggtgccggcgacaccggcgaaaaccaccattcccacgatgaccgcgtgaacggcgaccgacagcagcagggcaagggcaccacgcaaggcaagacactctcgacgaagggaacctgctgcacaccgcagaaccgcaggccaggaagaggatggcgtcctcgaacgcaccggtccggtcggcaggccgcttcggccgggacgccggcgccgtcgctccgcgccactgccggccgccggatgcgtcggaaccggccgccgcgggcgacggccgcgtgcccgcctaccaggcgaggattccgccggcgcgcgcgctgatcatgcccgtggcgctgaccgccatgcctccggtcacatggaggctctcgttcagtttgcctcccatgttgaaccccatcgcataggtgccgtcgaagctcgaggtgttcatgccgacggcgaacgtcttgccgtccggaacccagaagttcccgagcgcgagggccatggccacgccctgccggttctccccgatctggtcgtagagcccgcgatcggcagccaggttcccgctcgcgtcggtcgtcacgagcgatttcggaccgacctgccgcatcgtgctcgtgtaggaggtcaagccgggcatggtgtaggtgttggatgcgacgccgaagacctgctggcgctccagggtcgtcgtggccccggcaccgaacgccgccgagcctgcgtgagccgcctgggcctgtgcgcccacggcggttgcggaattgccggaggcgacggacgcctggcccatcgcggtggcactggtcccggatgccattgcgttctggccggtggccgtcgaccgtgaaccgagcgcaagggcggactcgccgatcgctgtcgaagcatccagctcggcataggagtccctgcccagcgccgtggacgaggcaccataggccaccgcgaactgaccgaacgcgctcgctccctcgtcgaacgccagcgcgccctgcccgacggccgtcgtgtcgtcggcgactgccgaggcgagctgcccgacggcggtcatgttctcgccattcaggaaattgccggtggtggggtcgaatgcctgcgcgccgtcgccgattgccgtgttccgggtcccggcggcgatcgcgcctgaaccgaacgcggcggtctggctcccttgcgcctgcgcatcggtcccgacggcggtcacgttcgtcccgtcggcaagggcattctggccgagcgccgacgcattggtaccggtggcgcgcgcgtcggcgccgaaggccgtggtgttggtgcccgcagcccgcgagtcggcgccgaccgccgtcgcattcgtgccctccgcataggcggcgtcgccgatcgcgatcgcgtccggggagagcgcctgcgcgccgtttccgatggcgatcgcgctgacgtgggccgtgaaggcattggctccgccgaagccggcgcctccgaccccgccgccgccgatggtgatgccgtcgaaggagtattcgacgggcacgtccgcatcggcatcgaaatcggggttgccgaaatagccgagcgtgacgcgtccgtcatgcgccgacacgcccatctgcgcgatcacgttcgcatgggtcatcaggctgccggtgaactcgccctcgcagctcggcaaggcgaacgtctggacgccgtcgaagatcaggctgcccgcctgcaggccgacgcccacggcctggacggcgttcgacgccgattcgctcagccccgtgaaatccagcgacgtgaggatttccgacgtcacgccggccgcttcggtggcgacgcccgccgcgtcgaacgcgtagcggaaaggctccagctgttcggcacaggacgcggtcgcggccagcgtgttgggatcgccggcattgtcgaccgaggtctggatggcgttcagcgcggcctcgcgggccgccttcgcattggccacctgcgtgggatagttcgcatcccagacgcaggtgggggcgtcggggtcgcacggcgaaccgccgctgccgtcgtccggcggattctggcgcagattcgtctcggtctccgccgcagccttgtaggcgtcgagttcagtcgagagatcgagcgtgggcgagccgcccagcacggacgtcacgacgaaggacggcggatcgacatccggtttgccgggggtcgacgcgatgtactgcgccgacgcgggtgtcgtggcctggctcagggccgcaaaagaaaagaccgcgccggcaatgccgggaatccaattccgatcgtgcatcgagcccccagctcacggctgcgtttcgagcgactaaaccttgtattgcaggtgattactgttacgcgggccggtcgtattccggcctcttgcccggctttcgatggaaactgttcgagccgggttcacgaacagcttacactttggttaacggatgacaagccccgtcgcgcgcgtcggcggagccagggctttccctcgcgccttgccggcccgtcgggctctggagccgggatcggcggtcgtcttgcggaacggccggaccgtcagtcgagcgggcggggcatggggatcggaacggtcgacggcgcgggcgcggcggcggtcgggggcgccgccggcgccggaacctggatgacctcctgcctcggctcgggggctgcgaccgagatcccgaacaggcgccagcgtccgccgatcggctcgaagaccagatcgaagttgacctgtttcggccggctcggaaaaatgccggtgagcctgagcttgctgccgtcgtcggtcatttccgcccgcgtgaactgcggcgcgaggatcaacgtgggggcgaggttgagatcctggctgcgaaggggcgcgaagatcccggcaagcttcgccggatcgttgacggcggcgaagttgggcgacgcgtagtcgcggagcacggtatagttgcccgtcagattcgcctggttcaacgcggcgatcgcatcccgcacgagaatgaccgcgaggttcccgtcgacctgccgggcctgtgcccccgcgggccggctcccgccgatcgctgccgccgccaagccggccagcacggcccggacgagaagcggacgacggctgcgtctcccaggcgcctgccggccgtcgctcatgccggcctctccccgccgcgtcccaggggtgcctcgcgaacggcgaagcgtgagaaaccccaccgctgcaggcccgtccggccccgcccgacgtcttcgcgcttcccggtggccgtcgatcggacccgccctgcgggaccggtccgggccgccggggccgccccggctccggtgcgccgtgtcttcggctttctgcccggtccgtgcctgccgcgcctgaccgctacctcccgcccgatcaggacgagccggtcgtgcgcggcttccggtcccccggatggcgaggcctccgcgatgagcgcgtccgccgcccgctcgtctgtgatcctgtcccccatggggcgaccctagccgttggtgcgcggaacgcaatggcgaagaaacgggcgcaccaacgtccccgcggcggcaaggtccgcgccgaaacggcggagacctccagctcgaccacagcgcttccgcaccacatcgacgcccccacccgacgaccgatcctcgacctctcctgaggccagacaataaaaagcccggttcttgatgcggtcgatcgcttcgcgcaacacgaagagcgggacgaggaaccactcacatgggatgaccggctggccgaatcgatcctcaatctcgaactccaggcggggcggcaccgaagacgcggtggatgaggttttccagccgtggggaaatcctgcaatacactgtcaatggaaagtgcttcacccacaagcagcggattccttgaatcaatggcgtttttcacgctgcaccctctctggcagtgtttctcaatcagaacctggtcaaaagaagagaggtcgggaacgccttgcagtcggtcgggtggtgatgccgccggagtttccacaggggtacgagtggaatgcgagtgcaagccaatggccgcgcgggagccgcagcctttccttcaccaaggagctgccgttcgcgccgacaagaggatgaaaaagctccccactgatttcattcagaaggaggcttctcgcttcaccgagcgaaccgttggccaggaccaaagactgagcagcgggttgttctgaagcagctcccaacagaaaagcccccgccgtggcgagggccttatttggtgccgtcgaggcttgttaacagccagaccgcgttttctgaactgctgctatccgtctaatataccgtcccggaagcgaatgagcaaggctttccggtgtgcatacagaatctgacactctgtcccgcagggaccgacatgcgattgaacgtcgatggtggcgcgttccggtgagacggatagcagtctagcagagatgctgtggcccaaaccagtatcgcgtttttgcgcactacggacatcgcattcgcgttgaaaaatgttagtcccgtagttgccgctggaccgcgtttctgaattgcgcgaaaggacagctgctcctaatggagcggcagtcctcttgatttatagtcactggtgtggccaacaaacgatggggaggcaccgggatgcggaagaagctgttctcgttcgacatgggcaccaacagtatcggctggtgcgtcttcaatcttggtccgagcaatgagccgatcgcgatcgtcgatgcgggtgtccgcatcttctccgatggtcgcgagcccaaatcgggaaactcgttggcggagggtcgccggatggtgcgcggcatggcccgccggcgcgaccgctacaagcgccgccgaaaggccgtgctgcggacgttgacggagtacggtctgatgccgtcggatccgggggcgcgtgcggcgctggtggccgagaccaatgatgcgcgacgggatcggccggcgaacgacgtctatgcgctgcgtgcgcgtgggctggacgagagactgccgctccaccatctcggccgcgccttgtttcaccttcagcagcggcgcgggttcaagagcaaccgcaaggccgatcgccggtcgaatgacaacgagaagggcgccatcgcgatcggcgaggatcgcctgcgcaccgccatgcatgaagccggcgcgcgcaccctgggcgaattcctggccgggcggcgcggaaccgatccgctcgggcgaggcggtgtgcgcgtgcgcatcgacgctgctgcttcgtcggaaggagaaggacggcgcgaaaagcccggctacgatttctatcctgttcgtgcgatgctggaagacgagttcgaccagatatgggccaggcaggccgagttctggcccgaagtcctgacggacgatcgcagacggcatctgttccgcgtcatgttctaccagcggccgctgaagccgccggtcgtcggcaaatgcagcttcaatccgtccgaaatgcggctggcgaaggcgcacccgctcttccagacgtttcgcctctacaaggaggtgaacgaactcgaactggtgatgccggaccagtcacagcggaaactgacgaaggacgagcgcgacgccctcgtgatccatttgcgcggcgtccgcagcgcgggctttccggctttgcgcaagacgctgaaactctccgaacgggggacccgcttcaacaaggagcacgaaggtcgcgagaagctcctcggcgacgagatccacgcggccatgtccgataaggcgcttttcggcaatcgatgggctgcgatgccgatggaccgacagtgggaaaccgtcgaaaggctgcgcgaggagaacgatcctctcgcccttcatcggtggctcgtcgagcaagccggactgtccgacgaggcggccgaaaaggcggcggatgcgaagctccccgaaggttacgggcgactcggacgaaccgctcttgcgactatgttggaagagctgaaggcagacgtcatcacggaggccgaggccgcgcgccgtgccggctacgaccacgcccttgcgcgccatggcgaagccgtcgagaggttgcccaagtaccaggaaatcctggagcgccgcattcccccgggcaccggcgacctcgacgacgagtacgacatccaaaaggggcgcatcaccaatcccaccgtccacatcgccctcaaccagctgcaggtggtcaccaaccgcctgatcgcccgccacggcaggcccgagcgcatccacatcgagctcgcgcgcgaactgaaccagagcgaggaccagaaacgcgaggcgacggcccgcaacgccagaaaccggcgcgacgccgaacggcgatccgccattctgacggaattcgggcagcccgacaacggcttcaaccgacagctcctgaaacagtgggaggaactcaatccgggagatccgctcgaccggcgctgcatctactccggcacggtgatcacgccgaccatgctcttctccggtgccgtcgacatcgaccacatcctgccctggtctcgcacgctcgatgacggcgcgaccaaccgcattctctgcacccgcgaggccaaccgcgagaagcggaactttgctccggccgaagttcccgcgtggggggaccactatgacgacattctggaacgggcgcagcggctgccgccgaacaagcggtggcgtttcgctctcgatgcgatggagcgcttcgagaaggatcgcgactttctcgaccgtcagttgaccgacacgcagtatctggctcggctggcgcacgattatcttggcgcgctgtttccggacgaggaggcggacggcgacggggtggtgaagaagcgcaatcacgtcgtcgttgtgacgggccggatgacggagatgctgcgccgcaagtggggattgaacggaattctgcccgatcacaatttcgccgacccgaccaagaccaagaaccggaaagaccatcgtcatcacgcgatcgacgctgccgtcatcggggtgacctcgcgcagcctcctgaagcgcgttgccgatgctgcccgcgacggcgagacgcagggcgcggaagacgcgatccggacgctgtcgccgccctggctctcgttccgggacgatctcaaggtcgtggtcgatcgcatcgtggtcagccacaagccagaccacggcaccttgccgaagccgggcgagaccgggcgttcggcggggcagctgcacaacgataccgcctatggcctgaccggcgaggtcgacgcgcgtggcaatccgatcgtcgtccggcgcaagcccttcctgtcgctacagccgaaggacctgcatgccgtccgcgatctgagactgagggcggcgctggagaacgccactcacggcttcggcggaagggacttcacggcagccctgataaagtttcgccaggcggcgggccatcactatcgcggaattcgccgtgtgcgcgtggtggagggcctttcggtcatttccatccgggacaaggatggccgcgcctacaagggttacaagggtgacgccaacttccgatacgacgtctgggaacttcctgacggcagatggatcgccgacgtgatcaccatgttcgacgcccatcggccggacatcgactggcagaagcgtcgccctcaccctgccgcccgcaaggtgctgtcgctcaagcagaacgacatggtcgcctatgacgatccgcgcggcggcccgaccatcggcatcgtggtcaagttcggccagaacggccaaataacgctggtggcgcataaagaggccggtgaactcaagaaccgcgacgcgcttcccaacagtgcagaggaggcactggcgcggggcgccgagccggatcaggatggccgggtggcattcgatccgttcaaatactactctccgaccgccggggggttgaggaagatcggcttaagacaggttcgggtcgatgaagccggacgtatctttgatcccggccctcgcgacaaaaataaaaaaagtccgcgaaatgaacctcgttaatgttaatacgtaattctactttgtagaatctctgtataaagcgacaatgtgcagatggaacgcattgtcgacattacgtccgatggacttcatctcgctgttcatcgcggttttttgaccgtgagtgaggcgggtgaggaacgcggtcgcgttgcgctggacgacatcggagccctgatcgttcatgcacatggcacgacctggtcgaactcggtgatggtgcgtctctccgagcgcgccgtgccgatcgtggtctgcggcagcaaccaccgccctgtcgcctgcgtctggccgctcgaaggtcatcatgcccaggcagcgcgtatgcgcgcgcagctttctgcgaaccgcccgctggtcaagcagctctggcagaagctcgtcgtgggcaagatccgcatgcagggcgaggcgctccgacttgccggaaaagagcatggtggcctgctgccggtttttcggacacgaggttaagctaacatagcttgttcctcgaactcgacggggctcaggtatcccagtgtcgagtgcctgtcaatcggcgcgcaaagttgaccccggatcggcgtccaatattgaccccctcgtagtgcgcgacggtgagcgcccgaccgggtggagctggtctgggttgcgcagcccggtcgggcgtgtcggagaggctttccggctttagctttgagtgcggttcttgaagcgccaggattcgttgccggtctcgatgatctcgcagtggtgggtgaggcggtcgagcagagcggtggtcatcttggcgtcgccaaagacggcaggccattccccgaaggcgaggttggtggtcacgatgatggaggtccgctcgtagagccggctgatcaggtggaagaggagctggccgcccgcctgggcgaaggggagatagccgagttcgtcgagcacaacgaagtcgagccgggtgaggtagtcggcgatgcgtccctgcttgccggagcggtgctcggtctccagccggttgaccagatcgacgacgttgaagaagcggccgcgggcgccactgcgtatgagggcgcgggcgatcgcgatggccagatgcgacttgcccgtgccggtgccgccgatgagcacggcgttgcgctggtcggcgacgaaggcgccggtggcgaggtcgcgcacgagcgtctcgttgacgggcgtgccggcgaagtcgaagtcgtcgatgtccttggccagcggcagcttggcgacggtgagctggtacttgatggagcgcgcctgcttctcggcgatctcgaccgacagcagatcgccgacgaccctcggcggctcgtgctgacgcttgatggcggtcgtcatgatctcatcgtaggcgctgcgcatgccgtagagcttcagcgttcccatcaggtccagaacctgggtgcgttccatcagcttgccctcctgaggctgtcgtaacgggcgcagtcggcctgcggctcgatcgccaagcgcagcgcgtcgggtgtgaggatggtcacggccggcgccggatcgcgccggcgggccaggatgttgagaatgacggcggacgagcagacgttctcggcaagcgcctgctggcaggcgatctcgacggcatcgagcccatccgacagcaccgccgtcaggatcgacaccatctgccggtcgccgtcgtcggcagccttcagccggcgcctgacccgctccatcgccgatggcagttcccagccctggaacggcgcaccgttgcgcagcgcgccgggcttgcgcgccagcacagggacgtagtgccacggatcgtagaccgtctggttgcgaccgaacgaacgggcatgctcgcccacgatcgtgccgtcctggcgcacgacgatgcgatcggcataggcctggatctcgactgggcggccgactgcggtcgagagcaccgagtatttgttgttgtcgaaccgcacggtgcaggtcttcgtgaccgaggcgggaaccgtgtggaagccgtcgaaacggccgcgatactcgaccagcttgccgcgctcctcctcgaacacgtcccagatggtgcgctccggctggtcgacatggcgatgggccttggcgtaggccacgcacttgtcgagcaaccaggcgttcagctcctcgtagctcctgaagcgcagccgaggcgtgaagaagcgctccctcaccaggccaacttggttctcgacctgccccttctcccagcccgaggccggcgtgcaggcaaccggctggaccagatagtggctgcacatctgcaggaagcgacggttgtactgccgctccttgccgacgaagaccgtctccaccgccgtcttcatgttgtcgtagatgccgcgcgtgcaggcgccgccgaagaaggcgaaggcccggtcgtgggcgtcgaacaccatctcctgcgtctcgcgcggataggcccgcacgaacatcatgcggctgtggcagagccggacgtgggcgaccttcacggtcaccgtcacgccggcgagcaggacgatctcgtggctccagtcgaactggtaggcttcgcccggcgcgaagagcagcggcacgtaggcctcggccgtcgccgatcctctcgtcttcgcccagctcttcgcataccggcgcaccgcgtcgtagccgccctcataaccaagcgcgcgcagttcctcatagatccggatcagcgtcagttgctcgcgcgccgccttgccgagattgccgttcaggagcccgtcgagttgatccttccacggtccgatcttcggcttcggttgcagctcgcgctcgtaggagaacgaggtctcgtcggacctgaggatcttgcggaccgtgttgcgcgacacgtgcagctcgcggcagatccgcttgagcgaccacccctgcacatgaaaggcacgccgaacccgggcaatcgtgtccactgtcttcatcccctctccacccgctcgccaaaacgaacggatggtcgcagatcgacttcacgaggggggtcaaaattggacgccgatcctcccgtctagggggtcaaaattgcatgccgattcacagatcatggttccgtccctgcgtgccttggggcggatacagaaaggacaaatgacatgaacaacaccaccgacaagaagctgctgacggccgccgagaaggaagaggccgcgttcgttgagaaggtcgaattgatcgaacaggaagtcatgacggatgcatggctgactacggccgaagatgacgaggggaaagtccatctgatccagacggcgctgacggcggcgcaggacctgctcctgttcgcccgcaaggccgcaacgggcacaccgatcggccacgtcgatacgctccctcggctgatcgcggcattcgacacggtcgaccttctccgggaggagacgtgcatggtctgggacccggaagtgtctccggccggatgacgcgcatctgcaaggtccgcgactgcggcgcaccggccgcgtcccggtactcgcctcactgtcgccggcacaagagcgtgcttcggcgtcagggcgatccggatcaagcggccatccggatcaccgaactggcgcccttcgtccggctcgtccggcggaggatcgtcagaaaccccgacagtccgctctgggggcacctggaggaccgctggagggttatcgcggaggaggcgagggcggtcgccttcagcgccgtgtgcagccggcatgaacgcgctgcagcggccgaagtgatgaacatcgacgccgactgctccgcgcaggaaatcgtcgtcgtcgtcctggcgatgttcatcctgtggcgggaacggccgacctgcttccgctccgacagagccttccgcctgcaactggcgcggcgggtcagggcgctttcggggcggcattccgggctccgctacgaccaccagacggggacacagaagcgcgtctatcgggagatgaccccgaaggccggggcgatcctcggccacaagctcgcactcgcattcggcggtgccggccttcagctcgccatgctggaggaacgggagcgggagcgagtacgccagaccgtcgaagacatcaaccaagcgatcaaggaactgaaatgaaccacgacacgaagaccacgaggaagacgatggagaacgacctcggatacgacccgcgtccgggccggccgctcggctctacgaaggaggcgagggaggtacgggagcgcatgaaggccgacaataggaaggctgcaaagcgcggctgggccacgcggcggcgcgaggcggcaatcctcgaccgcatgatcgcggacgccgtcgcaagggacaaccgctgatgaggatggacgtgaaggcaggacactgggcggcagtctgggaagatcgatcggtggggcgcggggagatcatcgtcgacgaactcttccgcgctcgtcagggcgacctggaccgggctcatgtgcgggttctcgcgagcgctttgaccggcggggggcagctcgacccgctctgcgtctggcaggacccttcgcgcaccgacggtgccctcgtgctgctcgatggggcgcaccgactgggggcgtactgggccgtcaagcgggagggaggcatcctcgtccgtgtcgcgctgtgtgatcggcggacagcgttgctgatcgcggcggcggcgaactccaaggacaagcttccgctgcactactccgagaaggcggacatggcttggcggctggtgcggcaggacgacgcccgttactcgaagccggagattgcttcggccacgacggtctcgctccgcaccgtggcgaccatgcggagccgctggcggcagatgaaggaggaaggacgagaaccgaccggaagctggggtagagaccgacgagacctcacggccgactggaccccggaaagggagctggagggcgccgcgagggacaggaagataaaggagctgtccaaagccattctcgacgttgtcgggcggaccgcccggcacgacgaaaacctcgttgcggaaattcttcaggccgcgttcggcagacgcctgcggaacatggccgagtacctctatggcgacgtcgatgagtggacggacttcgatcctccccggacagccggctcaatgagcgcggatcaggacgaggacgaggacacagacttctaggcggcttctaagccgggacctgtgcagcccatgggggtgcattttgcacgggtcccggcggctctaagctgcccacaatcctcactgctatgcggtcggaccgttgaataagttgcccattacggcccttcaaggcatttcacataaccgggagccgccacggctggagcggttgcagccccccagacatgtgcctcagacggtaaggttttctggagtgccggacttgatggcacctaagaggggcacacttggatgtttgatggtttccgaatagctatgggtatttcggccaccttgttcgatagatagtgtgggttgcgccagaaagcttgaagcttcgagactcccaaatatctttcccatcattgtatttctcaatatccggaagtgatgtgtagacgtccttgtgtatcataacggaataaggatattttcgaacgtcagacaatttcgcagccatgtttggtggtctgcctatccaaattaggtcgttgttgtttcggattccagctcgaactgttctacttgttccatagtcgactccgacgccgcacttgagcttaattccgttttttgagattgatgtgaactttttataagcctttggcccgagtatattttccaccgtgtaaaatatttctcttgcgcatttggtggcgtttgtctgcgacatgtccccgacaaaaacgcccataacgcggtcgccatcaaagctacgtatctcgcctcgatatgcccgaattagacgagttgaggtatctaagaatgcccgtattatctttgcggttgtctcccatgggcaatgacgggctagctctgaagatcctgctaaatctgcgtacaaaaaagaggcatcaaggttaactgcttgatttttgctgacactgtccgtggtcggtacgaccgttccgtcgcgaacatcgaatgatgaaccaaaatgaccatctacccaaatctccaagtcttccttccaagccatctcaactccagagggtcaatgcgccggttacggcttgtgaagcaatccacaccgtcggaaacaagaaccccccaacagtcagccacatagcaaggcggaaccgacgaaacttcgtcgcagcaatgcgagcgtttacgtaggtttgttcggcgaggtcacggcagtaaggcgtcgggtcatctgtcagcaccatcttcgatttcagcgccagaagcagagatcctgaacccatcatcgcaatgtcgccagtaaaagcgacgttgcccccaattttgcgaacctcatccgggataggggtcagtcggggcaagaaggataacatagctacaatgcccgccaagcccagagtggcgccaacgctaaacatatagacacgccattgccatgcaatttcttcgcccgatatcgccgccatgcccactatgagggcgaagtttagagttatcagagcaccgttcttcgcctccgcaaaatgcacttgatgatgcgcaagatccagtagccgattaagctgatcttgatattcagaaagccgcgccatgaaatcctccaccgaaattagagcatccagaatcgggagcagacaagagccgcgccgtgttacacacaagtttcgctttcgattcccccaagaaggaaatcagcaaaattctgttgccggcgccgaaagcgccgaagtaggcccgtatgctttctactaagctcgcccagcggcagaatgtccgcattccatcatgctctaagtcatccccggcacgatcgctgcgggcgcgaccgagagagtccttctcgcgccgacaacgcggaggctgcttttccgtgccaccttgcccattgcagcgaatcgctacgtgctgaccggctcagctagctcccgcacaagaacaagtgcgggaatgaacgtcacaccgccaacggcggcagcgggatcgcggcgatggccgctgccatatctttcacgtcgaaatgccggtaccgcgcggcgacggatgcggcggcgtgtccttggatggcatccgctaggctgtccgagacgcctcgccgggaggcggcgctcttgaaccagtggcggaaggcgtgggcaggggctttgcgcgggtcggtgaagcccgccgcgcgtatccacgtcgacagccggttcgaaacacccttgctggcgtgtcgccgggacgccctcccggatgatcggcggtagaagagcggaccttgcccgcgctcccggacgaagtccagaaacccggcttcgacaagtgcggggtgcagcggcacggttcgttcgctgccctcgttcttcaggcttccgccgtcctctgccggggcgatgaccataacccaatgcccctcgacttccctgatgcggcttccccagagctgcacgatctcgcccacgcgggcacctgtcccggcaaggagccacggcagccagcgacgggcctggtcgctctccttatcagctagggcaagcagccgggcgacctcctgatcgctgtagggctgctgcccggtgccggcgcggttccggacgatcacgcggacgccttcggcgggattgtccgtgagcagcttgttgctgaccgcgtagttgagcagcgccttggccgaaccgaggtagctgtcgttgatcgtcttggcgctgcggccccgcgccactgccgcgtccttccacgccacgatatcgtcgctggttatgcgccggatgtcgttcgccttggagccaagatgctccttcaggaaacgcacgttacccgaccacgtcgagcgcgtgctggcggcaggcatcgcctccttgctccagcggtcgaagagatcgtccagcgaaatggccgtgcctatcgaaccaacggccacgggagggaaccggctcgccttggggtcgggagagtagtcaccggaagcattccgcttcagagcccagccggcgtccgtcgcggcctgctcgacctgcgccaggaggcgggcgcgggtctccggatcgactgcaaggccgtgcttctggaggacccagttggtcagccacccgaagcgccgttccagcgcctcgatcggttcgaccgtcctcggcagcgtgttcacccccgaagtcagctcttcgccgaatgcggcgtacgcatcgccgggagccggaaggcgggcggcgtcgaacagcggaacattgagcagccgcccttccttggccgcgcgattgaacgccttgaacgcggcccagttttcgggagtgccggggttctcctcgaacttctcgacgaccagccgatagacctcgcccgacaagcccacgagctgccgctgcgacagcgacgcgggaccgcttctccacgctgcgaactgctggttcacctgagtgttcgcggcggcgctgcggaccttcgcgacgttcgggtcgcgggtgcggaggctgaacttgatgaaagtgccggccgtcgcagacaccgtgaccggcggttcggtacttgccgccggtagctcgacaaggaccagcttgccgcgagcgacttgcgcgatatccgccgggacgcggcacctgaactgaaggaaggacgaattttcccgcgtcgtcggtctcggcatccgaagtaccattgtgacccgctcctgtgacccagtgcgcgggctgaaaatccttagatatcagggtttcaatggcttagggaagccttggtgcccaggagaggactcgaacctccacgccttgcggcacacggacctgaaccgtgcgcgtctaccaattccgccacctgggcaggtgcgaggcttcgtttatgcggggcgccgggtggtgtcaatgcgggagtggggagaaatcgagcttattttcaacgtcgtgcgcgggggcgtgcgggcggggcgggtgtcgctgcggaaggcggccggcggcgaccgccgacgggtgcccgtgcctatcgccgcgattggcgccgaccgtcgatcggcccgccgttggcgggccggggaggttcttcggggggatgcggatcgggaagggaggaggccggcggccgtcagcccccgccggcgccgccaagtcttgccgtcgcgcgctgccgcccgcgccttgcctcagccgaggatgtccttcgaggccacggtggaatcggcgttgaggcggtagatcaccggcacgccggtgccgagttccatcttcaccacctcgtccttcgacaggccgtcgagcgccatgatcagggcgcgcagcgaattgccgtgggcggcgacgagcacggtctgcccgcgcagcacgtgcggctggatgtcgtgcaggtaatagggccagacgcgggcgccggtgtccttcaggctctcgccgccgggcggcgcgatgtcgtaggagcggcgccagacatggacctgctcctcgccccatttcgcccgcgcgtcgtccttgttgaggcccgacaggtcgccatagtcgcgctcgttcagcgcctggtcgcggatggtctcgaggccgggctggccgacggcgtccaggatgtgggcgcaggtgacctgggcgcgcgagagcgcggaggtataggcgatgtcgaaggagaggccgcgcgccttcagcgcccggccggcggccttcgcctcctcgtggcccttctcggtcaggcccgggtcgcgccagcccgtgaacaggttcttcaggttccattcgctctggccgtgacggacgagcaccagcgttccggacatgggcggctcctatgcttgcaggttcttgagggaagaggcggggcgggcgcggcgcccggcggccgggcagggggccatggtcaggcgatcccgagcacgtcgagcatcgagaacaggccgggcttgcggccgcgtgcccagagtgccgcgcgcacggcgccgcgggcgaagatggtgcggttctcggcgatgtgggagagcacgatgcgttcgccctcgcccgcgaagaccaccgaatgct

SEQ ID NO: 3013 - DNA, 23351 bp, synthetic construct
  source 1..23351: mol_type = other DNA
  misc_feature 1..23351: note = Synthetic
gtacgaccatgaaacgaccgttggccgctctaaccagcgtgctactgacaagcattgccttgccatattctgcaatggcgcaaagcgaaggcgacacacgcagccgcatccgcgatgtgatccgggtagagggccagcgtctggacacgcaaatcaccgatctggcgttagacctggccgaattcggcacccaggttcaggttatcacgtctgaagagattgaaaccgggggctttacgaatttcggtgaagccgcagcgggcctgatccgcggtgccaatattggctactcacctgacgaaggcgagtttacaattcgcatcgacggcggaaccgaccgcgacaccttgttgatggtagacggtgttccttattttgaccgcagctcgcctttagaagatttgtggccagcaaccgcgattgatccgcgtatgatcgaaagcgttgagatctatcggggcggccaaagcctttatttcggatctaacggcggtttgggcgttgttcgcgttcaatctaaacgcccagacggcacggccaagggtgagttcggggtttacgccggttcattcaaaacccgtgaagtttacggcaattattccttcccactgaccgcggatggtcgccacagcgtgcttttcttcggtcgctcctatgaaaccgacgcgcatgagctgtttgacgaatccgcttatgcagacaatgtgcttgcgcttggcggcatgcatgaattcccatacagctataacagcttaggaatgagctatctgtggcagatcaatgatgtgactgagttccgcgctggtgcgtccttctcatccattgatttccgcgattcattcccaaccagcacgatttatcagccgaactacactgaattccccatctatcatgccagcttccacaccgaaattggcgatcgctttgaactggatatcgagggtcactaccaagatccccgcctgcacaatagcgagctggatgcacggatctgtaacattccacgcctgcaagatttgccagcggctattcaggctgaagcagcgaaccaaggcatcacccgctttaacaccgcggctgagtttgaagcttttgcggctggtattccagccttgccagccgggtgtgtcaccaacccctatggcaatctgtcacgttcagcgaccggtgcagatactgggtattacatcaatcctgaaaacggtcagccttacggcacattcgacaaccccttcccgatcggcaatcctatcggttacgtcatccagtctgaagccaatttcggcgatggcacccccaccaaaggctttggtacggttgaccagttcaaatcgggttatattgattatgggatcaatatccgcggttcatacaccgtaaatgactatctgcaggtcgtcgctggcgtgcagaacacctcctataaagacaattcggccagtgtttatggtgtgcgcgatgtcaccgtgtcctcaaccggggtttatggtgatctgcgcttgtctttacctgtccttcaaggcttgagcgcgtccttcgccgcgcgtcaggacttcaattccaactttgatgatcaatccatctggcgctatggcgtacgtcaaaacctgccttacggcatctatgcccgtgtatcgggtggtacgtcctacagcgcaccaaagattgatgaaatcggcgccttcggcccgacatccaacatcaatcctggcctgaagccacaagatgtaaagaacctgaatttgggtctagggatcgatggcgagattatgggcggtacctataatatcgagctgggttattttgataccgagatcaacaatctcttctcatcacgcgcggtcgaagcagtctgctttgagtatgaaggcaatcccaatgcgcgcgatgtgatcacggccaatcgccgcaacatcattgcgccggatgaattctgtgccaccgccgcgtctatgaatttggatggcggccaaagcgttgcggtcaactcgcgcagcacccaagacatccaaggcttcaccattgacgtctccgtggacttagatcaatggcaggccgatttcagctttacggatatggaatccaaagagccaaaccccgtttatggcgtgatggcccgtcttgacggcacatccagcaatctgggcttcgtggttccaggtcgtgcgggtagtgaagaattccgtcaatctgccgagcgtccagaatggaccttgtctggtctgatcacctataagccgactgatcgctggatcttcgccctgaacccacgttggcaaggccctgagcatgcttacgccgggaccaccctggcgcgcatggtcgatgccagcgggaaccgcgttgtggaagacgtcaactttggtgactacttcgtcctgaacggttcaatccaatacttccttggcgataaccgccagcaccgcttcttgctgcgcgccgtcaacatcctggatgaagactattatgagcgtatgtccggtgggtctggccttcaggtttcacgcgcggccgtgcgcggggagatcgggccgaacgattctgcttactatcgtcagtatggctggaacgggaaaccacaatccttcttcctgcaatacgaatactcattctaggtaaaatcaaagggttgggggccgcctcaaccctttgacccacctggaggaaagatggcggcgttctcacccccctgagcgccgcctcttttcgtgttttggccatgaatcatggagagcgatatggccctttctcggcgtttatttctggctgccaccggcgcagccctatggaccccatccctggcgcgcgcgcaaagccagaactaccacttcacgcttggtgttgcttcgggcagcccgcgcgaaaccagtgtcgtcttatggacccgcctggcccccgatccagaaaatggcggcggcatggccccgggccgtgtgcaagtgcgctatcgtttatgcgccgatggtgccatgcgccaaacggttcaagatggtttagtgcagacttcggatgccaaagcgcattcggtccatgtcaccgcgcgcaatctggaaccgggccgtgaatatttctatcagttttattatggcgaggatgaaagcccgatcgggcgtacccgtaccgccagcggtgctgccagcgcgatgaagctcgccgtggcgacttgccagcattatgaaagtgggcatttcgcggcctataaagacatggctgattggagcccggactgcgtggttcatgttggcgattacatctatgaagggcgcggcaatccggttggtgtgcgcaatatcgaatatcgcggcgagacttatacctttgccagtgtgcgctctcacacaggatcagagatccaaacattgtgggattatcgcaatcgctatgcccaatatcgcagtgatccgcatcttcaaacggcccatgccgcggccccgtggattatggccatggatgaccatgaaatcgacaacaactgggcgggtaacatccctcaggatccagaaaaacaaacacttgaagagtttttgatccgcaagcgcgctgccttccaggcttattatgagcatatgcccctggaagaagccccgagcctggccggtcttcaacaatataacgcctatatctttggccccgcgcaaatcaacctgctcgacacccgccaataccgctccgatcaggtgtgcggggatggctttcccagtgaccagacctgccccgatctgatgaaccccgcgcgcaccatgaccggtgatgttcaagaggcttggctgatggaacagcttcgcagctccggcgcgcgctataatgttctggcccagcaaacgtggtttgcgccctatcgttatacgtcagggcgcgaatacaatatggatcaatgggatggatatccggtccagcgccagcgcttgattgatgccctctctcgagatgtcgccaatcctatcgtgctgagcggtgattggcatagcgccgccgccatggcgatccataaggagcccgaaaacccgaattcgcaaaaaattggccatgaattcgccgcgacctccatctcctcacattgcagctgggcggggcgcttgcatgaagcagaaaacggcaatgaccatgtcgcttacttaaatggccacaaacgggggtatctgcgctgttctgccgatgaacgcgcctggacctcgacctatcgcacggtcaatgatccttatgatcccaacagtacttgtacgagcgatgccgaactaaagaccagcgacttctagacgatcatcacatacgccgccgtcttacgataacagatggcggcgtatgcgtgaggcaatctgatcaagccccacaacggttatgaataaaaccagcaagatcgtgcccactctatcatattcaaataagtcatagcgccctttcaattcctggccgatcccgcccccgccgaccaggccaacaacagcggccatgcgaatattacgatcaagcaaatagagggtctgcgcggtaaaactgggcaagacctgtgggatgacggccaggcgtaaaatgctcagctggcctgccccaatcgcctgtaaagcctcctgcgggcgcttatcggcggcctcaatatcatcggcatagaatttgcctaaaaagcccgcgccatgaagggtcagggccaaaatcccagccaccggaccaaagccaaaggcgatgaccaaaaacaaggccgtgatcaattccggcatggaccgaaagaaactcaccacaccgcgcgcggccccataaatcacaaaatgcggcgtatagtttcgcgccgagaggtaggccaaaggcaagctcatcacaatcgcgaaaatcgtcgcccagatggcaatctcaatcgtctccaccatcttggtaaggacatacaataaatagcccgcaggctcgactaaaacgcgttgggtatgcgtgacggtttctaattgcaaagtatcagagttaagcacctgttcttgaacatcaacgctttcaagatgagaaaaaggtggcaagcgggcttcatcaaaattctcgatccgcgtcacgggtttgcgttcttcaatcgtgatcgggaacatctcaccggtaatgcgacccaccgcatcgcccaattgcgaacgctcttgcaggcctacactggctgcaatcgcttcaccggtttggatgaaaatgcgctccagccctaaacggtgcgcgctatcgcccatgatcaccagtataatgaccaacccaatcagcgttcgccagccaaaggggcgttgaacactccaacttggcgcgacgccgcgacggcctaatacgcttttcattgcagaacgctcccgtgcttgcctacgccgcaggggcgctcatatgataaatctgatgcaagacatcgccacttaaggcgcttggcggaccattaaacaccaccacgccctggtgaagcgcaacaatacggtcgccatattggcgcgcgagatctggttggtgcaggctacataaaacggccgcaccgcgttcacgagccgcttcacggatcagacccaaaacatcatgggcaatcttagggtccaggctcgccaccggctcatcggctaaaatcaccgccgggtcacacatcaaggcgcgcgcaatcgccaccctttgttgttgccccccagaaagacgcgccgcccgccggttcacatggtccgcgcccaagcccacgcgcttaataagctcgagcgccttattctgaaccgaacgaggataaagcttgatcattgcacgccacacagtctgctgtgccaacgtgcccgccataacattttgcgccacacttaagcgctcaatcaggttaaattgctggtggatcatcgcaattttacgtctcacccgcgccatattggccgtgctcaaacgctcaccggtcacagcgatctcacccccgctgacatcaaccaagccattgaccatgcgcaataaagtggttttgcctgagccagaagcgcccaagaccacgcaaaactcgcccggggccacatcaaaactgacatccgccaaagcctgatgcccatcaccaaaggccttactgacgcccgtaaagcttaacgccggaccgtctatcgccaaccgatcttcacacgaattgaaatcacgcatcagcgacggctcgctgcgcgcactatggcgttcgtcacttcgccctcaacctggctcaggcgtccagcggcggtatcaataatctcatcactgacatccacgtcatagcgatcaacccgcttaccgccatagccgcggatcatctccggcgtgacccccggggccgtatgcacatcacgcaaagccgtgcgcaagctggctttcatctcagccggcaagtcgggatgcagcgccaagggcggggtggggataggtgcggagcgcgccagaatgcgcaaatcttcaacgccaatcgcaccctggttcacagcgcgaacataggaatccaaagacgccgcacctgcgtccacaaccccggcctgcaaagcgcgcaaggcattggcatggctatcggttatgcgaatactggataaatcaccaaccggatcaaggcctgcctccatcaccatcgccaccggatagataaagctggatgtggagtgaaccgagcccacggccaaagaatgcccgcgcaaatcctctaaagtttggatctcagagctcgcctgcacaaaaatcccggcataatattgcgactggccatttttgacctccatggccagaagctcagcgcaaccacgatcgcgcgcctcgatataagacgcagccccgaaccacgcgatatcggccaggccggagcacatcccctcgatcaccgcaccatagctgtgcccggtcacaacttcgaaatggagaccggtcgatcgcgttatcgcattaaaaaggggaaggaaatctgcttttgtgccatcttcagtgcccccatcagcagggatcagcaacactcgtaaaggatgctcggcactgccatcagcacgctgcgcccaggcggggcttagccccgcgcccaagacgatcacacacagcaaagcgcgaaatacggctctcataaatccctccccttacacggatttattcgccttgcgctgccacctcaccacgcaaggttaggctcaaatgctcgcgggggcgaatttgtgtgttgagaacctcaaaggtcaaagccacatcacgcacttgctcgcccatacgcacctgtatgtcatacacgccgcgtgatggcactgtgatgacatcgctgacattttggaaagtttcttcgctaagattctgaagaataaagggcagcgggcaaacattttctacggtgatcggcaagacactacgctcacccgtatattgacccggcttcaggctaagacaggccgcaaccaaagcctcaacatgggcctctcgcccgatcagatcattataatgccaggccacagtctggccttcaaacaaagccgccttcaaggctgatgggcttttttcgtccgccaataccaaagtcatcgggcgatgaccgccatgacctgcatcatgggtccaatccaccaagccgtgaatatccgaagtcgccaaaatcgtcagattatggtccagcgcgatttgtaaggcatgctcagaataagcatccaaagtgccgttcgccacttcaaccccatgcagcaagccgcgtgcaatcaggtcttcatgcattggcgtaatgcgcgcaatgccatcaggggcttgaggtaaccaatgggggtggttccagaagataaaggccccttgatcctttgccgcttgaaacgccgcctcggcatcctcgactaataaagcgttggcatcggtgacgaaaaccgcattgacgtgaccggggggcatgccgcgggtcacttcggcaccattgatcaacataacatcggtcatatcacgattatgcgcgtgctcttcagccacttcatgggcccgattgcggtccggatgcggaatgtcatggctatggggctggtgttcaagatgctcggtaaacgccaaagcatccaatccatcgcgcacggcttcttcgacacgaatggacggccagacatgcccatcggaaaagacgctgtgactatgcagatcgaccgccaaaaccgtgcgaccatcttgcgtatttggaaaggataccgcgcggtcctcttgggctcccgccagcgttgaaacactcaatagagccgtcgtaacggccaaaccacctaaagcccgcatggatatgcctccgcttcagacgggacgccccgcctgctctccctcgatggttcagagttagcaaatctttgtgacaccggaatgaattttactcaattttattgcggatcaatattgcataaaatgcaacccgtgcgcgctacttcattgtggcccaccgaacataagtatgatatattcacacccaaagagcatattgccctatagaaaggtcatccatgggtgatttacgtaaaaccgtccttttgaacgagcattataaccgcttcatcacggcccagctggaaagcgggcgctataacaatgtcagtgaagtcgttcgcgccgggctccgcgcgctggaagatcatgaaacgcgcctggcccatttgcgcgccgacatagatgccggtctggaggcgcttgacacaggcgacgtcctcacactcgacgcaccaagtaatctggcccaggacatcatcacgcgggggatagcgcgatcacacgcaaagccttagttctcacccgcccggccgcgcgcgatctcgatacgatttatgaccatatagccgaagacaatcccaatgccgcagcccgtttcatacacggcttggtgaataaaattcaatggattgtagagcgtgattatcccggtctcaaccgtgatcatgtccgcgaagggctacgtgcctgcctttataaaaagcgctgcatctatttcctcaacgaagacacgcgcatcgtgattgtgcgaattctccatggcgcacgcgatattgaaacagcctttggggagggatgaccctcgcggcaatcacactctaacggcgacaactcaccctgggcctgagcttaagccatccgcatcgagcggagtaaagaggttgcggctggaccgtgttttctgatctgctaagctcgttcagattaaaaggcctcatggttataggttgcggctggaccgtgttttctgatctgctaagctgttatttgagcgcttgtgcgcctgttggccgttgcggctggaccgtgttttctgatctgctaagcttgtgcacagatcatagcacctcatggcttgttgcggctggaccgtgttttctgatctgctaagctcgcgagcaccagcttcttgagcctggatctgttgcggctggaccgtgttttctgatctgctaagctcataccttccgcgcgcgatggcagcaagcagttgcggctggaccgtgttttctgatctgctaagctcgatatgcgggtaattctctgaaaattttagagaattacccgttttaatttcaaaaaaatcaaacattctaccgaatattatgtgaaattggtccatttttttcgcgactcaccgagtgttgcgtgcgcattcaacataaaaagccgcccccggagggacggccttatttggtgcaatcaaggcttgttaacggccagacgcgtgttttctgatctgataagttcagcataattgcgacaggagaattcccctgtcaagcgtcaaaccgcaactacatcaccacttgaaaagattgacgtgccatgtgctatgtaaaagcgacagttggggtggaccaactgtctaatcgatggtattttcaatttctgctttgatgaggcgtgctttgtctgtttggacccagcattgcacgctttctctaccagcgacttattaaagtctatatgactttacacgacaggtcaactattaattccctacatcaccacataataaaattttcacctgaagggtttgatttttagagaatccccccttaaaatgccttgaattaagggtggctttatgactgaaaaatataaacctctgctgttcgcatttgatctgggcaccaattctataggctattgggtttacgccctaaactcaaaaggcgaacctgagtcgagcaagggggggggcgtacgaattttttccgacggccgagaccccaaatccaaagcctctctggccgtggcgcggcgtgaagcgcgtgcaatgtcgcgccggcgcgatcgctatatccgccgccgtaaagccctgctgcgaactttaagcgaatatggcctgatgccacgcgatgcgaaaatgcgccgggctttggttcaggaaacgggcgatatcgcccaaaaatccggaggaggtagcgatggcccctatgaactgcgcgcgcgggccttggatgaaaaactgccgctggaatatattggccgggcggtgtttcacctcaatcaacggcgcggatttaaatccaaccggaaaaccgaccgtaaagacaatgatttgggtaaaatcggggcgggggtgcgcgatttagaggcgcagatcatggcgtccgatgcgcgcacctatggcgagtggctggcgaaacgacggcgcgcggggcaaaccgtgcgtttgcgcgcgggctctgatttattaacggctgagggctatgccttttaccccagccgcgccttgttagaagcggagtttaaagcgatttgggcggcacaggcgcaatactatccagacattttgacatctgaacgcgaaaaacatgtctttgacattattttctatcaacgcccgttaaagccgccacaagtgggtaaatgtgcgttcaaccctaaagaaacgcgcctggccaaagcccatcccgtttttcaggccttccgcctgtataaagaggtcaatgagctggagattgttttagacgatctgagccatcaaaagctaaaccgcgcgcaacgcgacaagctgatctggttattgcggcagaaaaagaagctgtcctttgcaaaattgcgtacagaattaaaactgccgcgcacaaccacgttcaataaagaaagtgagacccgaaaagatctggtgggcgatgaagtttatgtcctgatggcggatgccaaacgctttggcgggcaatgggccgatttcacgctggaggaacaatgggcgatcctcaccaagctgaaagaagaagaagatccagagcgcctgctcgattggctgcaggcccactataagctggatgatgatcaggctatcgccatcatcgatgcgcccttgccgcaggggtatggccgtttaggattaaccgcgttgagcgcgatgttggacgcgctgaaagaggatgtcattcccgaagccgaagccgcaaaacgctgtggctataatcactctcgcttgggctttgaaagcgaagcgggcgaggattgccttcccccttatcaagaggtgatggaacgccatatcccgcctggatccggggatgaagatgtggtcgagctggagctgaaagacagtttacgggacggcctgaaagaaggccccatcccgattggctatgacctttataaagggcggatcaccaaccccaccgtccatattgggcttaatcaactgcgccgcctggtcaatgatttactggtcaagcacggtaagccgcaaagcatggtgctggaactggcccgtgatctgcaaatgtcggaaaagcagaagacggaatacaataaggctcaagcgaaaaaccgccgcgaggctgaggcgcgcgggtcattattgcaagagatggggcagcgcaataacgggagcaaccgcgtccttttgaaattatgggaagagttgaacccgaaagaccctgaaggacgggtttgcatttactcgggtcaagccatttctgcgtctatgttattctctggtgaggttgatattgaccacatcctaccctggtcgcggactttggatgatagtaaagccaatctgattttatgtatcagcgccgccaaccggcaaaaacgtaatcgtgcgcccgcagaggttaccgaatggcaaagccattatgatgagattttggcccgcgcacaaatcttgcccaagaataaacgctggcgctttgcggcggatgctatggcgcgatttgagggcgaggaagactttgttgcgcgccaattaaccgacacacaatacctttcacgcttggccaaagaatatttggagtgtctttatcctttcgaggaagcggatgagcatggcgagctaaagaaacgtaatcatgtgtgggtcacgcctgggcgcttgaccgagatgctgcggcgaaattgggggcttaacagtttactgggtgaccaagatcacgctgaagtcgcgcaacccaaaaaccgccaagatcaccgccatcatgccattgacgcggccgtgatcggggtgacaacccgcgctttattgaagcatatttccggcttggcccgcactgtggacagccaaaacttcgattacgccatcaagaaaattattgccgacaatccgccttggcctagcttccgtgaagatttgaaagcggcgctacagcccattgtggtcagccataagcccgaccatggccgggtgtcccaggctggatataaactcggcaagggccagaccgcgggtcaattgcacaatgataccgcctatggacctactcaagagacagacgccaaaggcaatcccatcgtggtccgccgcaaagccttcaactctcttgtcgccaaagatatcccgaatgttcgtgatgagcgcctgcaggctgaactttatagtgcgatcgaaggtctccagaaagacaaggacattgctgaggcgttagcggtttttcaaaaaacccataagcaatttaaaaatattcgccgggttcgggtcgcggaaaccctatcgaccatccccattcgcgattccgacggtaaagtctttaaaggctttaagggggattccaattatcgctatgatgtttgggaaaccctggatggtaaatggcattgtgaagttgtcacaatgtttgatgttcaccagagagactggacttcgcctttccataaagatcaccccaccgcgcgtcgggttctgcggctacagcaaaatgatatggtcgcgtataaccatcccgacaaaggctattgtattgccagagttgtgaagtttggtggaaatggtcaaattttctttgcgccgcataatgaagcaaacacggataatagaaatcgcgacaaagatgaccctttcaaatttttctcaaaaactgccagcggcttgaaggcgatccagtgtcgtcaaattcgtatcagcccaagcggccagatcttcgatcctggcccgcaggaccaagagagcaaggcgcaaaagcggcagattgcgtaagcgctaagcgcccttcccagcccctaaagcgataggcaggccctctatggatcggattgttgatatcacgacagagggtctgcacctcaacgtctatcgcggatttttgatcatctcacaagaaaagcacgagcaagggcgcatcccgctcgatgatatcggcgcgttgatcgttcatgcccatggcacaacctggtcgacaagcgtttttgttcgcatggccgaacgggccattcctgtcgtgctgtgcgggcccaaccatgccccggtcagtgtggtgtggccttttgaaggtcatcatttacaaggcgcccgcttaagggcgcaggccgaggcagcgaagcctttgaaaaagcagctctggcaaaggattgtcgcggcaaaaatccgtatgcagggccatgtgctcaatgccaatggcaaggatggcaagggcttcaacctgcttgcgcgcaaagtgcgctctggcgatccggataatgtcgaggcccaagccgcacgccgatactggaaagctttaatgggtgcagagttctctcgcgatcaatccacgccgggggtgaacgcccttctcaattacggatacacggttttacgcgctgtggtctcgcgggcgatttgcgcctcgggcctccatcccacattgggcatctttcatagcaatagagccaatgcctttgccttgtctgacgatttgatggaaccctatcgccccctggtcgatcaaatagtgttcaactgtcttcaagaggcgcagaccgagctagcacccacgaccaagttcgcgctcacctctttaacgacctttgatctcgatagcggtattggcctttcacctgtagcagtgcaggttgcacgctttgtccattctctcgcgatgagctttgaaagcggcaagcctcaattggaaatctttaagcccccaagtccgcttgaattggcaagtttagggcgcgccgccctggagggggaggtatgagtgtatcaaagcgcgccaataccggagcgcgtcatttaagtggatatcaaatcttgtggattcttgtcacttttgatttaccagtcgaaaccaaagcacagcgaaaggcggctacgcaatttcgccagcatctgcttgatttgggttttgagatgagccaattttctaattatatgcgattttgcaaaggtaaggagcagtttgaaacttacgtcaatcgcatcgaagcggcgctgcctgaatggggcaatatatacatctatcaatttacggatcgccaatatgaaaacatcatacgtttttgcgaccaaagtcgaaagcgccagaaaaaaaatccaaatcagctggcgttattttagcgaatgtctcagtttttctcatttggaaatgggcaatttcctaattatttcaggaaattgcccatatagctatcttagcagatcagaaaacacggtccagccgcaactggtcatggtttggcaaatgatttaatgtatcttagcagatcagaaaacacggtccagccgcaaccgcaagagcttgatgaggtggtgagcgagaatcttagcagatcagaaaacacggtccagccgcaacacaattcttgctccaagactatcgagtcgcatcttagcagatcagaaaacacggtccagccgcaaccaagaagccaaaggcattgttgacgccattatcttagcagatcagaaaacacggtccagccgcaacaagtaatcaccttcaaccacgtccagaacaatcttagcagatcagaaaacacggtccagccgcaaccggccctgtccgtacattagccgcttgccgatcttagcagatcagaaaacacggtccagccgcaacacgatgaaggcagggcctaaacgctaatcacctctcgcgcctcttggccttcataggcccctataggctctaaccacccccaatgatcgggggtacgcccttcaaacaggccaaagaagcgatcctggatcaggcgggtgatctcgccggggcctttggcccgtgtcggcagatcatcgaaggaccggatcggggtgatttctgccgccgtgccggtaaagaaggcctcctcacacagatacatcatctcgcgcgccaaggtctgctcaaccacttccaagccctcatgctcggcaatcttgataatgctatcgcgcgtaatgccctgtaaaattgaagaggatgccggcggggtatagagcttgccatttttaatgaggaacaaattttcccccgccccttcggacaagcgcccttcacggtccagaccgatgccttcggcgtagccgcgcgatttggcttcgcgggagatcaaatagctggaaagataattgccgcccgccttggcccccgtcggcacggtattcggggccagcctattccagctggatacgcacacatccacgcctttttcacgcgcctctgcgcccagataggcgccccacgggaaggccgcgatgaacacctccatcggcgtatcggcggccggaaccaagccgatggaaccatagcccatcatcgccaaaggtcggatataggccgagctaagatggttggccgccaccacatctttacacgcctggaccagctcctgcgtagtaaacggcatctcaaaatgatagattcgcactgaatcgcccaggcgcgcgatatgatcggtcaggcgaaagcccactggccccttgggtgtgtcgtaaacccgaatcccctcaaacatcgaggtgccgtaatggatagcatggctgagcgcgtgaacctgcgcctcggcccagggaataagcttaccattatgccagatcgtctcgactgcattaatcgccatagtatgtcccctttaggccgctgatgtcattgtttgggttttacgcgccgcaacggcttcgccattactcaacgcatcaagataagcattgacgcaggccggcatgatgtcgcgcgcgcgggcccggccctgatagagcccgccaaaagcttcaatttcgatatccaccagaacatctgcgcgttgcggatcactggccactggttctgggtccatcgcaatataatgcatgtcgatggcactaacccgcgcctctataccgcgcgcgatattgatggcgctcaaaatactatccaaggctccgctggcgcgcgcggtgccgctgacggcgccatcggccttatggatcatctcgatatgagccagggtctggctgcccgcctcgcccgaggtattgagtgccattgcgcccaaagtccattgcggttcaaagctttcgcccttctccatctggctcagcaaggcgcacaagcgcgcctgatcaatcaagccaatctcatcggccatgagtttaaacgcggcgaagacctcatccaggcgctcgccctccaagttccagcccagatcggcggcctgcgccttcaaggcgtgcttgccggaatgcttacccagaatgatcgcgcttttatcaacgccgacatcttccgggcgcataatttcataggtttcgcggtttttcaggaccccatgctggtggatcccggattcatgggcgaaggcattggcccccacgatggatttgttgcgcggcaccggggtggaggtcacctgggccagggtatggctcgccgcgatcagatgacgggcctcgatcccggtttgcagattgaaaatatctttgcgcgtgcgcatcgccatcacgacatcttccaaagcgcaattgcccgcacgctcgccaataccggtcaaggtgcactcaatctggcgcaccccggcgcgcaccgcggccagggaattggcgaccgccatccccaaatcattatgacaatgggtggagaagatcacctccggcgcacgctcgacctcagcgatcaacatggaaaagcgcgcaaaaacctcatccggtgtggcatagcccaccgtgtcgggcacgtttaacaccgcggccccggccgccgccgccgtcgagagtgcctcgaccagaaattccggctcggtgcggaaagcatcttcggcggagaactcgacattgtcggaaaactcccgcgcataaccgaccatgtcgcggatccgcgccaggatttcgcccggcgtcatattgagcttggcttcgcggtgcaaaggactggtgccgagaaacacatgaaggcggcgcttgggcgcggactggatcgctgcgcccgcacgttcaatatcgccgggaatagcgcgcgccagggcacaaatgcgcgggccatggatctcttgcgcgatacgctccaccgcgcggaaatcgcccggcgaggccgccggaaagcccgcctcgataatatctacgttcagatcggccagagcctgggccatcatcatcttaccctcttcgcgcatggaaaagccgggggcttgctcgccatcgcgcaaagtcgtgtcaaaaatctggacatactcagtcatgatacaccttcacacgcgctcgaacgggagaggaaaggccggtaagggcaaggctagcggtcagggtcaaaagaagcgcgagggcgaaggtcatggtcaaatccttaatcgttggcggtgatggaagaggatggagataaaagaaaacccccgctccgggttggagcgggggttggtggtctttgctttagtggtcttgcgacacgtcagacaggcacccgggctccagatatgaaggtcataaggaggagggcagagagaaggacaagtgtgctcaacgcggcaatgcgagccttgcgcgtatcttgagccatcacttttgcgtctctgcgggtcattgccggtctcgtaaaaaaatataagcccctaccaggagcatgaatttagcttacccataagttcaacttgaaatcaagcccctatagtcccatagacattacaaagcttaaacagcgaaaaataacgtttaaatacgccttgataaacagataatatgcacaagatgatttgggggcctcaagttaaattttcatcagacgattaaagttagcccagttagtatatgcggcggttccggtacccgactttggccgctatcttcaccatcagaaccaaagcaatttaaacctttagcctctcaccagagcatgctcaaagacacactcgatcgtgcatgacacaatcaccacgcacatgttctcggcccaacatgcatcatcaggtctataaaacatcgcgcacacatcgagcaaacaacatctggccaagctacgatcttagaaccttttgagcgcgattcagcaggcgcggtcgctttagcttgcctaatctgtgataaaaatgatctcgctttaattctaccagtcgatcatgctaccgaagatgtaaaagcttttcattaagctattacatttagtattgaaaaactcttagcggtcaaattgaaaaaattggcatagcccccacctacactgaaaccagatatggctatattgaagcagcgccggattattcttatccgcttcaagttaatcgccttgttgaaaacctgacctcgatactgcacagtgttattttgaatctggcaaatattactggaatgcaggaatcttcctttttaaagtcagcgctatgcttgaggctatgacacactatgcccgcgacgttgtcgaccatgtgaaagcattaattcacgagcaagatactcaagagactgtatttccaacagtgcacagttttcaccatcaccctctatttcaatttattacgccgttgtggagtttctttttccaagcggataaatcagtgtgatgcccgtatctatgggctgggctgatattggcgattatgacgcgtaacgcgcctattggacgacccaaaatgaaccggaacgtcacctcactttacgtggtcctgtccaagcccaaaatgcacacaattgctatttgcactctaaaggaccctttatcgccgttcaaagcatgagcaatatcagcatcgttgccaccaaccaggtcattctggtttataatttagatcaagttctaaaaagtcaaaaccccttctcatcaatcaaagctcttcgagtatggcaatttattactcgagggcttgcgtcaggatgtcagatcctggcacttcaagaatatgcttgacgctggtccgatttggcttgggatgataatattggcggctttaaagaagccctcgcctttgatgcccctgaaacagaggccttgccttgtcgacgcatgtgccgtggcataactagcctgttgcaagccaatcaacaccataataccgcctttgatgagcacacacgtttagatacttattatgtgccgattagccttaacaccgccattatgcaatcctaggctgaaaacccaatcagcctgggactatgatcatggagatttagctcacaatcaaacattttctaattttttcagaagcatcatacctgaactatagagtggtaaaatgcaaaaacctatgccaaatattaggcggtgtttacactagcattcagatcataagctgcaatgggggaaaagacggtgcatgatccaattcaactcaaaaaagatgcggcaaagatccgcgcatcaggctatttcgatgcgagttggtaccggtccaagtacccggatgtggaccagctgggcatggatccagcggagcattatctaaaatatggcgccttaatgctccgcgacccggggcctaaattttcaacccggtttttcatcgatacccaccctggcggctggcagaaaaacacgaatccattattacgttttctcggaaaaaatgctggagaaatgaccccccgagaacgcaatgtgctttggggggctgcaaacgtggccaaacggggtcagcatgaccgggcaattgcccttgcagagatgtatttacctgagggcctcgcttacaccgcccatatcctgcgcgctaacgccgcgctggcccaaagtcgggaaagcgactggcttgcacacctgaatgcctatctgggacaattcggtgtggaaccactcgctctaaaaggcgaaggcaccctaatcgaccgctttaccaccacaccgctgcctccggtgaccggcggcccccaagtgtcagttattatgccagctttcaacgctgaagggacaatccgtgcggccgcgcgatctatactcggtcagacctggcagaacctcgaattgctgatcgtggacgacgccagcgaagatggcacctgggcagaaatcaaggaagtcgccgcaagcgacgatcgtgtgaagatttttcgcaacaaggccaacgtcgggccgtatgtctcaaaaaatattgctttgatggaagcaaaaggcgagtggattacagggcacgattccgacgattgggcgcaccctgaacgaattgaaaaccaggtctcatttaatattaaaaataaagacacagttactggtaacatgattagaatgctaagggttagaccaagcggagaaatttcaaacattcgccaggtaagccaagaacatgctgggggggtgctgcagcgtgcatcgattagcgcaatgtttgatgcagctgcattcaaaaagtgtttgggattttgggattccgttcgcttctctgcagactcagagcttcttgctcgcgcgcacatactgtttcctgacagaataaaagtgcaagataaatttggcatgctttgtttagaccttgaggacagccttcagaacaatcctgtatacggaataagcgaaattcacggcattagcgcaccgaggcgaagttacagagaagcctttaagaaatggcatgagaaatatattctgcatgaccctaaaaaggcttacgtgtcatttccattcacaaataagaggtttagcatccccaaggaggctgaagtccccgcagacgatattattctaaacgtaaacggtaactggcaatgaaagtgggatcataatggcggaagattcgagcacaaaaaaaggcagtgggtattgggccgggcgctctgagagcatttatttatacagtgtccgtcaactggttgaaggtttaggaaaagattgtaagacaatggtggatattggctctgctggatgcccctaccttgattggtttgattggatccctcaaaagacctccctcgatatggcgcgtccttatagaggcgaaggcataaaatcggtacaggccgattttatgcaatgggagtccaatgaagtatacgatattggtacatgccttcaggtattggagcatgttccactagcggaagaatttgcacagaagttgttgcagcggtgcaagatcttagttgtatctgtcccatacaaatggaaatttggaagaaacaacactcatgttcacgatcctgtagatgaagagaaaatgaggtcttggtttggaagaagacccaacttttcagttatgataagtgaggttaagtctgatgcacctcgccttattcaagtttacgaacaagattgggacaaacactgggcttccttaaagcagagagagagactaagaaacgttacttctgattaatgatacctagcaatcagttagcgctgtttcgccgtcattggggatagatgatgcatccagataggcctccttaggctatccggggcagttgattgagcattagagacaccaaaccatcaggtaaggccttaggatcgacacctggctagccgggtgcgcagccataggccggttaagcatcggagagtcggcagcactatcgaagtagaccattccacattccataacaaattctgccgcatagatcagccccatgaaaacagaattaaggagaacctggaaactcgtttcattacttttatcgagacgtttatgatacctagaatgtcggtgctgggactacgtcagcatgtaaacctatacaatatttatagtgagtttggcgtgcacctgagaaacaagatgataaaacggcgggtaaagaaaaaaattcgcaatgcccatgccgaaccatcggcaccaactatgcccggtctattgattttgtctatgacaagctggcgtcaggtaaaaagcttcagaggcggaccagaatcccaagaatactcataatgactgagggcgactagggggctggtcactcatgatctgacccaagagctccagcttcaggaggccgccgatggcgatgaagaacttgaccttgtttgtgacaagaaaaagccagaaaagcgcttaataagtcactgctaagatacttttgcaatctaacagtctcattttccattcagtgtactcaagatgcattgtggcgctggtcccattcagacattgcagcatccaaatttccacgcgcgccgatccaattccagaaactagggaaatcgtcgtcaatctcctccaaacgaacagtcataacgcgaggcttatcagcaagaaaatgtgtgatattgcaattaacagtatccacatagtctcgacagagatctaggagcgtatcttttgtatttcgcgtcttcgccgacataagtatctgggtgcgataagctaataagattccgcggtcagctctttttaaaaacgatcgggcgacatcctcccggtcgcgaagtaggtggacatagctcgctttctcaccccagaaatggtgaagccttcccagcatccatgacagacggttatccacctctatatggcgtgcggggtaatcaaaccgagaagagcccgtcatccaagttcggctctcatgggccgctgtaaagttatcaatatgagccgccgctctagcaaatgtgacagacccacagcgacccgtgcatagtacgaatatgttttgcaagtctaatcctttcaatgaaggtagtgatccacagaacagtaaagcaatatagcaggtatgaacttgcatgctgacctgttgatcgttagcatgcaatgtcaaaaatacgaactttaagagcactcatgcccgccccttctcgcccagaactatcccttcccgaggcagaggcaaagcacctcagatcagcctataaagctgccaccgtgatcctcgaatacggttcgggagggtctacagtcatggccgccga

SEQ ID NO: 3014 - DNA, 23342 bp, synthetic construct
  source 1..23342: mol_type = other DNA
  misc_feature 1..23342: note = Synthetic
cctataggtcttgcgctcagcaaggatgacagcttgctcaaccacgggaacacctcgtccaggcgtctgttcgcgataggcccgctcgcccgcgcttcctacttcgaaatcgattccgtgccagacatccgccctcaatgcgaggccctggcgagacgcctcctatagcctcaggcgcaatgccacttgttcgcggcattgcgattaggcaaggcgatcactcgccttgaggcgtgaagcttgcctgatgcaccggcccaccagcaatgctatgccctgaggatgcaggatcggctcctggcagaagtcccgatacaagagcaacagtgaagccgacggccatgataagcccggcgatgggcttcaggcgccccggtccaatgagttttcgaacggaaaacatgacggctctcctcgatcataatcaagagacatgccgcagacgttccacgcaacgcgtgcgcaaaacggcggcaagctgatcataagtgacgccataggcgagatcgtcgccatgttctccaagaacatccttggctggagcgaaaaccgtctccggcacgatatcagtgcaggtgcgcatacgtccgaagaccgaacttaccggcacgttcttctggtcgatcggcaccgatggctcatcttcgtagatgttccaattctcgaatgcctcgactgcgttcttgaatgcttcctgcaatgcgatgggtgcatgaccttcatgaagtgggggcagtacacgttccatgtccgtctcctttcagggttgcagtcatacgcaaaactgttttgacagctgtggtcgctcttctcgctttcgttcaatggacgatgcggtgacgtaatttacgttcttcgagttcgaatgttcctctggatcataaagtcatctgcatcgagtgtgacactcgaacctggagatgaaaacctgcctaaggttgaatagagatttcgaaaggttaatgatggacgaaccggagccacttcgcaaacgtgcattttcccctattaccggggcattttcgacaagaggatttttgacgagccctcatttctggaaacgcttttcctaaatatgtccagaccgtctacaaccttgcgccgagcgtagaggaaagttgacagccaatgtcataaaatctatccgttcccgtaagtgatggggttgttctatgcttcaggctgctagtgagatttatctcgatgatccggttggtatcgctgaacgtctttgccgccattataacgaacatggcacggcatcgatggctggcacaaaagggctgatcgaaaccatctacggtcgggcgttcctggttgccgatgatggtcgtttgtcttttcgggttgaggcggatgacgacacatcgctaatctacatgaaaatgggcatgatacatcatctgcgggagttcgcgggtgatgacatggccacgctggcatggacaggcgacggcctgacgggtggttacccgcccttcttccgggaaatgaaggtcgttgaagcctatgatatcaccccgaagatgcgacgggttgtgctcaagggagaaaatctcgagcgcttcacacacaacggcctgcatatacgcctgatctttccgcccgaaggacggaagcctgtctggccggttctcggtactgatggttgcccgatctggccggagggcgaggatgcactgacggcgcgcgtctatacgatccgttcgctcgatctggtcaagagcgagatggcggtcgacattctgcgccacgatggtgacagtacacccggctctgcctttgcgatcggtgctaagcccggtgacgtcgtgggcgttaccgggcccggtggcggcggcattccggattcggggtcgctcttcctgtttggagatgagacggccattcctgccatagcccgcattctcgaagatgccggccataattccagcatccgtgcctacatagaggtggcggacgaatttgaagaacaatcacttacctgcaagggccggtgcgacatcgaatggttgtatcgcgcgcggggcgaacgacttgtcgatgccgctacggcagtgacactcgatcaaatcggtgacgacacgttcttctgggccgcttgcgagttctgtgatttcaagacgatccgcaagcactgccgcacaacgctgaaattgccgcgcgaacggcatctggtggttgcatactggcgcaaagatttgccggcgcgtcccgcaaaagcagcctgacgagggtctatcgtgctcgacgattgagtgcccagagaagataaggcgccccaatcagcgatgtcatcaaccccatcggcagctgataaggaaaagtcaggttgcgcgccatccagtctgaaaagatcatcagcagagcgccggccagtatgctggcaaccaattgttgcgccggacgcacaaacccggccagccgggccagatgcggcgccatcagcccaacgaaggacagcggtccgacgaacaaagtcgcagccgccgtcatgcacgcagcaaacgcaatgagtacaccggttgccagactatgcttcagcccaattgcctttgctaccggtgcgcccagtggcaggatagcgagccagcgcagcaaaaaaaagagcggcgtgatgaaggtggcagccagccccgttaccagcacggcctcccacggcgtaacgttctgcgtcgacccgctcagccaggcaagcaggagcatcgactccggcccgccacgggcgatcacgatggtgatgatcgatccgcacagggcaccgaccgcgatgcctgatagaagcaggcgttccgacccaaagcgatagcgagccgagaggaaaagcacaatcgccattgccgcgagcgcaccgacgaaagcgccggagaattgtgcactacgcccaatgtcctgagagaaaatcagaagggttgcaagaccaacgccggcgccggaggcaacgcccagaacttccgggctagccatcgcattaccggtgatgcgttgcatggaaaagcctgctgcggccagcataccacccgcaaccgcaccggctagcacgcgcggccaccgccactcgaagagaagatcgaacatctcgccctgagctatatgccagcctgtgccgctacgcccaatcaatatcgcagccactgcaaacgtgataatggccagggtcaaagcagcaatcatgcctcgcgggtgacctgtccggcttacgacgttcaactgccccgaaggttgcagctgcgtttttagccgcggcaggagccaaagcaagaacgggccgccaagaagcgcagtcgcagctcccgtcggcaaaagctgggtgccgccaaaggaaacgctctgcacgaccccatcggccagaaacaggattgccgccgcaatcagcggcgaaatcaccaacacctgtcgtagagtgcgtgctccagctagccgcgccatattgggtgctgccaatccgacgaaaccgatcagcccgacctcggacgaaacgctcgcagcgagaaacaccgcaacgcccagcgcacagaaacgggtcgccgtaacgcccagaccaagagcccgtgcattggcatcgtccagcgccagcagaagcagagggcgatacagcaatgcaactgctatcgccgctaacacgagccgaattgctaaattgttggccggggtccagctctgctgctccattgcgccgctgccccaaatgaacagcgacatcatgtactcgccattagcaagcacaatagtggagctgattgaagcggccaccagcgagatcagcatgcccgaaatcactacggtgactggatcgagcgaacgtcgccatgacaatgcgagcacaagcccgagggcaatcgctccaccggcgaaggcgaccggttcgcgcgcatattccatccatgtgggcgcgtaaattgtcgctgccgtcattgcaagttgcgcaccagaggcaacgccgaccgtcgagggatccgctataggattacgcaacacgcgttgcatcagtgcgctggccaagcccaatgccgcccccgcaagcaatgcaaccgcgccacgcggcaatgtgctgtggtaaaatacaataagacgcagcaaatcgccgtcgcccggccaatcacgccacagaacatggccaaagaatacaagcgctaaagttccgacgccaaagagaatgagccgcaccggattctcgcccccggttctgatgtccgcgctcatgccgcagccctcagtgcttcctccagaagtcgcgcaaatcggcgcgctgccggaagaccaccgaacggattgatcggctccagcacgaaagatcgtccttcgcgcaccgccggcattacttgccagagcgcactttgtggcatcacacgcttcgcgtcgggcggaataggcgagatcatgatgacgatcgcctctggataatccgcaagcacctcaagtcccaccggtgctgtcgcgctatagcttgtctttatgccccaagcattctcaaagcccattttcgtggcaacatccccgaacatggaatcgccgccgaatgcacgaaaatgacgcggatcgccaatattgataatgaggagcgggcggcttctatgctgcgccagcctttctccgcgtttcgccagctcggcatcggtggcactaatataatcttcggcttccctttccagagcgaaatccgccgccattttgcgcatggcagcttgcgccttggcaaaaggctgttcgccgctcacgtagatcggcaaggatctgaccggtgcgatccgctccatttgcggatgcgcccaggcgctgtaattgctgccatagatcacatcgggtgcgacggcagcgagaagctcgaagttcaccgatccgcgaagccccagatccagcacttcgcctggcacggcgggctcgatgacgacctggcgatagagcattagttcgaccgctgccgccgggacgatgccaagcgccagtgctgtttccagcaaagcccagtccacaatggcgattttcggtgcagccatagcggcgtgcggcgcaagcgccgctgcgcaagcagcaccagccagaaaactgcgccgtccgagcatcatagaacgtagcccaccggcgtaccgtttgagggattggtgaagatacccatcgagatgccgtagatgcgctcaagtacttcggtctgcataatctcgctgggtacaccgtcggccaccaacctgccatgcccgagcgccaccagtcgatcgcaaattcgcgccgccatattgatatcatgcaaaacgatgacaacgctcaaagctcgctcatgcgccagccgatgaaccagttccagcatctccgcctgatgagaaatatcgagcgccgaggtcggctcgtcgagcaagagacactttgtatcctgcgcaagcagcatagcgagccatacgcgctggcgctcgccccccgaaagcgtatcgacaatgcggttgcgaaaggcctcgacgcccgtttgcgccattgcttcctcgactttgcgcgcgtctgttgcggtgaagcgtccaaatgttccatgccagggaaaacgtcccaacgcgacgaattcttccaccgtcatgccatcagtggtcggcatgaattgcggcatgtaggcaagtttgcgggcgaatgtgcgatctgtatcgaccccaatatcctgtcccaggaaacgtatggtgccacgatccgccgcctgttgacgagccagcatcttgatcagcgtcgatttacccgagccattcggcccgatcagccccgtaacctcgccctgttcgattgtcaggttcaggttctcgatgattgaacgtccaggcacacggaaatgtgcagcctccacttcgaaaagcgaaggccgcacatctttgctcataggaacgcccgacaaatccacttaccacttatagctcaggttgcccacgacggtgcggccctcgccatagaagcaaccgaagttgcagctcgcgacatagtgctcgtcggcgatattctgcacagccagcgatgccttgaaatttttcttttcgaaagcgactgaagcatcgaagacgatgttatcgggaagtttgaccgtgtttgtattgttgccataacgctcgccgacatagcgcgcgcccgcgccgagcttcagacctgccagcgtcgtatcctcccggaacgtatagccaagccaaagcgacgcggaatgaagcggaatatctttcagccgattgccggtcgttggaagcaatgttccattcgggccatcgagttcgtctccgccatccatgatgcgcgtatccgcataggtatagcttgcaatcagatcgagaccagccgccagatttgattttgcctccagctcgaaaccacgcgagcgggcctcaccgacctgcgttgtgacaaaattcgtagtcgtggcgatgttcgtcttcgttagttcatagatgctggccgtcagaagcgtattcgagccttccggctgatacttgatgccgccttcgatgatttcccctttgctggggtccagtgcccgctgcgtcgccgtaacagtacctgattgcgggttgaacgaagtcgaatagttgacataaggcgcccacccactatcgaaaagataaagaacaccgacacgtccggtcagcgcctgatccttgacctcggaaagagttgtggttttcgttatgcccttcaacgagctgttgtcgatgtcgaaccagtcctggcgcagaccgaaattcaaacgcaaacgatctatcgcgacctgatcctgagcataaatgccgagggtacggatccgcgaattggttatatccgccaggctggtatccacgctcggcaccgcaccgtaaacgggattgaagacgtcgatcggtgtaatcgttccggtaaaattagacgaacgccattgcttgttactgcgatagtcgagaccaagaagagctgtatgcgcagcgattccggtatcgaattttgcttccaactgattatcgacagcaaagctattcgtcgtttccgactggacattcacgccgcggttcaccgtccgattgtccgcagccaatgaggagaaatagagattgttgaagtctgcatcgaaatgtccgtactgtacattctgacggaactcgaacgtctcgttgaaacggtgccggaactcatatccgagattgccataaaggctttcggcatcgttgaacccaggttcgccaatatagcgattaatcggaatcacaccgttcgggttgaaatcgagcgttccggactgtggcaatcccagaggagacgtgcccgtatcatattgaagcgcgcccagaatggtaagcgaagtgtcctcgtctggcgcccaggtcagggacggcgcaaaatagaagcggtcatcgctggtgaagtcctgctgaccatcggccagacgccccagagccgtcagtctataggagagaacgtcgttataggcgtcaccaccgtcgaatttaagaacataccgatcattggtgcccacttccgcgcctgcctcgatgaagcgttcaaaggttgaccgttttgccaccagattgatcagcccgcccggctccccctgaccatagaggacggatgccggtcccttgataacatcgatacgctcctggccgaacgtctcgaaagcgatagcgctgaagtcacggataaaacggaaggaattgagatagacgctgtcctttgcgtcaaagccacggatgattgggttgaaatagcgcgcgtcggtgccaaaaggggacgcaacaacgccagcagtatatccgagagcctgatcgagattctgcaccccacgatcttcgagctgctgcgtcgtgatgacggagatcgactgcggcgtctcgatcagcggcgtcgttgtcttggtgcccgtcgcgctctgcgccgcaacgtagccttcaaccggtcccgttacaacggcagcgttgctgaacaccgaagcaccgccctcgccttcaatgacgatgcgatccagctcgaccgggtcgtcgctttgcgcgtgtgcgcccgagaggaagacaagagaagacgccgaaagaccgaaaaacgctttgaaggaaatgagacgggacacggaagatatatccttttgaaaaatatcgctccttatgtcagatgaaagatgaactagaaactcctcttttacgcttaaatcgtttgtttctcccgctgtgaccgacttgccacaaactggatacgaagtgcgccgtctggatgggcgcacagcgaacgcagatattgagcttactttgctttcgtcagcttgatgatggttgagcctcccatcatgcgcgactcggttacggcataaacggcgccatccggcccaaccttcacgtcacggatacgcgcatcaagcggcacccgctcctcgtagactacccgatctccgtcgagatgcacgacgacaataccctgcgtgcctagcccaccgatcagaaacgcgtcctgccattcaggaaacgcatcaccctgataaagtgccatgcctgacggtgcgataacgggatcccagtaataaactggctgttctgtaccttcgcgtgccgtctcgccctctccgaccgggctcccgctatactcgataccataggtcacctccggccagccgtaatttttgcctgcctcgggacggttcaactcgtcgccgcctttcggtccatgctcaacaatccagaaacgcccctgagcatcgagcgctgccgcctgcgtgttgcgatggccgtagctccagatctcggacagcgcattctcctgatcggcaaaggggttgccctcaaagggctcgccgtcttgcgtcaggcggaagacctttccaagaccgctggacaaatcctgcgattgaatacggggctcaacatccgagcgctcgccgacggtaacaaacaacgcaccatcattgtcaaagacgagacgcgatccaaaatgcttgtccccgtcataagtcggcatctgctgaaagatgaccttcacatcttcaagccgatcaccgccattttcatcgctcacaagtgttgcggaggcaacggaggtgccattgccgccatcgcgcggctcggaaaacgagaagaagatacgattcgagctttcgaaatcaggggccaaagccacatcgagcaggccgccttgtccgcggtcatcgacctcgggcactccctcaatggcaggccccacttccccatcagccacaatatgaatcgcgccctccttagccgtcaccagcatgcggccatccggcagaaattccatcgcccaaagcttaggcagcccttctgccaccacctcaaccgtaacttccggcatgatctcaggttgtggagcgcgggtctgcccctggaaggcgggccgttgatccggggcattggcggcttccctttccgccggtgtaccacccggacgctgctcagcacctgaagcgggggactcgccctcggcgctccctgtagcagccgcgccgccattggtctgcgcatatgcgccaccgagagcaatagcggcagatagcatcgtgccggcgagaaggagagaaaacttggtcatgaatggctccatcgatacacgagcggcttcttgcaatgagacgctcctacgaaaagtgcacggcccgccggacggtcggtcgcaatcagcttgcaacaccaaccgccaacgcgtccattggttcacgcccaatgattcaagaaaaatttatcacccctgcagatcatcgggtttgcaaagcgcatgaaatatgcttagaagaactatacatagcagttcagaaaaagcggtctggccgttaacaagcttagacagcaccaaataaggcgcaccctccggggtgcgttttttgttatagaatactgcacagtcgagaccgcacagtattctataagttcagaaaaagcatgtctaacggcaactacgcgaacaatttttgctttaaaaacaaaacatatcgtgtaatctccattttatgccagtgagttgttgcgcaacgcagaacgatggcgcaacaatttcatattattatggagaatctggcatgaacatccatgaatttccctatgcgaataatttgcgctccatgagcgctgcacctctcttactggcatttgatctcgggacttcttccgtaggctgggcggccttcgacatcgacaccgcaggcacccccattcgtcttctcgatgccggcgtgcgcctattcggagatggccgcgaaccgaagtcgcgcctgccgctcgctgttggccgccgcatcgcacgcggcatgtcgcggcggcgcgaccgctacaagcgccgccgaaaagcccttttgcgcacgttgatcgaattcggactcatgccagaacatcggccggctcaactcgcccttatagcagaaacacgagacagcgccctgccttccgatgtctatgcattgcgggcccgcgcgcttgacgaggccctgagcttatatcagatcggccgcatattctttcatctgaaccagcgcagaggctttaaaagcaatcgccgtactgacagccgagacaacgaacaaggcatgattgcgcagggaatcgcccgcctgcaccaggaactgctcgcccatgacgctcgaacgcttggcgagttgcttttcaagcgccgcggcaccgatccgaaaaaccgcggcacagtgcgtgtccgcgcacagaccataaatgtcgaaggcaaggatgagcaggggtacggcttttatcccgaacgcagctttttgcagcacgagttcaatgcgatttgggatgcgcaagcgaaattctatcccgatcttctgaccgaggaacggcgcgctcatcttcatacggtgattttctaccaacggccgctgaaacctgccaaacccggcaaatgcagcttctttcctgatgaggatcgcctgccgaaagcgcatccgctatttcaggagttccgcctcttcaaggaagtgaacgagctgaagctaaaaccggacttcggggatgcgtatcccttgacgctcgagcagcgcgatcttctgattaccgttcttcgtccagcgcattcatccaagtacacggcattgcgcaagaaactgctgaaggcgtcacaaggcatcaagttcaacaaggaaagcgaaagccgcctttccatgaaaggtgacgaagtctatgccactatgagcgacaagagccgtttcggcgcgctctggagcggcttttcagtcaaggagcagacgcagcttgtcgagaaattatatcaagaagacgatcctctggcactggatacttggctggccaaccgctacccgctgctcgaagcgagccagcgcgacgcgatctcgggtgcgaatctgcctgaaggttttggacgcctcggcgtctctgcgctggagaccctgcttgtcgagcttaaagctgatgtcatcactgaatatgaggccattcaacgagccggcttgaaaaatgcagaagtgcatgacggccacgcgcttctgccgccctatcaggaagttcttgccaagcgcattcccgccggcaccggggatgacgacgatccttatgatattcgcatgggccgcatcaccaatccaacggtgcatatcgcgctcaaccagctgcgtcgcgtcgtcaatctattgatccagcgattcggcaaaccggagaagatcgccatcgaactggcgcgagacctgaaactctccgaagaacagaagaagcaggtcaaccataccatcgcgaagaatacgcgcgccaatgagttgcggagcgacaagctgcgcgacctggaaagaaaaggcacctatttcaacatcgacaacggctataatcgttatcttctgaaactctgggaagaactcgatccggcccagccgctaaatcgcagatgcatctattccggcaaaccgatcagcatcgaaatgcttttcaatggtgaggtggatgtcgatcacatcctgccttactcacaaactctcgacgacagtcaggccaacaaactgctctgcctgcgagatgccaaccggatcaagaagaaccgccctccttcagaagttgcggaatgggtgcacgagtatgacggcatcctcgaccgggccagccgccttcctgccagcaagcgctggcgtttcgctcccggcgcgatgaaacgcttccgcgaggaagaaggctttctcgcgcgccagctcaccgatacccagtatctctcgcgtctcgcacatgaatatttggccgcgctctacccggatgaagaaccggatcagtggggcgtcttcgtcaaaaaaaatcacgtacgcatcaatcccggacgcatgacgcagatgctgcgccatcactggggactaaacgaactgatcggtaaggccgatgcgaaaaatcgcaatgaccaccgccatcatgccatagacgcggcggtgatcggcgcaatcacgccggccatgctcaatcgcgtttcaagagcagcagccagccgcgaggcgcagcaactagaaaagagcattggcgacatcgacctgccttttccgacatttcgtgaagaattggagagaatcgtcagccgcatcgttgtcagccacaagcctgatcatggcactttaccctcaacggaaagcgccagctccaccgcgggccgattgcataatgatacggcttacggtttgactggcgaaaccgatgcgaaaggcgtgcctatcgtcgtgcgccgcaagagcttccttaacctacaacgcaaggacatcgccactattcgcgatgaagagctgcaggccgccatcctcaaagcaacagacagcgtttccgacaaggacttcccagcagcacttgatcacttccgcaagcaggggccgaagcagtttcgtggcatccgccgcgtgcgcgtcattgaaacactgaatgtcatcccgatccgcgacgagcatggtcgcgcctacaaggcctataaaggcgatgccaattatcgctacgacgtctgggaactgcccagcggcaagtgggttgaggaactcgtctcaatgttcgaagcacataagctgggctggcaatccgagatacataagaataatccggcggcgcggcgcgtgctcagcctccataaggacgatatggttgcctaccggaatcacgacaacgaatacacggtcggtcgagtggtgaaattctcgaagggaagtatctgctttgccagcaaccgtgaaggtggagccctgaaagctcgggacgcggataagacggacccattcaaatatttcataaaatcagccagttcgttgaaagacgcccaggcacgccaaatccgtgtggatgaaacaggtcgtgtttttgatcctggtccgcaagaccgtcagagccgcgccatccgaaaacagaatggaaacattaacaataaaaccgaaatctctttttcttgaccaagaagagatggcatatttcgcgttatggagcgggtaatagacatacaaacggacggagtttttctttccgtccatcggggttttcttatagctgatttagccggtgaaaacttcgggcgtatcgcgctggacgatattggtgcgctcatcgtgcacgcacacggcgtgaaatggtcgaacaccgtctttactcgcatgagcgaacgcggcgtacccgtggtgatttgcggcagcaatcatgctccgatcgcctgcatctggcctcttgatgggcatcatcggcaagctgcacgcatgcgggctcagattgctgcaccgaagccgctcaccaaacaactatggcgacaggtagtcacagcaaaaatccgcatgcaggccgctgtgctgcaacgttatgacgttgaagccggcggcctcttgagactcgctcgcaccgtgcggtcaggcgatcctggcaatattgaagctcaggccgcccgccgctactggaaagcactgttcggccccaatttctcacgcgatcagaatgcagacggcatcaatagcttgctcaattacggttacacggttctgcgggcgcttgtctcgcgcgccatctgcgctgccggccttcatcccaccatcggtatttttcacgccaacagcgcaaacgccttcgcgctctctgatgatttgatggagccctatcgcccgctggtcgacatgcttgtccgcgatctggtcgataaggggcacgacagagtaacaccggagaccaagcaacaactcgccagcatcggcacgctcgacctcataacagaaattggcacgtcgcccctttccattcaaacgcaacgatttgtctattccgttgtcaccagtttcgaaatgaaggtgccgatgctcgacctacccgatccctccattatcgccacaagctcggtcgtcgaggaggtcccccatgacgcgctgggaacataaagcaacctctggcctcacccatcttaacggatatcagctcatgtggatgctcgtaacgttcgacctgccggtcgagaccaaggtgcaacgtgccgctgcctcgaaattcaggctcagcttactggacatgggttttgaaatgagtcaactttccaactatttgcgcttttgcaacggcaaggaacagttcgaatcatatgtgcgcaagataagcgccatcctccctgacaaaggcgacgtctatgtctttcaattcacagacaggcaatatgagaacatcgtccgctacagcgaccagagacgcaaggcacgtcagaaaaatccacagcagctcattcttttctgactgcctcattccgtttttcaaaaatgaaacggctgattctctttttaagatcagagagatcagccgtcatctattctagcagttcagaaaaagcggtccagcggcaacaggaacgatggaggagcgccgcacggatatattctagcagttcagaaaaagcggtccagcggcaactgaataacctttaactgcttgtcagacataattctagcagttcagaaaaagcggtccagcggcaacctaacgatgcgacaattcaaaatccagttgattctagcagttcagaaaaagcggtccagcggcaacgttgtccccgatgtcgtagtttcctgcgagattctagcagttcagaaaaagcggtccagtggcaaccttccgagtttgtcgtcgcggtggcccactccctttcgttggcagatgatcagcgcgcagggacaggacagctgagatcgccttcctcacaattggcataatatttcagctgatcgacgcgctgcttggtaagatcggccatgcattgcagcttgaccatcggctgggaactgccgccttccgtcaggttcgcttgaaaagcgcattccttattgcggaaggtgatccaggcgcgttgtgtgtcggccagcatgttgcgcgtgtcgctgcccttctccaatcggtggacgatctcggagtaaagcgcattcaactccttatccgcggactcatacgcttttgcggcgcaggcattcatgtcgccttgtgtctgagcgttggcgcaatcctgcggttgcgcggaaagaagggatgtcgagctcagaacaataagcgggagaagcaaccggtaaagcatcatgacctcctttgatctgacatttttgaaacagtagcgaaataaatgtccccgtaacatcgaatgcgggacaaaaccggttaattttctaccaatttcgtatgtcgtccctttgcacagccgtttatagaggcttgatcctcctgtttgaaacatgctggaggacggctgcccgcatcctcctgtctcatgcgggccttgaggggatcctatgctcgaaaaactcttccaactgaaggagaatggtaccacggttcgcaccgaactcgtggccggcctcaccaccttcctcaccatgtcttatatcatcttcgtcaatccgaatattctttcgacgacggggatggatgcaaacgcagtcttcgttgccacctgccttgcggcggcccttggttcgatcgtgatggcactggtcgccaactggccgatcggcatggcccccggcatggggctaaacgcattcttcgcctttggcgtcgtcgcgggcatgggcttcacctggcagcaggcacttggtgcggtcttcgtttccggcatcattttcctcattctgaccattaccggtatccgatcctggctcattgacggcattccgcaggcgttgcggagcgccattgctgccggtatcggcatgttcctggcgatcatcgcattgaccggttccggcatcgtggtggataatccggcaacgttggtcagccttggtgacctccaccagcccggccctcttctcgcgatcttcggcttcttcctcatggccgtgctggatgcgctgcgtgttcgcggcgcgatcctgatcggcattctcgttgtcacgatcctgtcgatgctgctcggcgtcagccagttcaatggtgtcgtctcggctccgccaagccttgcacccacattcctgcagctagacattatgggcgcgcttggcaccggccttatccatgtcattcttgtgttcgttctagtcgaagtttttgatgctacaggcacgctgatcggcgtcggcaaacgcgccggtctcattcaggatgaaaagaagagccgcctcggacgcgccctcttcgccgattccaccgccatcgtcggcggctcgctcctcggaacatcctcaacgaccgcctatgttgaaagcgccgccggcgtccaggcagggggtcgcaccggccttaccgcccttgtcatcgccgcactcttcctctgcgcactgttcttctcgccgctcgccagtgccgttccggcacatgcgacagcacccgcgcttctctatgtcgcaacgctaatgatgcgcgagctttccgagatcgactggaaggacgtcaccatcgccgccccggcagccctgacggcgctcggcatgccgctgacctactcgatcgccaacggtctcgccttcggctttatttcctacgtcatcctcagggccgcaaccggtcacgcgcgctccattcacatcgccacctgggtcattgcggcactcttcattatccgcttcgccttcttccctgaataagcaactaccggaaattacagtacaaaagggctggagcaatctggcccttttgtttgagcgctatccgattttaaggactggacatctcttgcacagtcgttacgaaggcagcaacaaggaatggagatattcatgaaacgacctgttcgcctactcatcgccgcagccgcagctctcgtcgtcggcttcggcttcatgcaagtggacaagatgcggggcgccgaatgggtcgtatctcccgaacagatagagcaggccaaagcaggcggtcaggcaggcgtcgaatcacgtcccgggacggtcacggtcttgcctatccgtagcgagaccgcggatgcattgccgattaaatgggcgctcgctggtctggccgcaggatttattgcgttccgcgcaaccggcaagaagaagactgcgacagcctgaccgggcggaggcaaaaagcacgatgacagagcggttcaccctgcggaagccgcatgaagcgcgccaggaaatcaagagaagccgcttcgccacttttgctgcacccgtcgctgacgaagatacggcaaaagccttcatcgcaaaacattcggatccgagcgccacacataattgctgggcctggcgtctcggtcaggcctatcggttcaatgatgatggcgaaccgagtggcacggcaggcaaacccatcctgcaagccatcgacggacaatctctggatcatgtcgccgtactggtcatacgctggttcggcggtattcttctcggcagcggcggcttgatccgcgcctatgggggcagtgccgctctttgtctgcgggaagcggagagaatacccctcgttgagagcactgccgcaacgcttgactgcatcttctcagacctggcgctcctacaggcgaagctgtctgcattgccacatgttgccattgaggcgcagacctttaccgcgaccggcgccattttatacatgcgcatccacacggccatgatcgaaaccgtcgcagcactgatcaacgacatgacgagcggacgcagccaactgcgatgtgacgcctaatgccacacgttctttcctgagaggttttcccgctcaaatcgtagataatgagctcaggtcgtcgccgattatcaagccttcgccattttctggtagcgcctcaggacgcgttcacgtctcagccgcgatagtctctgaatccagaaaatgccatcgagctggtcgatttcgtgctgatgacagactgcgagaagaccctcggattcttctatgtgctcgcggccttcgagatcctgataacgcagacggatggatgctgcccgctccacttcctcgaccactccgggcatcgacacgctgccttcggggtgacgaacccgctcctccgacatccagatgatctgcgggttgacaaacactttcacacccgtttcaggagacagctcgagcacaacgacccgcttttgaacgtctatatgcgacgcagtgattccgatgccgggagcagcacgcagcgtatcgagaagatcattcgccagttcacgcagcgacacgtcgaacacggtcaccggttgcgccacgatcttcagacgtggatcgggatatttagtgatcgtgcgaatggtcattcctcatgctccccggcaagtggaatcttggccttgacgaagacgtcatagcgcgtgctttttccaagaatttggtgcgacggtctgcgcagaccggccatcggttcagcccgcaggggccacttcagcaccacacgagcctgcgccgcttcgagcgcaacctgcatgagcttttcagcatccggatcggtaccgacaatttcgcggatctggcgcatttcctttttcactagcgcagtgttgccacgcggcggatgcatcggatccaccagcacgacctgcggcttcaactcaggcaaaagcagacaggagtcgccgcgcagcaaggtcatgcgcgccacagtatcggcataacgaccgccttctgcggatgcgcgctcaagaccttccgcaagcagcgcatgcattttctccgaacgttcgatcaacgtgacggcggcccccagcgaagcgagaaagaacgcatcgcgccccagcccagccgtcgcatcaacgatctgcggggttactcccttcgtaaatcctgccgccttggcaagcggttggccacgtccctcgccggaacggaagcgatgccccaccgccccgccgacgaaatcgactaccagctctgatgaatcaactttctgcgccatacatgatctcagaaagggcaaggaacagtgaaggtcatgatggacccgtcgggatgctgaaaacgcagcatttcagcgtgcagaagcagccgcgccgaagctcccagcgcctcgccctcggcataaaatgcatccccgagaatcacatgccccgccgccttcatatgcacgcgcagctgatgcgtacgtcccgtcagaggaaaaagctgtaggcgcgtggtcccgccgccccgctccagaacacgccaacgcgtttgagcaggctttccatttgcgtgatctacacgatgacgtggtttgttttcggggtcgattgccagcggcagatcgatcagcccgtcatcggcttccacgatcccccagacaatggaaacatatgatttttccgtctgccgcgcctcgaactgcgcagcaatatgcgcatgggcgcgccgattgagcgacatgagcacaaggcccgatgtatccttatcgagcctgttgatcatctggcttttggggaattgcgcacgtacgcgggtcgccaaactatccgacagcgccggatctcgcccgggcacggacaagagtccgctcggcttatccagcacaagaatatccgcatcctgatggacgatcgagacatatggctcgagcggcgggttatagacaggcgattgggctatcgaggcactcatgagcggcatttaacacagccgccatgaaaacgagaagcatacatagaggaaaacaccacctgtagcagccgatacgcccggaatatctgccgctcatcccactagttcagttcttggcgcccgcatctccaccgcctcctgcgacccgtcgcttgacggcaccacgcataatccataacaggcgaaatattgaatattttctcgcgcgttggaggagaatgcgtgttcgggaggaaaagctccgattctggaacggtcgttcgggtgcttgctgagcaagtccgccgcgatatctcgacgggccgtctcgagcccgacgcgaagctcaagatcgatgagttgcgccagcgctatggcggatcggcgcattcgtttcgggaggcgttgactcaactggtcaacgaaggtctcgttgaggccagtgtccagcggggctttcgcgtcgcctcggctacccggtctgaccttgaggatatagtgcgattgcgtgccgaaatcgaaacgctcggactcggttggtcggtcaagcatggcgatctggcatgggaaggcgcggttctcgcagccttccacacatattcgcgcctatgcgaaaaaaccgcttcggatcgaaccgggctggctattgagtgggacgaagccggacgccattttcacgctgcgcttgtctcggcctgccgctcaccgcgactgattgattttcaggcccgcctctatatccagagcaggcggttccgctatgtcgagctaattgaggggcgggtcgatctcgacgtagaaaagtccgaccttcgcgaggtagtcgacgctgccatagcccgcgacgccgcggcggcgcgccatgccctgtcgcatcatattctcggcgctctcgggcgctgagcatccggccatcacggccatccgagtgaaagcaccgtctcagggaggaaattcatgctttcgatgacacgtagaaccttcggtctcctggccgcaacgacaatgctcatggcaacgagcgctaccagcgcagagccggtgaagatcggcatcctgtcactgacatcgcattcgccatcgatcatcgccgagggtaagggctattacaaagaggccggtctggacgtcgagttcgtgcctttccaagcggcgcagccgatggctgtcgcgatcgcatccggcgatgttgacttcggcttgacggctatgacggctggtttggtaagccttgcggagcgcggtgcagtcaagatcatcggaggggcaatggccgaggaagaaggtatcgagggtcacaagattctcgtatcgaaagcggtccacgaggacggcgccacgacaccagccgacctcgaaggcaagcgcttcggcattaccacagcgggttcgtccttccactatatggcgcacaagattgccgacggcgagggctttgaccgttcatccatgcaactagtgcccctcaacagcgtatcggcagtgatcgcgtctctgcgttcgggccagatcgacgcgtggtcaatccaacccaacatcgccgatggcctcatcgccagcggcgacgtgtttgaggtcggccgtatcggcgattatatcgacagctatcaggtcacgacgctcttcacgtcgagcgaccttgctgcaaataaccgccccctggttgaaagcttcatttcggcgttttcaaaaggcgtagcggattataatgcggccttagtcgacaagaccatgccggaagaggaaactgccgagttggtggcgatgatccataagcgggtttacagcgaccgcccgctggccgatgccgatccggcgatacgtgctggagcaatgcgcatcaaccagggcgcaaaacttaatctagcgagcatcgaggaccagctcgaatggttcaagtccgaaaacctcgtaccgcagagcgcctccatggagaagcttgtcgattcgagcttcgtcgaaacctactgatttcaggcggccggcctcaggcttctgctcggagccggcgctgccacaaacgcggaggcaatgatggatattgtgatcaacgatatcacccatcgctacgaccagacggacgtgctggagaatgtgagcttcgagctgaagagcggcgagatcgtctgcatcattggcccgtccggttgcggaaaatcgacgctgctccggttcatcggtggcctggaacggccgacatcggggcaggtcctgatcgccggggaaccgcctgccggttcactcaatccgctcacctatatatttcaggatttcgcccttctgccgtggcggaccgtcgagggcaatgtaagtcttgtccttgaggatcacgggatccgaggccgaaaggccgaggcgatcatcgaggacgttcttcgccgcacgaagcttctcgacttccgcaccgcgctaccgcgccaactctctggcggaatgaaacagcgtgtcgcgattgctcgggcgctttccgtcaatcccgctgtcatgctcatggatgagccgctgtcggcgctcgacagccagactcgcgagcttctcctcgacgatctcgtcgaactatgggcgcgcgaacggttctccgcctgctacgtcacgcataaccttgccgaggcggtacgcctcggccacaagatcattgtgctgtcacgccgtccaggacgcatccggcaggtggtggagatcgatatgccgcttggcgagcgcgcgaaccgcctggcagaactcgaagaaacgcagcgccatctctggaacctgatgcgcgacgaagcgcgcgccgccgacatggagctttccgatgtcgcttgatgccatgaacgcgacccccgacacgagcaccgacggaaaacacgccgcgaggcgcgatgcccgaccagttccctttcgcggtgggggattccgtacgaagaagttcggatatgtgggtccgctcatcttcatcatcctgatcggcctttgggaactcggttcgcagagcggcatcatcagtcctattgcgctgcccgccccgagcgaggtgttcggcgctttcaaggacctggtgcaaaccgggcaaatatggacacatcttcaggctagcctctataggctctccgtcggatggttcttcggctcgctgctgggcgtggctgccggtctcgccatcggccttttctccgtggcccgcgccggtatctcgcccatcgtttcggcgctgttcccgattcccaagatcgccctcttgccgctcttcatcgtatggttcggcatcggcgaaggctcaaaagtcgccacgatccttttcggaactttttttcccatggttatcgctacctatggcggcgtcgacaatgtcgatcgcaatctcatccgcatggggcagtctttcggattgtcgtggctctccatcgttcgcaagatcatcattcccggcgcactgccggcgattttgtcgggtttccgtatctctgcctccat

SEQ ID NO: 3015 - DNA, 23324 bp, synthetic construct
  source 1..23324: mol_type = other DNA
  misc_feature 1..23324: note = Synthetic
tccagcttttcccattcatggccggcccgcaccttgtgggcggcctgcaattgcgccatctgcgccgcagtcatctgcccggcatggttgtccttgtgaccggccagcggggtcccccagcccttgacggtataggcgatgaacacggtcggctggtcgctgcccgccgcctcgaactgttcgagcaggctttcgacacagtgcccgccgagattggccatcagcgccgccaattcctcgtcagtgcgccgcgccaatagcgccgagaccggcccctgatcgccgatttcgtcgctgagccgctcgcgccaggcggcgccaccgcggaacatcagcgccgaatagagcgcattggggcaggcattgatccaggccttgagctgctcgccgccgggttcggcaaaggcggcgcgttgcaacgccccatatttgagcgtcaccaccgtccagccgaaagcgctgaaaatggcctcgatccgctcgtaaagcccttcgcgcaccaccccgtcgaggctctgccggttatagtcgatgatccaccagcaattgcgcagcccgtgcttccagccttcgagcaggcattcgtagatattgccctcgtcgagctcggcatcgccggccagcgcaatcatccggccttcggcgacatccttgcgggcccagtccttggcccggacatagtcctggatcatcgaggcaaaggcggaaaaggccacgcccagccccaccgagccggtggagaagtcgacgtcgtcggtgtccttggtgcgcgagggataggattgcgcgccgccaaaggcacggaaatcgatgagcttttcgcggctctgccggcccatcagatattggatggcgtggaatacaggcgcggcatgcggcttcaccgccacccggtcctcgggcttcagcacgccgaaataaagcgttgaaagcaaggcggccatggaggcggaactggcctggtgcccacccaccttcacgccatccacattgggccggatatggttggcgtgatggatcatccagctggccagccacagcgattttttggtcagcgcctcaatggcctcgacgcgcccaatcgtttccgaacccatacaatcctcctcacaacgagccgagactgcaccttgcggcgacaaatttcttgtctattttggttgaatccgcccaatttggcgcatgatttgataaggtattggcagcaaattggcagaaaccaccccaaatggcattgacgcagtggatcgccggattctgcgggcactgcaggaagatgggcggctcaccatccaggcgctggccgacaaggtgggcctgtcgccttcgccctgcctgcgccgcttaaggcagttggaacgcgccggggtgctctcgggctatagcgccaatatcgagcagaaagcggtgggcctgccggtttcggtcttcatttccatcaagctcgaacgccagcgcgccgataatctcgacgccttcggcgccgccattgcccgttggccggaggtgatggagtgctatctgatgaccgggcaatacgacttcctcttgcgcgtcgtctgcgccgatctcgaagcctatgagcatttcctgcgtgagaaactgacgcaactcgagggcgtcgcctccatcgaaagcagtttttcgctaggggccgtcaagttttcgcgggtattgccgatttaggtcatttgtaacctagcggaactcgcggctcccgctctccctccccttgaggggagggtagcgtcgcttggcccaaaggcctagcagagctggggtgggggtcgttttgtgatccaccgatggacctccaccctcattccctcccctcaagggggagggaggcgatggagccccctcccccgatcccgagagagggctcatcatcgcctcgcgattactcagccttttcgatgtcgtaggcgaagaattgggcgttgaggccattgaccgggtagccggtgacattggcggccgagaccacgatctgcgggaagagatagagccagttgccggccgcgtcttcggcgatgatcttgttggcttcggtgagcttttcggtctgctcggcttcgctcgaagcggcttccgcgtcggcgatcagtttgaccacgtcgggattgttatagccccagtagaagtcgggattgccgtagaagacgatatcgcggtggttgacgtgctcctgcagcgtcgcctcgaaattcttctcctggtagatcttggtataccactcattggcggtgatgatgttgatattcaccgtgacgccaatcttggcatattcggtctgcaggaactgcgcgacgatcggatgcggatcgtagtcgggcgtatcgagggtgaattcgaagccatcgggatagccggcttcggcgagcagggccttggcgctctcgacgtcataggcatcgacgccggtcagatcgacataccagggatcggtcggcggcacgaaggagccgatcagggtgccatagtcgccccagatggagttcagcaggcgcgccttgtcggtggcgcgcgccagggccttgcgcaccttgacattgtcgaagggggcgacgcggtcattataggccagcaattccttggtggtcgaggcgccttcggtcaccgtgtaggccggattatcggcaaactgggccagggaatccgggctctgcaccgaggtgatgatatcgaccgcattggtcagcagcgcattgttgagcgcggtggcgtcggtgaaataggtgtagaccacttcgccattgctggcagcatcaccccaatagccatcgaaacgcgacagggccagcgccgaaccgcggcgccattcttccagcgtatagggaccggtgccgtcttcggtggcggtgatatcggccgccgcgtcgttgacgatccacacataggagaggttatagggcagcgagatcgagcgggtcgacagcgtgatcaccaccgtctggtcgtcgggggtctcgatgccggtaatggtcgagaggctcttcttgcgcgagctcttggaggcttcggcagtgacgcgctcgatggaatatttcacatcggctgcggtcagcggatcgccggaatggaaggtgacgccgggcttgagcttgaacgtataggtcagcccgtcttcgcttgcttcgtagctctccaccagcttgggctcgaccgagccggcatcggtcagctggaacagggcttcatagacattgccgttgaaggcttcgttgatgccctggccggcgccggcggtgttgtcgaggttctgcggctcgtagagcgagccgatgcggatggtggcgtcgggattgacgctctgcgccagggcaagcgaggagaggctggcaccggccagcagggcggccgcgaaggtgagatgcttgatggtcatggggtgatctcttgtgaatgagggctggcgtgacgatagccccatggccgcagaatctccactgcgccgctggggtttcctttgcgtctcttaccatagcgtgagcatgattgttcgcgctcgacatcattgaagaaagattttcaatgtcagtggcttagccggcccgcgacagggcgcggcggttgaccgccagggtggtgaagatcacgaggaaagcgaacagcaccatgccgccggccagcatatgcgccttctcccattccagccgctcgacaaagtcgtagatggcgatggagagcaccttggtctggcccggaatattgccgccgatcatcagcaccacgccgaattcgcccaccgtatgggcaaaggccatgatggcgccgaccagatagccgggcatggccagcggcagcacgatgcgagcaaaggtttgcggcgtcttggcgccgagggaagcggcggcctccagcacctcctcgggaatggcggcaaaggcattgcgcagcggctgcaccatgaagggcaatgaggcgatgaccgagccgatcaccagaccggtgaaggaaaaggccagggtgcgtgcgccccagagcccggccagcgcgccgcccggtccgttgggaccgagcgccagcaacaggtaaaagccgagcacggtgggcggcagcaccatgggcagggtcaccagcgcccccaccaccgccttgccgcgcccatcgccgcgcgccagccaccaggcgatggggctgccgataaggacgagcatgaaggtcaccactgcggcaagcgacagggtaagcgcgatcggcgaccatatgcccgtcagatcaatcatggcaccgaatagcccgccgcttcgatcacggccacggctgcatcggagcgcagataggcgataaaggccagcgccgccgggttttcggcctcggacttcagcaataccgcgccctgggcgatgggcgtgtgcatctcggccggaaccagccactggtcggccttgcccagcacctggctggcggcgacgaagccgagttcggcattgccggtttcgacgaattgcagcgtctgggaaatgttctcaccctgcacgatttttggctgcagcgtctcatagagccccagcgcggtcagcgtttcgacagcggccttgccatagggtgcggcggccggatcggcaatggcgatcttgttgaagtcggccttgagcgcggcctcgccatcgctcatgtcgcgccccggaccatagagcaccagccgaccttcggcatagacgaagaagctgccctcgacgccaaagccttcatcgatggccttttgcggccgtgccgtatcggcggcaaggaaaacgccgaagggcgcggcctgggtgatctgggtatagagctggccggtggcgccgaaactcagttccacatcgtgcccggtctcggcctcgaacttggccgacaggtcctcggcgacggcggtgaaattggctgcaacggcgacatgcaccgtttcggcccagctgggcacagcggtggccgcaagcacggcaagggaaagcaacagacgcgacaaggcagcccccgatatgtttttacgtgcatatcgatggccaacttcacgccgcagcgcaagcgatatgttcgaaaaaacctatcgaacgagcagagcgcgcagcgccgccacgtcctcggcaatggctgcttcggttttcgcctgcatggcgcgataatgcgcgagcactgcctgtcccagcggggtcagcaccgccccgccttgcgttgcgccaccccggctcgacagcaccagcggcgcgccaaaaccgtcattgagcgcctgcacgaggctccaggcgcgcttatagctcatgcccatggccttgcccgccgccgcgatcgacccggtgcgggtgatgccatcgagaaggtcggcccgccccggcccgatataggccgtgtccgacagcaccacgcgcaaatgcccgaggccggtccccaacagagtcttttcgggcgatggcggggttttctggtccaagcgatggtttcctctgcgccaggcgcgcaaaatctctagcccgaaccggcaagggcgacaatcgattgtggttcagcggctctgcggcagcgcctatgggccgatcgcatcggcattgggccggctgaggataaaggtcgagcagcaactcatcaccactgccaccaaggcctgcaaggcaagggacacatcggtggtcacgaggaagattgcatagctcaccagcatggcgccaaccgccatggccttggcccgccgcgaaatggcgcccgactgccgccaggcgcgcagcggtggacccaggcgcttgtgattgagcagccagcgctcgagccgcggaaacgaccgggaaaagcaggcggcggcggcgagcagaaacggcgttgtcggcaagagcggcagcaccgctcccagcgcgcccagccccagcatgactatgccaagggcggtgagcatatggcgcttgagcgggctcagaggctggcgcttgggcgaagacgtgttcatgcagcaatccagttcatgcccggctggccatgcatgaagccattggcgaacacggcgccggaataaatctcgcgcaatttggcgacgccctcgtcagcgtccatcaacccgtcgcgcacctgcgcatagagcgctgccacggcggccatgtcgcaatcctgcggcgacaggcgcagatgggtaatgccgatttcagcaagccgcggcagcgcgcccagcagcacctggcaatggcgcgacatggtctgcacgccattgatggtgaggaatgcctggccatcaagcgtatcgacatcgagcccgtccggttcctcgcggcatacgaactggcaattgtccttgctgtgtcccttggcgcgggcatgggcgcagcgcgccgagatcgccaggggcatgcggccaaaggcgatgatttcatagtcgatatcaggcgcatcggcggtaatggcggcgatggaggcggccggcaattccggcccgaggcagatgcgggtggcccccttgcgggccagaagccgcgccgtcgcgccgttatagacattgacgaaggggccgacgagatgcggccgccctgacaggaggcgcaggctcgacaggtcattggcttcgatcagcgcaccgctctcggcgcgcttgcgcgtcgccttgatctcacgctcctgcgtcaccagcgccaggctggcgagggcgacggatttgccagccatctccaggcgctcgaccacctgaggaaggaagggctgggtgaaatggtcacgcttggaacagaccacttcacccagcgttaccgcatcgacatgccccgactccgcgatgcgataatagaaatcacgccacttctcgccgtcccaaagatagggaaccggccccagcgtgatcttgagttgctttgtgtcgcccatgttcagcgccacttcttttcataggcaccagaggtggtgcgttggccctcgctcaaccggcgcaattgcgagagatgggcagcgcgcgcctccggcacccccgacaatgccttgcgcaggctcgagacgacttcggcgacataggccttgccgcgctgccgcccctcgatcttgagcgccgtcaccccggccttttgcagggcatcgagatgatccatcacatccaggctcaccgggtcctcgaaggcataggcctcgctgtcggcaatatggaagcgccccttgcagagcgtgggatagcccgccggttcgtgctcggcgaaccggttgatggtgaattcgcccagctccgacaccatgtcggtgccgtccttgcggtaatgcacatggctggcaggcgaacagacaccctgcatattgggtgaccggccagtgatgtaggaggagagcgagcagcgcccctcggccatgacgcagagcccgccaaaggcaaagacctcgagctcgcaatcgacctggctggcgatggcggcgatctcggccacggtcagtacccgcggcagcaccaggcgcttggcgccaaagctctcgaccagaaaattgatggcatcggcattggaggccgaggcctgcaccgagacatgcaggcgctgttcaggatagcgcgtcgccacataatccatcagcgccatgtcggcgaggatcagtgcatccgctcccgccgcaacggcgtcatcggcggcgccgtaccacagcgcctcattgccggcgcgcatgaacgtattgagcgcgacataggtctctacgccacgcgatttgccgaaggctaccgcctctgccatctcggcgcggctgaaattgagcccgggaaaattgcgggcattggtttcgttgcggaagccgcaatagaccgcgtcagcgccggcctcgacggcttcgcgataggcagccggggtgccggcggggcagatcagttccatgactcaaccctgccctgccagagcgcgatcccgcacgaattcggcggctcgccgcactggattggccaggggcccggcaaggccggagaggtctcgcggcaggtcgaaccggggcaggagcgaggcgctggaacgcgtcgctttgggcatgggcctcgaccccgccgatctgccgcaattgggcgaggccatggccgatatgcgcgccccgcgcccgccgcgcagcctcagcgatgcctggggacagcgcgacctgctgagcgcggcgcttgccatgcgcaccaagagcgtcgcccgcccaccctgccaggcggtggtgcacaggggccgcgacatcgacctcggcgccttgccgatccagtggtgctggccgggcgagccagccccgctcatcacctggcccctggtcatcacccgcgcgcccgacgatcccgacgacgtcaatgtcggcatttaccgcatgcaggtcctgggcccggatcgcaccatcatgcgctggctgcccggtcgcggcggcgcccggcaccaccgcctgtggcaggcccggggcgaggacatgccggtggccgtagccatcggcgccgatcccgccaccattctcgctgccgtcatgccgctgcccgacgggctcagcgaactcgcctttgccgggatcctgcgccgcaagccgggccaggtggcgcaggcggtcagcgtcgacttgcccgtccccgccaatgccgagatcatcatcgagggccgcgtctcggcccatgaaaccgcccccgaaggcccttatggcgaccataccggctactacaactcggtcgagaatttcccggtcatgcaggtctcggccatcacgtcgcgccgcgatcccatctatctctccacctataccggccgcccacccgacgagccctcgcggctgggcgaagcgatgacgccgctcttcgtgccgctggccaggcgccagattccagagatcgtcgatctgtggctgccgcccgaggcctgctcctatcgcgccatggtggtgtccatcgacaagcgctatcccggccaggcccgccgcgtcatgatgggcctgtggtcgatgctggcccagttcagcatgaccaagctgatcatcaccgtggatcccgatatcgacgtgcgcaactggagcgatgtcatctgggcgctcaccacccggttcgatgcgccgcgcgatctcgtcgtcgtgcccgacacgcctatcgactatctcgacttcgcctcggcccaaccgggcctgggcggcaagctcggcctcgatgccaccaacaagatcggcgccgaaaccagccggcaatggggccgcaagctggacatggacgccgccaccatggccggcgtcgacgccatctggtcggaactgggattggatcgatgagccgggttcagcgggtggtcgtcgccattaccggcgcctcgggcgcggcgctgggcctcaccattctcgaacggctggcgccctttgccaccatcgaaacccatgcggtggtttccaattccgccatccgcaccttggttcacgaggtcgggccggatggtcccgatcgcgtcgccgccgccgccgaccacacgcatgacgccgccgatatcggcgccaccattgccagcggctccttccgcaccgcgggcatgatcgtcgccccctgctcgatgcgcaccctcgccgccattgccatgggcctctcagacaatctcattgtccgcgctgccgatgtccatctcaaggagcgccgtcgcctcgtgctcatgccgcgggagaccccgctgcatctcgggcatctgcgcaatatggtggcggcaaccgaaatgggcgccatcctcctgccgccggtccccgccttctaccagcgccccagaaccatagccgacatcacccaccacctcgccgcccgcgccatcgaccttctgtccctcgatatccccgaccaggccacgccctgggccggcgaggacaccagcgcgtccacacttgccgacacctagcacaaataaaaagcgcagcccggaggctgcgccttatttggtgctgtcgaagcttgttaacagccagaccgcgatttctgaactgctaggcagttttctcattttgcatttttgacggcaggaagcaatccagcacctctaggtatctatcgacgggattattaccggtgcggacaaatacccccggacgatagaccttgcctttatatgtggatgcaacatcgccaggcccggcctcctcgccggcgctccgcgagatgcttttgggggaaagcgtcatgaaaacttcatttgccttcgatatcggcaccaattccattggctggtgcgttctggcgctcgacaacgccaatttgccctaccgcatcctcgatgccggcgtgcgcatcttttccgatggccgggagccgaaatcgggaacttcccttgccgaggggcgccgcctggcccgcggcatgtcgcgtcgccgcgatcgctacaagcgacggcgcaaggcggtcatccgcacactgatcgaatatgggctgatgcccgatgatccggcggctcgccgcgcgctggtggccgaaaccaatgacaaggcgcccggcaaaatcgccagcgatgtctatgccctacgcgcccgcgccctcgacgacaaactgccgctgcaccatatcggtcgggcgctgttccatatcaatcagcgccgcggtttcaaatccaatcgcaagaccgacaagcgcgacaatgaccagggcaagatcgccagcggcatttcgcggctgcgcgacaagctggcctcagaaggcatgcgcacgctgggtgaatatctcaatcaccgccaccaggccggcaattgggtgcgcgtgcgcccctcccgcgttcccggcaaggatgacaaggaagaagacggctacggcttttatcccgagcgcgccttgctgcaggacgagttcaacgccatctggaccgcccaggccgcgcactatcccgacgtcttgaccgaggagcgccggacgcatctggaaaccatcatcttcttccaaagaccgctgaagccggtgcaggtgggcaaatgtagctttaatcccggggaagagcgcctgccacgcgcccatccgctgttccaggaattccgcctctataaggaggtcaatgagctcgaactggtcgatcgcaatcaggaccaccataaactctctctcgatcaacgcgacgcactcatcgcccaactcaagacccagcgcgaagccgcctatagcgccctgcgcaagacggcgcgcgccccgctgggcacgcgcttcaacaaggaaaccgagagccgcaccaagatgaagggcgacgaggtcgccgccgaactctcggccaagacccggttcggccaggcctggatttccatgccgctcgaagagcgctggatcattgtcgacaccctgcgccgcgtcgaggacccgctggagctgaccgcctggctggaacagcattacgggctggatggcgagcatatcgacgccattctggccgcccgcctgcccgaaggctatggccggctgggcgaaacggcgctgaccgaaatcctggtcgagctcaaggccgctgtcatttccgaggccgaggccgccagacgcgccggctatgaccatgcgttgctgcagcgtggcgctggccttgaggcgctgccgaaataccaggaggtcatcgcgcggcgcattcctccgggcaccggaaatccggatgacccctatgatgtggaaaagggccggatcaccaatccaaccgttcatatcgggctcaaccagctgcagaaagtgctcaatgccctcatccgccgctatggcaagccggagcagatcgccatcgaactggcgcgggagctgaaactcaacgacgagcagaagcgcgaaaagaacatcgagattgcccgcaacacccgggccgccgaacagcgctcggccaagctggtggagctgggcgtgcccgataccggctataatcgcgtgctgctcaaactctgggaagagctcaatctcagggcgccggagaaccgcgtctgcatctattgcggcgagccgatcaatatcgagacgctgttttccagcgcggtcgatatcgaccacatcctgccctggtcaaaaacgctggatgacagccaggccaatcgcctcgtctgccacgtcgcctgcaaccggcaaaaggccaattatgcgcccgctgaggtgccgcaatggcaggggcgctatgacgacattctcgcccgcgccaacaccttgccgctcaacaagcgctggcgcttcggccgcgacgcgatgaagaaattcgccgacgaggaaaccttcctcgcccggcaattgaccgatacgcaatatctctcccgccttgcacatgcctatatggcggcgctctatcccgacgaggagcctgatgcgcagggcgtgctagcgcgcaagaaccatgtgcgtgtcatcaccggccggatgaccgaaatgctgcgccggcaatgggggctcaattcgctcctcgccgaccacaaccagaaaaaccgaaacgaccatcgccaccatgccatcgacgcagcggtggttggcgtcaccacccgcgccctgctgcagcgcatcgccactgtggccggtgggcgcgaggcccaggcgctcgaagaaaccatcggcaagatcgagccgccctggcccggtttccgcgacgagttgcaggcggtgatcaagcgcatcgtggtcagccacaaacccgatcacggcacgctgccaaagcccggacaaggcgggcagaccgccggccagttgcacaatgacaccgcctatggcctgacgggggagaccgacagccgcggcacgcccatcgtcgtgcgccgcaagccgttcacgagcctcactgaaaaggaccttcccagcatccgcgaccgccagctcgcccaggcgctcgggagcgccattgccggccgcagcggcaaggagttgcaggcggcgctcgaacagtttcgcgaccgcgatgactacaagagcatccgccatgtccgcgtggtcgagccgctcaatgtcatccccattcgcgacggcactggccgggcctacaaggcctataagggcgacgccaactatcgctacgatgtgtgggaattgccgaacggcaaatggatgcatgaggttgtgtccatgttcgatgcgcatgaccggagctggacatcggccgttcatatccatcaccccgcagctcggcgggtcctcagcctcaagcagaacgacatggtggcctatgaccacccccaggacggaccaacaatcggccgcgtggtgaaattcagccagagtggccagatgacatttgcgccgcataaggaggccggcgccctgaaggcgcgtgatgcagaccccgaggatcgcttccgatatttctacaaatcgggcagcgcgatgaaggacatcgggctgcgccaggtgcgggtcgacgaaatcggtcgcgtcttcgaccccggcccgcgggacaaggaagcccgaaacgcacgcaagaaaaaatccaccgattaacgctaaaaacatgcaggccttggcggattttacagtcttgccctaggctcttctgcatggagcgcgtggtcgacatagcaacggacaatctgtatcttgccgtgcagcgcggtttccttacggttagcgaccagggcgaggaacgcggccgcatcgcgctcgatgacatcggggcgctcatcgtgcatgcccatggcgtcacctggtccacgaccgtgttcacgcggctgggcgatcgcggcgtcccggtggtgatctgcggcagcaaccatgccccgcaatcaatcgtctggccgctgcacggccatcatctgcaaggcgcccgcatgcgggcccagctcgcggcgccccgccccctgggcaagcagatgtggaaggagatcgtccaggccaaaatccgcatgcagggcgaaatcctcctgcgcaacggtcacgaggccggcgccttcgacctcctcgcccgctcggtgcgttcgggcgatcccgacaatgtcgaggcccaggcggcgcggcggtattggaagctgctgttcgggcggcacttcacccgcgaccaggacggtggcgatatcaacggcctgctcaactacggctataccgtgctgcgtgctatcctcgcccgcgccatctgcgcttcgggcctgcatccaacgctcggcattttccacgccaatcgcgccaatgcctttgccctggccgacgacctgatggagccctatcgcccgctggtcgatcagatggtgcgcgccctggtggacgaggggatgagcgaggtgaaccccgagaccaaactggtgctgacgcgcattaccacgctggacctgccctccctcttgggcgtctcgccgctttcggtgcaggcgcagcgcttcgtccactccgtggcccagagtttcgagaccggcaaagcccgtctcgagctgccgcaaccgccgcttctcgtttcagcccccgcgactgccgatgtcgacgcctaagaaccccagcaacaagcgcgcccaaaaggccaattccggcgccacccatctcagcggatatcagctcatgtggatgctcgtgaccttcgacctgccggtcgagaccaagcagcagcgcgcggcagcgaccaaattccgactggccctgttggatttaggctttgagatgagccagttttccaactatcttcgtttttgcaaaggcaaggagcagttcgaggcctatgtccggaaaatcgaaacccatctgcccagcatgggcaatgtctacatttttccgttcaccgaccggcaatatgaaaacattgtccgattctccgaccagggccgccgcaccccgcagaaaaacccgggccagctcgcccttttctagccccgccacgcattttgcctgcaccgatcccgccgattttctgtttaaaaacaagaagatcggacaggatcgagcttagcagttcagaaatcgcggtccagcggcaacaaaacgcccgctatcgcgtggaacgcgatgagcttagcagttcagaaatcgcggtccagcggcaacacgctggtcgaattcctgttgctgctgcttgagcttagcagttcaaaaccacgatccagcggcaacctcaataagctccgatcgatcagcttcgcaccctatcagttcccaccgcacccgacagcttttcgcccaccagttcgaccagggcgtcgagcatgacatacatggtcaggcgttcattgggcaggaagaccggggatttcttctgccggtaggcgttgatggcgatgttgaggtcggcggccctggcaatggcggagccggtcggggcgagcgtaataatctgcgcccccgccccgcgcgcgatctccagattgggcagcatatgagtggtgatgccggaaaaggaaaaggccagcacgctatcctccggccccagggccacggcggaaaacatctgcagcgacgggtcggaataggcgacgctggcgaggccgagataggcgaagcgatactgcgcctcgccggccagaaagccggagccaccatggccatagacgtcgatgcgccgcgatgtggccagtcgttcggccgcgcgcgcgatcacagcgctgtccacatccatgatcaggtcgttgatcgccgccgtggccttgttgcaattggcgatgatgcgcgagcggatggggtcgtcgccgccgtcttcgatggggcgttcggctttttccagcagcgccacagcctgggcgaacttgatgcggaaatccgaatagccctcgaaaccgagcttgcggcaaaagcgcatgatcgagggctcgctgaccccggaaaagcgcgcaatatcggccatggaccaggcaatggcggcctgcggattggccagaacggtttcggccaccttgcgctcggaaggggccatatcgttgagtgatgacctgatccgtgccagcatcgtcgttctcccgcgcccgtccctagttcaggcctagcgcggcccccttcgaaagagaagcccagccggaaagaaccacgctgttctccacgtcatagcccggggtggtgacgaggatgcgatcgagttcggccagttccgccatggggtcggccaccggcaggtcgcggtccggccgccagcacagcacgcgcccacccgaggcggccaccaattgcaggccggcggcaatatcccagggatggcagttctcgtcgtaattgaccgccgcccgccccaccgccacataggccagctgcaaagctgccgaacccagccgccggactgcgcggaaatgggtcaccagcgtgccaaaacgctccatttcgccgggcgacgggggcttgccctcgcgcggcagattggtcagcagttcggcgtcctggtcgcgatgggcacgactggccggcctgatctcggcgccgttgagccagagttttccgccgtgggtggagaacatctcgtcggccattggatcgtagatgacaccggcaatgggcgtattgtcggcgcgcacagcagcaatcgagacgcagaagaagggcaggcccgaggcgaagttgctggtgccgtcaatcgggtcgacataccagatgatatcgccggtcccatcccagccgctctcctcgcccagaatgcgggactgtgggagctgcgcatggatgatgtcgcggatcagccgttcggactgtcggtcgagcgcggtgacgatatcggcatggccatgcttttcctccacccccagcgcctctccggcggcggcggcgagaaaggcctcgcggatcaccatgcctgcctggcgggcggcatgctcagccaggcgggcgatatcggcagcagacgtcatggtcatgccgaaactcctgcaatcgaggccgccagcggccagggcacggcggtgccgatatccacgcggatggtttcgcccgcccggtggaggcgatgcctatggtagagatgatcgaccagcgtgcaggcggcgccgtcgatggtgacgtgatattccacgaacccgccctgatagacggcgcgctccaccacggcggcgatatcgccggtttccgaaatcaacatctgttcggggcggatgacatagtcgatcacctcgcccggcttgatcgccagcacatggcgcggcaggtcgaccgatgcaccgcccagtttcgccctgacgctggtgtccgacacgctctcgaccttgacgcgcacaatattagccttgcccatgaattcggcgacgaaggcggtggcgggcctggcataaatgtcctgcggcgccccgttctgctcgaccacgccatcgcgcatcaccaccacgcggtccgatatggccatggcctcgctctggtcatgggtcacgtagaggctggtaatgccgaggcgctgctgcaactggcgcagctcgtcgcgcatgcgttcgcgcaattgcgcgtcgagattggacagcggctcgtcgaacagcagcacccgcggttcggcgaccaccgtgcgggccagcgccacgcgctgctgctggccacccgacaattgcgaaggctgccggtcggccagttgcgacaaagccatcatcttcagaatatcctcgacccggcgattgatcgcgctggatgagagtttcaagaccttgaggccgaaggcgacgttctcccgcaccgacatatgcggaaacagcgcataggactggaacaccatgccgatatcgcgcttgttcaccggggtggtggtgatgtcgcggtcgtcgatcgagatactgcccgagctgggggtctcgaacccggccagcatgcgcagcgtcgtggttttgccgcagccggagggccccagcaaggtcaccagcgcaccgtcttcgatgacgaggtcgagatcgcgcaccgcatgggcgtcgggacggccattgcgccccggaaacagcttgttgatggctttgaatgtcacgcgggacatggcgctacctctggtggtggctgcggccaagcagcacttgcatgagccccaggacggccagcacgatggcgatgagcatcacgctataggcagcggcaaggcccatgcgcatggtctcgacctggttgagaatggtgacggtgatcagcgtccaattggccgaaaccaggaagatgatggcgctgagcgtggtgagcgagcgggtaaagccataggccagcgaggcaaacagtgccggcttgagcaaaggcagcgtcacccgcgagaagatgcgggtgttcgaggcgccgagcacggcggccgcctcttcgattgccgggtcgatctggcggatctggttggtgccggcctcgatacccacctgcagcgtcttcaccaccatggcagcaacgatgacgaaggcggtgccagtcagcagcagcggcggcgtgttgaacacgctgacatagccgatgccgataatggtgcccggcgcggcaaaggccaggagcgtgccgaagcgcaatatgaaactgcccggataagcgcggcgcgccaggatataggcgatgagaatacccataatggtgatgatgggcgtcgcaatggcggcgagcagcagcgaattccacaatggctgcagccccgtggtgaaggcgcgcgcatagtgctcggtggtcagcgtccagtcgataccaggaatcttggtgaaactcacccagatgaccgtgccatagagcagcacgatgatcgccaccagcgcatagcagcacgccgccagcggccagacgatggccggatgcacgatgcggatggtctggttggcgggcttgcccgtcacagtcacatagctacgcttggacacccaatggcggtgcaccatgaaggcgaccagagagggcagcagcaataggctcgccagcatggcgccggcttcgagattgaaatagccgatcagctgggaataggcttcgacggcgagcgtgttgtaattgccgccgatgacaagcggattgccgaaatcctcgatggatttgacgaagaccagcagcatggagctgagcagcgccggcatggtgaggggcagcgtcacgcggcggaacgttgtccattgcgaggcgcgcaaggtggcggcggcatcttcgagcgcgctgtccatggcctgcagcatgccgcgaatattgagataggcgatgggggtgaaggccagcgcctggatgaatactaggctctggaagccatagatattgctgttgcggatgcccagcaattcgcgcgtcaccaggcccgaacgcccgaacaacaggatgatggcgagggcaatgacgaagggcggcgaaatgaccggcagcagcgcgatcagatgcacgcccttcttgccccacatattggtgcgggtcagcgagaaggcgagcaggaacccgatcagggtggccagcaccgccgaggcgacgcccaattgtatggtgttgagaaaagcccgcaccaccagcggcgaggtcagccggtcgacaacggcggcaaagccattgccttccccacctgatgctgccagccgcaagacgctggcgatcggcaggatggcgaagatcaggaccgatagggtcaggacgatgaacagtccgaacagccagggatcggtaacaattttcttcagccccgcggtcaacggggaacgcttcgcgacggattgcatgccggcctcgcagcaggagaagaggcgagggtttcattgcccctcgccctcgctagggttactgcgcggcggaggcgtcgcgcacttcggcctcatagcgttgcagcaggcgtccgcggttttcgcctgcccatttggcgtcatagtcgatcagcttgacctcggaggtcttgatctggaggttggggttttcaaagccggggatgaccgactcgcgatgggtcgcgcccagcgccgtctgcccggcatcggtcagcacccagtcgaggaaggccttggcggcctcgcgctgctcttccgggccattggcgatgacagccgccgaattcagctcatagccggtgccttcttcggggaacgacacggcaatcggatagccctgctccagcgccacttccagcccatgggtaaaggactgggaaatggccacttcgcccgaggcgaccatctgggtcagcgcgccggccgagcgcgaatattgcagcacattgggatcggtcgccttgaggatttcaaaggcgcggtcctcgccatagatctgcaccatggtggcgagcaccaccgatgcggtgccggacgaggccggatgggtcagcaccactgcatccttgaacaccgggtcggcgaaatcttcccagctggtcggcggctcggcgccgagttcggcgagatagtcgggattatagaagaaggcgatcgccgagatcgcgatcggggtccaggcattgtcggcactgctatatttgggcgcgacgcgctctacaccctttgccgcatagggctcgagcagcccctcgctgccgccctggatgaacagatccgccgtgccggcgagccagagaccggcctgcggattggcggcctcggcgcgaatgcgggccagaacctcgccggcgcccatgcgcacgaaactcgagctgatgccgctatcggcctcgaaggccttgagcaccgaagcgcaatcgtcttcggacatcggacaatagaccgtcaggctctgcgcgctgacgcccgaggacagagccagcaccgcgccggcagccagaatgagtgagtgaacccttgccataccttatctcccgtaaggctcccttggagcacgttaagctatgtggcaaaactacgatacgtcaagtcaatcgtaataaaactacataatcggcacggtgaccgattgccttggggcaaatgccacgtggcaattgccctttgcgttctccttctgtttatgtcgcctctatcgagaccaccgattccgcgaggacctcatgaaagcccccaagcccgatatcgcggttctgattgcccaggacatcggcgcccgcccgcagcaggccgtcgccgccattgcgctgctcgacgagggcgcgacggtgccgttcatcgcgcgctaccgcaaggaagtcaccggcgggctcgacgatacgcaattgcgtctcctggccgagcggctgggctatctgcgcgagcttgagagccggcgcgaggccattctcaaatccatcggcgaacagggcaaattgacccccgagctcgaggctggcatcgccgtcgcgcccaccaaggccgagctcgaagacatctacctgccctataagcccaagcgccgcacgaaggccgagatcgcccgcgagcgcggcctgggccccttggccgaagccattctcgccgatcgcgccgccgtgccggcagatctcgccgccgcctatctcaccgaagaggtcgcagatgtgaaggcggcgcttgaaggcgcgcgcgacatcatcgccgagcgtatttcggaaaatgccgaactggtgggccggctgcgtgcctatatgaaggaccgtgcggtgctgcgctcgcgcgtcgtcgagggcaagcaggaggccggtgccaaattctccgactatttcgaccatttcgagaaatgggccaccacccccagccaccgcgccctcgccatgctgcgcggccgcaatgaagagattttgagcctcgaactcgaagtggatgccgacgacagttccgccatcaagccggcggtgcgcatggtggcctcggcctatgatgtcggcggcaagctaccgggcgatctctggctgctcgaggtcgccggctggacctggcgcatcaagctgtcgctgcatctctcgctcgacctgatgcgcgacctgcgcgaacgcgccgacgaggaggctattgccgtcttcgcgcgcaatctcaaggacctgctgctggccgcgcccgccggcacccgcgccactatggggctcgatcccgggatccgcaccggcgtcaaggtcgccgtggtcgacggcaccggcaagctcgtggccactaccacggtctatcccttcccgccgcgcaatgacgtcagcggcagccaggcggagctggccaagctcatccgtgcccatggggtcgagctgatcgccatcggcaatggcaccggctcgcgcgaaaccgaaaagctggtagccgacatgctcggccatatgcccccacccaagccgctcaaggtcatcgtctcggaagccggcgcctcggtctattcggcctccgaggccgctgccgccgagttccccgggctcgacgtgtcgctgcgcggcgcggtttccatcgcccggcgcctgcaggacccgttggccgaactggtcaagatcgagcccaagagcatcggggtcggccaatatcagcacgatgtcgaccagtaccggctggccaaggcgctcgatgccgtggttgaggatgcggtgaacgcggtgggcgtcgatctcaacaccgcctccgccccgcttctcgcccgtgtctccggcctcggcgcctcgctggccgaagccatcttggcccatcgcgatgccaatggcccgttccagagccgcaagcagctgcttgacgtggcgcggctgggccagcgcaccttcgagcagagcgccggcttcctgcgcattcgcgacgggtccgaaccgctcgatgcctcctcggtgcacccggaagcctatggggtggcgcgcaagatcgtgtcggcctgtgggcgcgacgtgcggacgctgatggccgatagctcggcgctcaaggcgctcgatccgcgcgtcttcgtcgacgagcgcttcggcctgcccaccgtgcgtgacatcatcagcgaactggaaaagcccggccgcgatccgcgccccgccttcaagaccgcgacctttgccgagggcatcgaggacatcaaggacctgcgccccggcatgcagctcgaaggcacggtgaccaatgtcgccgccttcggcgccttcgtcgatattggcgtgcatcaggacgggctcgtgcacgtctcccaactcgccgacaaattcgtcaaggacccccatgaagtggtcaaggccggcgacgtggtcaaggtcaccgtggtcgaggtcgacgtgccgcgcaagcgcatcgggctgaccatgcgtcgggatggcatgagcagcgcccgcgccgaagccggcgccaatcgccgccccgccgacaagccagtgcgcttgccgaagtccagggaagaaccgcgctcgagccaggggtcgttcggcgcggcgctgagcgaggcgttcaagcgcaagtagcggcaagccgccacaggcgtcaccggcccatcagccggtggcattgcccttgtcgtcccgctatggtgcgcccgtccccgcgcaaggaaccacgaccattctcgcctatacgcttcgccgcacgctgatcctcatcgtctcgctgttcatggcggccgtggtgctgttcgtgctgttgcgccttctgcccggcgaccccgccaatgccctgctcggcgtcggcgccaccacccagcagatcgaagcggcgcgggcccaggttgggtccgaccagccgcttgccgtgcagttcgtcagctttatcggcaatctcgcccggctcgatctgggcacctcctttgtcagccg

SEQ ID NO: 3016 - DNA, 23297 bp, synthetic construct
  misc_feature 1..23297: note = Synthetic
  source 1..23297: mol_type = other DNA
agcttgatcaagcggctcccgcaataatcgcgcgacaatcattcatctgttgcagttgttttcgtggcattccggtgaatgcgctacgcgttcatcgccggtcaaataacaagccgcctgctttgcctgaaccattcttgcaagcagcagctttatttgccgtttgaacccgcgcagcaaaatcggccggttcaacactcacgcgtatttcattgaaagcgtgggttgacgtgaagcatcgggggcgtgaacccaattccggaagctccaaatgtgccaaaacaagaaagctcctgccttatttcattgagtggtcgtgcgggctttcaaagttgaaccgcgaacaatcaatttgcttttcaaaacggtttgccgcaccggttttagcgggttttcaagcctttccatcaaacagtgataggcttcgcgggcaatgtcgcccaccggctgggcaatggttgtaatgccgttaaagacgagttccatccatggttcgtcgtcaaaggctgccaaagccagttgatcgggcacaacaataccggctttgtttaaaaatgccgccgctttcaaagcgagaaccccgttggtgacaataagcgcatcgatttcgggattatttgccagcgcattttttaaagatttcgccacattatctttttcgtgttttatggctacactttcaccggaaaggtgaagtgcgttgattgcctcctcaaagcctttttgccgttcaaaaccggttcggctatcagctccataaaggcaaagaatgtgctttctgccattttcgtaaaggtggtgcacaagctttttggcggctgcaagattgtcgataagcactgaatcataaatcatttcatcgggcttgcgatcaacaagaacaagcgggcgttgcagttttgccggtctcgttttgcggcttgttatgtgtttgcggcttgttaaaagcgtgggagcaagaataataccggcaacgttttcttcttccatcaggtcgagataggccttttcctgctcgggattttcatccgtgttgcataagatcacatgctggttgcgggtttttgcaatgtcgtcgattgcgcgggcaaagcgggtaaaaaacgggtttctgatgtcggcaatgataaggcctatcatatcattgctatgcccgcgcaaacggcgggcggcaaggttcggccggtaacccgaggcaaggattgcctcctccactttgcttttcaattcatggctcacaactttgccggaaatcgcacgcgaaacggtggcaaccgaaacaccggcaagttttgcaacatccttgattgtggcagccattcgaattttctttctttcctagtgcgcgaatacgataaatagacgttttttccttgaaaacgtttccagaatttgctgtagaattatatgacagaattaaacagttgcttgatatatttcaagaaaacgttttcaattcattttgaaaagcccaagggaggaaacccgtggcagcagcatctgaaaagacagcaattctttccgaaaatgcaattttgttgaatgcggatttttccgacaaggagtcggccattcttgccgccgctcaacttcttgttgatgaaggcgcaattgaaccggcttacgggaaaagcatgttggcgcgtgaaaaggttgccaatacgtggctcggttcaggcgttgtcattccccatggcatggtggaagaccgcaaccttgtcaaccgtgatgcgatctcggttattcaagttccaaatggggtggactggcaaaatggcgaaaaggcaaaactgatttttgccatcgccgccaattccgacggccatatcgaaattttaaaaaggttgacccgactacttagccatcccgatgcgctgcaaaaacttgaaacgaccaccgacaaatcggtcattatggcagcccttgtcgaaaatgacgaagcaccgcaaagtgaagccgccgatcttcgggtgaccaaagaatgggttcttgattatccgtccggtcttcatgcgcgtccggcgtcgatctgggtggaatttgccaaaaaaagcgggcaaaaaattctcgtccgcaatggcaatagtcaggccgatatgacaagccttgccggtctcttgcaacttggcggaaaaaatggtgacaggctcgttttttcaaccgacgcggaaaatggtgaacagcttctgggggaagcggttttaatggcaagaaaaatcaccttgagcgagaaggaagcagccgaaaaagccgaagtgaaaccgaagaaaatttatggcttccggccaccttcaggaaaagcgggcattgacggcctgtcggcaagccccggtctttcagtcggtacaattttcattctggaaaacggggcgggtgaagtcgaagataagcccggcaaactttctgaagatgccgcacggcttgaaaacgctttggggcgcaccaaagacaagatgaaagcgattgtcgatgatgtgacccgtcgtatcggcgcgtcggatgctgccattttcaaggcacaggccacccttcttgatgatgataatcttatctcttctgcctgccatttgatggcggaaggccatggcgtggcatggagctggaacaaggcggtcgaagaggcggccaatgcccttcaacatatggataatcctttgcttgccgcccgcgcggtcgatttgcgcgatgtcggcgggcgtgtccttgccgagatcgacccgctttatgccaaaggctcgttcgagaatatcggtgaaggggcaattattgttgcggaagatttaacaccttctgatacggccaatctcaaccctgaaaaagtccacggtctcatcacggcatcgggcgggccaacctcgcacaccgccattcttgcgcgcactttgggaatccctgcgctggttgcagcgggaaacaaggtttttgaagcaaagaatggcgagagcgcgattgtcgacggctataacggcattttatatctttcgcccacgaaggaagatgtcgagactgcacaaaagcaaatcgtcaaattggcagaagagcgtgaaaaagaagttgccgaacgtgccaagcctgcaaaaaccaccgacggacatgtaatcgacatcgccgccaatatcaaccgccccgatcaggttgcctttgcattggatgaagggggtgaaggtgtggggctgatgcgcacggaatttttgtttctggaaagcaccgaaacgcccgacgaggagacgcaatataaggtttatcgcgatatgctttcggcattgggtagcaaatcgcttattatcagggcgctcgacattggtggcgataaacaggttgcccatcttgatttgccgaaagaagataatccgtttttgggcgtgaggggcgcgcggcttttattacgcagaaaagacctgctggtgccgcaattgcgcgcaatttatcgcgccgccaaagaaggcggcgatccgtggattatgtttccgatgattatgtcggtgaacgaaattagagagttgaaaacgcttgccgaagaaatccgcaaagatcttgccgcaccggttttaaaaatcggcattatgatcgaagtaccagcggctgccattatggccgatatttttgctccccatgtcgatttcttttcaatcggcaccaatgatctgacccaatataccatggcggttgaccggcaaaatcccgatcttgcagccgaagccgacagccttgatccggcagttttgcggatggtggaaagaaccgtttcaggggcggaaaaagcaggcaaatgggtaggggtttgcggcggcattgccggtgacccgttcggggcgatgttgctttcgggccttggtgtcaatgaattgtcgatgaccccgcgcgatattgcaaccgtcaaggcaaggctcagggcaaaaagccttgccgatatgcgcaaacttgccaacaaggctttgcaatgtgaaaccgccgaagaggttcgcgcccttgacgaggccaagtcatgaaaattgcaacactcaccgtcaatccggcaattgatgaaacaatccatttgaaaaagcttgaacgcgggcatgtccaccgtgccgaagaggcacgtttcaatgcgggcggcaaggggattaatgtggcagcctgccttgccgatttttctgttgaaacggcggtgacagggtttcttggaagcgccaatagccgactttttgaagagctttttcaaagtcaccatatcgaagaccgctttatccgctatgagggtaaaacgcgcaccaatatcaaaatcgttgacgagagtgaaaccaccgacatcaatttgcaaggggtaagcccgacggtggaagaaatcgcaaaattgcaaaatattgtcgatgattttcttgccgaaggcgcgcttattgtcatgagcggcagccttcccccgaaaatggatccgcgtttttatagaaacgaggttgaaagggcaggaagtggcgcaaaaattattgtcgattgcagcggaaaagcgcttcaggaattgttgaaagcggaaaaacttccccttgctatcaaacccaatattgacgagctttcggccttttgcggccaaaagcttgaaaatgagggagaagttttaaacattgcccgctcgttgattgaccgtggaatggcacttgttgccgtctctatgggcgaaaaaggagggctttttgtttcccgtgaaggggcaatccacgcgcaatatttgctttcgggcgtcaaaagcacagtcggggcgggggatgccatggttgcaggcattgcaaaaagcatttccgacaacgcaaaactcgaagatattgcacgccttggtacagcctttgcggttggcaaacttcaaaaattcggaccggctttgccggaaaaaacgataatcgaaaatttggctcaaaaggtagaatgtcggcgggtcggttgatcgccgcatttgaacgaggagaacaacatgactttgatagccttgatagatggtgcgggcggtggtgtgcatagtttgcttgcccgcgaagttcttcaaaaagccgcaagcgaaaggggcaaatctttaagccttgaaatcgtcgagacaggaaccttgccgcgcattcccaaagatgccggttccgatacattgctgcttgtgagcaacaatcatgattggcaaaacgatcatttgaaaagcttcaaaggacaactacaaagactgacatttgaagaactcttcaaaaacccttctgccattattttttcgggagatggcgaaaatgatccggtagaaaacggaacagaaaaaatggcaggttctgatcaacttcatccggaactcaatgatgccaatcgcagccttaaaattgtcggtgttacatcttgcccgaccggtattgcccatacattcatggcggccgaggggcttacagaagcggccaaagctttaggccatgaaatcagggttgaaacgcaagggtctgttggtgccggcacacctttgacggcggccgaaattgccgcggccgatcttgttattattgccgcagaccgcgaggttgaccgcacccgttttgcgggaaaacgcgtttattcctgcccgacaaaaccggccatcaataatggcgaaactttaataaaaaaagccattgaaagtgccgaagtgcaaaagcagaaagcggttcaggacggggaaagttctgaaagcagcgaaactgctggcggtgtctacaagcatttgatgaccggtgtgtccttcatgcttccctttgttgttgccggcgggcttttgattgcgttgtcctttgccattggcggcgttggtgtcaccaatcaggaaggcacatttgccaatgcactttttgtcatcggctccaagggcggttttgccttgatggtgcccgcacttgcgggctttattgcctattcgattgccgaccggccgggcattgcaccggggatgatcggcgggttactgtcgcaaaatatcggcgccggtttcattggcggtatttttgccggtttcattgccggttattcggttcgccttgccatcaagtggatcaaattgcccaaaagcttgcaaggcttgatgccggttctggtcttgccactcattgccacattgataaccggcctgttgatgatgtttgccatcggaacgccggtcgcagcgcttcttaatttcctcaccgaatggctcaaaggcttgcaaggaaccaatgcctatctccttggcgccattatcggcggcatgatggcggttgatatgggcgggccggtcaacaaggcagcttatgcaacttcggttgcactcatttcatcgggcgtttacgggccgattgctgcaaccatgattgccggtatgactccgcccatggctttggcacttgccgcatggattttccccaaccgctttacaaccgatgaacgctcctcgaaagtatcaaccttcattctgggacttgctttcatcagcgaagggtccattccttttgccgcacgcgacccgttccgtgttatccccgcgctggttgtgggctctgccgttgccggtgcggtcgcgttggggctcggcacgggcttgcgtgcaccccacggcggcatatttcttgcctttattccaggtgtcgtcatcaattatgtcggctattttgcagcacttattattgggacaattgtcaccacgattgtgcttggcattttgaaacaaccgattgttgcggtagaaaaaaaggcctgaacactatactttcctttccgccatatggtttatggcggaaagcggttttataaaacgagctttgcaaaattttgcttggagcgcgaggccacaaaaggggcttgaagccacaaaaccggaacagctcttttgaaaaacacttgccggtgaaatgctcacagccattctcccgtcagacttgctttaaaaaacaaacaacgcttatttgcaactgatgcattttgttttttaaattgggacgcgaaagtttacgactgacattaaaaatattcattttaaaatcttaagttgtggaaacactgttcgctaaagacatgcaataaatacattgcctttacttgctttttctccggtgagagattttattaatcggtgcacaccgtggcgggcttttgaaaaagcttctcgaaacgcaagccagaaaggcaatctgaaaggcaaggttgatgacaaatagcaaaccgaaaatggcaatcgcctatgactttgatggcacattggccgacggtaacatgcaggaagcgcagtttttgcccaatattggtatgaaaccgaaagaattttgggaagaggtcaatcaactggcaaagaaaaatcaggccgataacgtgctcatctatatgacacagatgctccgcaaagccgatgaggcaggcatttctgtgcggcgtaaagatttcaagaaatttggcaaaacggtcaaattgttcaaaggtgtcgaaagctggtttcaacgcatcaacatttacggaaaatcaaaaggggtagaggtcaaacattacctgctctcggccggtaattatgaaattattgtcggaacggcgatcgcaaaagagttttacaaaatttacgcctccaaatttttgtttaaccccagtggggctgctttttctccggccttggctgtcaattacacaaccaaaacacaatatctttttcgcatcaataaaggcgagttcgatctgagcgatgatgtcaaagtcaatcaatatgtgaacaaggcagaccgtcccgtcccctttgaaaatatggtctatatcggtgacgggacaacagatgttccctgttttcgccttgtcaaagatcagggcgggctttctattgcggtttataaagccaataaaaatggcgcacacgaaacggcgtcgaaatatattgatgatggccgtgtccaatgcgttttaccggcaaattattcggaagggagcaagcttgaagaggtgatcaaggccaatattgatgttgttgccgcacgctctgcccttaaaaatctgctctatcataaaaaacagccgcgaaaagtccgtgcaaaaaagagcgaccaatagttacctcttttcaagagcccgcaataaaatgaccgtgagcaaaatacgctcctctttgccaaacgtgcaacgcctcttcaaactgataaagcctcacttgaacagcggaaggtcatcgggaatcttgtctagtttatcgcgatagaggcttacaaaagtttcaagatcacaaagactttcaagattagaaggattatttttcgcgctttcgtcttttccggataaactgcattccggattggtataaatttcgtgggcaatcgggtttttctctgaaagcggcgttaaaaaccgccattcgtcaagtgttcgcgcgacaaatgacaattgcacagctaagcggccggttttgttatttttataacgcttgaatatcaacatgccaccggggggaatatcgtctgccggataggaagcaagtttccaatgaaaatccaatatggttttgatttgtgaaatattggtgtcgtggccgacaaatataacaaggggtgcggcaagttccggaaagctcggttcgcctcccgacgttttatcggcaaggaggctatcggttatttcatgcattaaaatattgccgccggttcttgcaatttccattgtattgtcaagaagatcatattttgctgcatgaaggctcatgagttttaacacatcgcccgcattttttacgtgcccgaatgcaacctcttgaacgggtaatccttcactatattgcaagcggattgtttccgaaattgcactggcagacgagacggggccggtcaatttgtattttcccgattttgtttttttgaagccccatttttcatcaagaaattggcagtctgtcacgccggttccacacacggtttggcgcaaccactccacatcatcggcatatttttgtgccgctttttcggccgaaccacccatggcttccatcacttcatcttcaacttttttctggtccggttgcgctaaccccatttccacagcctgaaaaagcgggtcttttttttgaagcggcaaatggcttggcgttataccgcatccgggaaacataccgtcggttaaagcttgcgctgttgcaacagtccgctcgatcgggcttgcccggatgaagacttcattttttttcgggcaaggggaggagagtgcaagcccttcgcttttccagttttcaaacatatagcgggattggtcgacaataccggcatagccatgaccgctcaaatttccgtcgggcactatccattgaggccattttctgccggttgcttggtcgagttttgcggtgtcgttttgcgggcgcacgccatggcgcatcaaaaccaccaccttgtccaatgtgtaatcggaaaaatcctcaccggctatcgcttccggcttcgatatagaaaagttcgttagcaaaacgacaatgaaaaccgccatcaagcggcatattttagcccacaaaaaacggattgttgtcatagacatgtcggttgattttttcattgtgtgatcgcctgtcggttccggctttaaaaaattgtcgttttactcaaaaaatttgtcatctatcgaaaatagtcattacgcgcttttttgacaggaaagaatttaaaaaaaagccggatatttcccgcctgttgcgtccggtaaaatcacaagcagtgttaaaaaatcacatcttttttttgccgtcaccaagcacaaaatagctggaatgatgacaagtccgccaaacaaataatacgtcaataagcaccaagttcgtgcgaaaacaaatttaagaaaataaactaaagtacaataaaaaacagcccccggaggagctgtcttatttggtgcatatctagcttgttaacagccagaccgcattttctaatctgtaaacgtgaaaatatatgaaaataaccagctgtcaatagttttttattcttgcttattttttcctcttggttaaatttttcaacgattttgcgtgaggggagcggttatgactgctgaaaactattccaatgttcgttttgcttttgatattggcaccaattccatcggttgggcggtttttcaattaaatgacaagcaggaagcgacaagcattctgaatgccggtgcacgtatttttagtgatggtcgggatccgaaaacttttgaacctttggcggtaaggcggcgtaacgttcgttcggcttcccgtatgcgcgaccgttacctccgtcgcagaaaaagaacattggataaattgataggctatggccttctacctgaagataaagccgagcgtgataaaatactccttgaaaccaatgacaaaccatccggttctacagacaaaaagaccgacccctattcgttaagagcgcgggcacttgaagaaaaattgcctttggcctatgtggcgcgcgcgcttttccatatcgggcaaaggcgcggcttcaaatccaaccgtaaagccgatcgtaaaagcaatgaaaaaggcaaaattgctgccggtattgaagaattgtcaggcttgatgcaccagagccacgcgccgactttgggcgcttatcttgccaaacggcgggaagaggggcatgtcgtgcgccttcgcgccagttccgaagcattgacaaataaggcttacgccttttatcccgaacgcgccatgcttgaagacgagtttcacaaaatctggcaagcgcaggcggaatattatcccgatgttttgacaaaagagcgggaagaagaattgttccatgtcatgttttttcagcgcccgcttaaagaacaaaaggtgggcttgtgtactttggttgaaggcgaattgagactccccaaatccgacccgctttttcaacaattccgcctctataaagaaatcaatgaattggcgattatccttcccgatttgtcacaacgcaaattgaccatggaagagcgcgatacgctcatcacattgatgcgtccggcaaaaacaaaaacatttgcggcacttcgcaaagcgttaaaaattccggccggcgggcgctttaataaagaaaccgaaaatcgcaagcagttaacgggtgatgaagtctattcggtcttttcaaaaccggaacttttcgggggtgattgggccaaattttcaatagagcaacagcgcgaaattattgatcagctcaataacgaagaaaatcccgataaacttgaagaatggctgaagaacaaattcccgaaattgtcggatgaacagcggtctgaaattatcaacgccaatctgcccgacggttatgggcgctttggcattacagcaacatcgaaaattctggagcaattgaagaaggatgtaattagcgaagccgaagcagcccatcgttgcggcttcgatcattcattggcaaatcgcaattggaaggggttggacgagttgccacgctatcaggaggttctggaacgccacatcgttccgggaaccggcgacaagaatgatatttatgacatttataagggtaggcttaccaatccgaccgttcatatcgggcttaatcaggttcgtcgcctcaccaacaggctcatcaaggcttatggcaaaccgtggcaaatagtggtcgagcttgcgcgcgacctaccaatgtcgtcagaagagagaaaagaacataacaaaacgcttaatgacaacattaaagccggttttgaacgtactcaaaaacttgaaagactaggacaaaaagacaacgccaataaccgattgttgctgaagctttgggaagagcttgggaaggatcctgacgatagaaagtccatttattcgggaacacggataaccgaaccgatgctgttttcgggcgaagtggaaatcgatcacattttgcctttttcactcacctatgatgatagttatgccaataaaattctctgcttacgcgaagaaaacagaataaagcgcaaccgtgctcctgccgacgttacagaatggaaagatcgttatgatgaaatcatcgggcggtcaaaaaaattgccagagaacaaacaaaaacgttttaggcccgatgcaatgaaaaagttcgaggacaatcggcaatttcttgcccgtcaattgacggatacccaatatttggcaaagcttgcccgcgaatattttgatagtctttatccgggggaagaggcggattctgttggcgagttcaaaaagattcaacacgtttgggtaactcccggcagattgaccgaattgttgcggagtaagtggaatttgaatttcattctggcacttgacccgggattgtcgagttttgagaagttcaaaacccattataagaaaaaccgtaaagatcatcgtcatcatgccattgatgccattgtaatcggtgtcacgacgcgttctcttttgaagagcattgcaacggcagccggaaaatttgaaaaggaggatttcgatgcttttgtagaaaaagtagtttccgatgccttgccgtggcccaacttttatgacgatgttaaaaacattatagacaaaatcattgtcagccataagcaggatcatggcacaataaaccgtgccggttacgctcaaggcaagggcaaaaccgccggacagttgcacaatgaaacagcctatggactaaccggtgaaatggacgacaagggcaataaagttgttgtcacgagagagaatttcttgtcactcgagagtgaagatattccaacaattcgtgacgagaatttacaagccgaactttatagtgcaacgcaaggtttggacaaaaaggaatatcaggaagctttgctccgttttgcacgtgaccataagctttataagggtatccgccatgtcagggtgctcctgcctcgtaatgtcattgaaataaaagacaaaaatggtgaaccctataaaggctatatgggaaattcaaactatcgctatgatgtttgggaaacattgaaaggcaaatggattagcgaagttgtttcaatgtttgatgcgcaccaaccaaaatggagttcggaatttcataaaaataacccgacagcacgcaaagtgttgagcctgcaacaaaatgatatggtcgcttataatgatccggaaagagggcgtgtgattgcacgcattgtcaaattcggtcaaaacggcctgatattttttgctccccataatgaagcggatgtatcggcgagggattccaacaaaaacgacccctttaaattgactgttaaaacagcaacgggtttgaaaaaaatgcaattccggcaaattcgtgtggatgagatggggcgcgttttcgaccccggtgcgcaggacagagagtccaaacaagcaagatcataggaaatgaaccctgtttataaaaaactgttgagaacatgccgttttgcggcatgctctttttatgaaaagaatagttgacatacctgctgaaggcttacaccttgccataaaaagaggttttttaaccatttccagtcgagaagcggaagtggggcgggttgcgcttgatgatattggagccttaattactcattcttatggtttaagttggacaaatcacgtctttatcgagttgtccgaacgctctattccaatcgtgttatgtggaaataaccaccgtccggttgctatcgtttgtccggtagaaggccattctgttcaagctgtgcggatgaaagcgcaggcttcggcaccaaagccgatacaaaaacagatttgggcagaaatcgttcgttgtaaaatcaggctacaaggcgcagtgctcaaagcttgtggcaaagagggggcggcttttgtctccattgcccgtcaggtgcgtagcggtgacccggaaaataaggaagcacaggccgcccgcaaatattggaaaacattattcggaaccgcgttcaaacgtgacatagcacaagaaggtatcaacagccttttaaattatggttacatcgttctgtgtgcacttgtttcacgcgccatttgtgctggcagcctccatccaacattgggcgtttttcattcacatcgtgccaatgccttcgcgcttgctgatgatttgatggaaccttatcgtccttttattgatcgcatggtcttccacctgcttactcaaggaaaaacaaaagttgatgccgaggtaaaaacttatcttgcttcactttcatcacttgatttgaaaagtcatgttggaacgtcgcctgtcagccagcaagttcaatactttgtacattcggttgcggaaagttttgaaacgggcaaggtcaagttggctttacccgatgaacgttcaattttttctttgcaaaacgatccggtccaaattgatgaggcatggggagaagataacaattatgacagcctatcttgagcgtgcaacatcgggtcctaaacatttaagcgggtatcgattaatgtggatatgagttactttcgacttaccggtagacacaagaaaacagcgccacgacgcaacgaaattcagacaatttttgttggatattggctttgagatgagcgagttctcgaactatctgcgtttctgtaacggaaaagaacaattcgaatcttatgtcaggaagatcgaatcctcattgcctgaacgaggaaacatctatattttccaatttaccgacaagcaatatgaaaatattgtaagattttccgatcaagcacgtaggaaacgtcaaaaaaatcccgcccaactggtgttattttaatgaaaaacaacattttttttaaaaaaatatccacttaatccttataaaacaaagggttaagtggacatcagttgtaacagattagaaaatgcggtcaagccgcaacaaaacggtaaagaataccgcctcaatcacatgttgtaacagattagaaaatgcggtcaagccgcaactgatttagatgcgccgtcgtcaaaacgacctgttgtaacagattagaaaatgcggtcaagccgcaacttgtttcgctaggtcttgaacttccggcgagttgtaacagattagaaaatgcggtcaagccgcaacaggaagtcaagctattcgttccccgcgtcagttgtaacagattagaaaatgcggtcaagccgcaacaaagtggcgcggccatccgctcgcgtcagcgttgtaacagattagaaaatgcggtcaagccgcaactgcaaaagcagcgcatcgtctttccccgccgttgtaacagattagaaaatgcggtcaagccgcaactagcttggcggcttttgcatgtcgagaaatgttgtaacagattagaaaatgcggtcaagccgcaactcatctgtaacgtcaccgatctcaacgggggttgtaacagattagaaaatgcggtcaagccgcaacatgccaatgggcgaggttgattattcgcgtgttgtaacagattagaaaatgcggtcaagccgcaacaaacatctccagttccttggatacccattttgttgtaacagattagaaaatgcggtcaagccgcaacctggacaactggacaaggtttttaaaagagttgtaacagattagaaaatgcggtcaagccgcaacctggacaactggacaaggtttttaaaagagttgtaacagattagaaaatgcggtcaagccgcaaccctgttaaatcgtactcacttctggcttgtgttgtaacagattagaaaatgcggtcaagccgcaacagtcttcaccaaatgccacaagcctaaccggttgtaacagattagaaaatgcggtcaagccgcaacaagaaaggcgcgaaggtttttatcgaagggttgtaacagattagaaaatgcggtcaagccgcaacagcttcggcggtgcattcatccggaagaccgttgtaacagattagaaaatgcggtcaagccgcaacttattcattacatcatacgcaagaatgaaggttgtaacagattagaaaatgcggtcaagccgcaacatgttgccgcgaaaagcaccttcaggtgtgttgtaacagattagaaaatgcggtcaagccgcaacttaacccgctggcggattttcatctcgctggttgtaacagattagaaaatgcggtcaagccgcaacatgttctcttgtttgatcgttaccggttgtggttgtaacagattagaaaatgcggtcaagccgcaacataacacattccaataaaaaagcccgcttggttgtaacagattagaaaatgcggtcaagccgcaactttcgttttgcttttcctcgcgctttgctcgttgtatcagcctatataaaacgtgatcaggctgcaagcatggtcaataaagccaatattgcagcctgaacacaacagattaaaaaatgcggtcaagccgcaactaaaagtgtcaataaattaacaggcaatattctaacagattagaaaatgcggtcaagcgcggccattccaagcgggcgcataactaaagaagtcgtttcaaagaaaaggaaaacgatggcggagagggagggatttgaacccccgatagagttgcccctatgccgcatttcgagtgcggtgctttcaaccactcagccacctctccataaaaggcgaactttatttgataaacaaatatccgagcgcgttagcggctaaatagctggcaattagctttgacacaagcccctttttttaatttttggaaaattccgttcaccctttcaactttgttttgttcatttttgcgcggggccacgggcgcgattttttaaaaagcatcagagttgttcaggcctattgctgtttacccgacaaaaaatgtttgttgtcaagtgcatccggtttttcgccatgattgccggctaattcacaaaaagctttccggttttttaaagctggtcgattgacaagtgaagaaaacttctgcataaatcggccaaaggcgtagtgtgtctacatttgtgtgaaaaagtgtatctgcacttgtctaaaattatgccggtcggttttctagggctggcaaattttaaagattgatagttttaacgactgataaaaagacgggctgtctcatcgctttgaagtgttggacaagatccggatggaacgaaagggtaaaaaatgttcgcagtcatcaagacgggtggtaaacaataccgtgtttcccccagccaacttgtgaaagttgaaaaggtcgctggcaatgccggtgatattgtggagttcaatcaggttctcgttgttggcgaaggtgaaacagcaacaatcggaactcctgtcgttgccgatgcgttggtaacagcagaggttgttgaacaggcacgtgcacgcaaagttattgctttcaaaaagcgccgccgccagaattcaaagcgcattcgtggtcatcgtcaggaattcaccacaattcgcatttccgaaattcttacaggtggtgcaaagccttccaaggctgcaacaaagccggctgaaaaagcagcaaaaccggtagccgccaaagaggcagcaccaaaggctgaaaaaccggctgcaaagaaagccaaaacagaaacaaccgaaaaaaaagcagcgccgaaaaaggcagccgctaaaaagtcggaaaagtaagagagattaaaggagaacaaccatggcacacaaaaaagctggtggttcctcgcgtaacggtcgcgattcagaatcaaaacgcctaggcgttaaaaaatttggtggtgaagcagttattccgggtaacatcattatccggcaacgcggcacacaatggcaccctggcgaaaatgtcggcatgggtaaagaccatacattatttgcccttaaagcgggcaaagtatctttctgcgtcaaagcgaatgaccgctcctatgtgtcggtgattccgatggcggaggcagcagagtaagccggagctcttaaataaaaccggcgtcccattggaccccggttagcttccaaagcaaattaaagggaaagatgggacaccatccttccctttttctattgctccaggaggtaactatgagcactgaattattagaagaaataagaaagaggccgcccagaaccttggattgcccggttttggtaactgaaaggcttgttttacgcgcacccaatgtagaagacatggacgccattgccgatctcgccaacaaccggaatgtatctgccatgcttcaatctatgccttttccattcacacgaaaacatgcggcagaatacattcttcgttcggtggcgggcgagatgggctattgcgcctatgccattacaaaagccgaggatggcgcgtttatcggcgcctgtcatatcaaggaccgcgaagaaggcgaaggcctgagcctgcgttactggattggcaaaccctattggaatatgggctatgcaacagaagcggttggcagcctgattgatgccgctttccgtgcaaccgatattgatgcgctctatgtctcgaattttgcggccaataaagcttcccgccgcgttatcgaaaaacagggctttgaatatatcggaacatccgaacaaaactcgctggtttccggtctggttatcgccgacaattatatcctcgaacgcgaaaaatggatcggccagttgagcaaatgtgcctgaacacgcccgcttcaataatgaggcctgaaaagctcgtttgaactggcaggccttaaaagcttggttgaacaatcaggccttttataaaaaaggcctgatgaggccgttttaatcgggccgattgggtgagactggccgagtgggccaggctcgttcggttttagccactcttaaaaattgacgaaagcaaaccggatgcgacaaaccggtttaactcgctgtcttaaggtttatcatgctgtcttaaagtctgctttatcaaagcgggctgcttgttaggtagcacggcgcattcaccagcattttaacaacggaaagctttcttaaaaaatcgaaacagcggttcactaaattgcttgaggtctttctaaaaaaagcccggccatgccggctgatcctgtgttggtaagatcgcaactacgttgcccgaacgatgaaatttcgatatttttttgccttaaaggataagcaaattgatcgtgtgcttatgtgaaaatatgattagattttcaggaaaagcttggaagatacgtcaaaaaaaatcgaaaattaccggtgttattttaatgaaaaacagcatttttttacaaaaaaatatccacttaaaccttataaaacaaagggttaagtggacatcggttgtaacagattagaaaatgcggtcaagccgcaaccgtgggcttccactcaccgcattcatcatggttgtaacagattagaaaatgcggtcaagccgcaactgacacggtggcttatatggcttgcgacgagttgtaacagattagaaaatgcggtcaagccgcaactcgctgcccgaagtgttgaaaaaatgtttaggttgtaacagattagaaaatgcggtcaagccgcaaccaccagcctcgccggtcagtatcatcaagagttgtaatagattagaaaatgcggtcaagccgcaacacttgtgcgttatataatttgcgccccgttgttgtaacagattagaaaatgcggtcaagccgcaaccttgtgtctgcttctattcgaccgcaaatagttgtaacagattagaaaatgcggtcaagccgcaactgacgcgcgcgcttgtcacccgagacatgtgttgtaacagattagaaaatgcggtcaagttgcgacggaaagccgctaaaaccttgttatacttgatatttactttgttaattacgttattcgttgatttgtttctctcgttttgttatattgggtgtgcgccgagtaaggaacgccatggcttttagcgatgtggggattgcatttccggccccccggcgtgttaattcccattctgtgatatacttcttttgcttatctttaccgtgatttgtgcgttttatacgttgtgaattgtaatggcttgcggcaggtttcttctctatcgaatgtcgattatacgttttttgccttgatgctcgctcatcatcgtcaatctcccgatttcatggggcatgtgagtgacttccgggacagcagagacgataaggactgattataggttattagttgttagcaaatgctaatttagaaggtgtttcaagcggtgagagactaaccacctttctgaattggcaagccatttgaaaatggttggatttttacggaaaagcttggaagcacgtcaaaaaaaatcgaaaattaccggtgttagtttaatgaaaaacggctttttttaaaaaaatccacttaaaccttataaaacaaagggttaagcgcacatcggttgtaacagattagaaaatgcggtcaagcagcaaccaaaatcataatcgtgagcatatccggtgtcgttgtaacagattagaaaatgcggtcaagccgcaacccccgatgactacaagcaatatcaatgatggttgtaacagattagaaaatgcggtcaagccgcaacaagacataccggcggcggttattgatgcttagttgtaacagattagaaaatgcggtcaagccgcaactcgctttggcttttgctttgaataagcagggttgtaacagattagaaaatgcggtcaagccgcaacagaacgttggtaaaacgtcgttatactaaatctttacttccttcatgatgctgtttgttgattttatttttcaattacattatatttttcttggacaccgagccatccggagcgccacctttttggtgttgggggtttccgacccaacggtgtcgtcaaatttttccgtttttccttttttgctttctcaaattttccggcaatgtttgatgtaaatttgctgtaaagtcgttataccgaatgatgaaagttcgatattttttcaagggtgggacaagcaaattgttcatgtgcttatgtgaaaatattgttagattttgcttatgtgaaaatattgttagatttttagagaaaacgtggacgacaagtcaaaaaaatcgaaatttaccggtgttattttaatgaaaaacagcatttttttacaaaaaaatatccacttaaaccttataaaacaaagggttaagtggacatcggttgtaacagattagaaaatgcggtcaagccgcaactatcgttttcgtgtcgaccctcatgacagggttgtaacagattagaaaatgcggtcaagccgcaacttaccggcttgattatcaattgcgagaattgttgtaacagattagaaaatgcggtcaagccgcaacaatttcattttcaacacaaaaacgaaaaaggttgtaacagattagaaaatgcggtcaagccgcaacaaaactgatcgttaccacattcaagcttatgttgtaacagattagaaaatgcggtcaagccgcaacaagacaaggttacgtacttttctacctatagttgtaacagattagaaaatgcggtcaagccgcaactgccaagcagcgattgtcttttttattcgtgttgtaacagattagaaaatgcggtcaagccgcaacaccgaataacctttgaagacttcgataacggttgtaacagattagaaaatgcggtcaagccgcaacgatcttgaagcacggtttttcgttgcattggttgtaacagattagaaaatgcggtcaagccgcaaccgtaaacggccttgatctggttaaactatagttgtaacagattagaaaatgcggtcaagccgcaacacgtgtttacatttataaactagcacatttgttgtaacagattagaaaatgcggtcaagccgcaaccgtcattaaacccgatcaaaaagcatttgagttgtaacagattagaaaatgcggtcaagccgcaacattatgatggctccagcagattgcagaagggttgtaacagattagaaaatgcggtcaagccgcaacaaacgcgtcttcaccttcgcgatcttcgtctgttgtaacagattagaaaatgcggtcaagccgcaacattgataatccagaacagcattatgtcggcagttgtaacagattagaaaatgcggtcaagccgcaacaagaatggagatagatagatgtagtgaattgttgtaacagattagaaaatgcggtcaagccgcaacgtataggactcaatacccgcccgtgcgtcagttgtaacagattagaaaatgcggtcaagccgcaactaatggcatgggtaattaaagataggcgtagttgtaacagattagaaaatgcggtcaagccgcaactccttggcttgttcaccaccaaacaagtccgttgtaacagattagaaaatgccgtcaagccgcaacaaccgtcccacgctaagtgttcaaggcgcggttgtaacagattagaaaatgcggtcaagccgcaacattaaaatgttctcataaacgacaacataaattgtaacagattagaaaatgcggtcaagccgctagcgaatatgttttggtttcatcagtgttgtgccgcggattgtttgcttttttcgttcaaagcatggcctgcatcacggggcaatgtgcggaagatgaagaaagcaagtgccgagatgaagccgacgacgaaaaagcccgtatgaaaatcttcaagtttcaatatattgttgtgaaaggagctggcaatttccagaaccgcgccggcaattgcaatgccgagcgccattgaagcctgttgggcaacggcggcaatcggcgttgcctgactaatgtcttctttggcaatatcggaaaaggcaagggcattgacaccggaaaagaaaagcgagcgcaaaaagccgccggacaggagcacgataatcatcaacaaatagggtgtggtggggtaaaacaggccattggaagcggtaaacattgccgagacgagagaccccgccatcaacactttgcgaaagccgaaacgggcataaacttccttggcaccgaacttcatgccgagcgagcctatggccgcggcaagaaccataaggccggattcaatcggtgaaaggccgaaggcaagttgcagcatcatgggaagcaggaaaggcacggcgccaatgccaagccggaaaacgctgccgccgataatggcgcgtgcaaaaaccggatcggaaaaaagcctgaggtcaagaaggggtgctttgcggttttttgcgtgtttgatataaatggcgccgaaaattacgcccaaaatggtgacactgatgccgacactttgcggcaaggcgggaaggcttacaatcgaaaggccgaaaatgaagccggaaaggctgattgccgaaaggaaaaagcctgtccaatcaagcgggcggatatatctcttttcattttttggcagatagattgacgaaagaagaagcccgataaaaccgat

SEQ ID NO: 3017 - DNA, 23294 bp, synthetic construct
  misc_feature 1..23294: note = Synthetic
  source 1..23294: mol_type = other DNA
gccgcaaatggctggccttcggtccgatggagccccgggtcggcggccgtgtggagcacctcttccggcaccgcgaactgtcggcggaggcgacgcccgaacgttacaggaagttcgaggacagtcccgccctgttcggcgaggtgacgcaatgggatccgccacgcctgctcgcctacacctggccgggcgacgacggagcgagcgaggtcaccttcgagctctttccggagggcaaggacgtgctgatggtgctcacccatcgccggctcgccgacgaggagaccatggtcagcgtcgccagcggctgggacgcgcatctcggcatcctcgtcgaccggctcaacggggtcgaaccgcgcggcttctggtcgacccatgcgcgggtcgaggagacctatcgcgggcagttcgccttgacgacggaaaacggaacgacgcccgagcatacggtgcgggtggagcgggttttcgatgcctcaccgggctcgctctacgctgcctggacggatccccggatcatgggccggtggttcggcagggtggaggccgatgtccgcgtcggcgggcgctaccgtgtcgagagcgacggagacgccggcgaagtctatgtccatggcggacgctatctggcgctggagccggagcgcttcgtcaagcagaccttcgccgtcgatagcggcgaggccagtccctacacgcaggaattcatcgcaatttcgctgcacgaccttccggatggccgaacccggctcgtgctcgacaatggctggaacggccaggcgcccggcgaggaagggatcgaggcgacgaaacagggctggtcgatgtggctcgacctgatcgacgagatgttcgatcgccaccccgaactgaggaggaagacatgagcgttcgctatgaaggtggccgcaacatcgcgatgaaggtgccgccgcaccagtacgaggccaccgtcgcgttctatcgcgataccctcggactcgagcagctttgcggccacgagccggcggtcggcttcgtgttcggatcgaaccagctctggatcgacaaggcgccggcggcgagccaggccgagatatggctcgaggtggtcacgcgggacaaggacgccgcagccgcgcatctggaaggggcgggcgtggtgcgctgcgacgagatcgagccgctcgggccgagcttccggggcttctggatatcgagcccgagctcgatcatccatctcgtcgacgaaaaacagaccgcgtggtgaggagaaagccgatggaaacacgcaaaccgcccgtggccgtagccgagatgctcatccgcgcgccggtcgagaaggtgttcggggcgatgaccgatcccgagatcacctccaaattctggttcagcaggggcagcggcccgctcgaagccggcaaggaggtgcggtgggactgggaattctacggcgtctcctcgaatgtcgccgtcagggaattcgaacgaaaccggcgtgttcttttcgaatggtggtcggatggggaaaagccgacgacggtcgaatggaagttcaccgcgcggcccgacggaactaccttcctcagcgccgcgaactggggctttgaaggcgagggcgcggtagagcacgcgatcgggtcgaccgaaggcttcacgctcgtgcttgccgggctcaaggcgtatctcgagcacggcatcgggctcaccctcgtgcgggaccgttttcccgacggcgttggaggcgaggcatgatcaggattcacattaccagcgtgatcgtggacgaccaggccaaggcggaagcgttctatgtcgacaagctcggcttccggaagaagcacgatatcccggccggcggcgcacgctggctcaccgtggagaacgtcgacggttccggcgtcgagcttctgctcgaaccctgcggttacgatttcgccaagacctggcagtcgaccctctacgacaacggcattcccatcacctccttcggcgtcgacgacatcaaggccgaggtgaagcgtctccgcgaagccggcgtcgtcgtgcgcggcgagccgtcggaggcgagggaaggcatgccttcggtcgttacgatcgaggacggctgcggcaacctgctgatgctggtcgaacagccctgatcagccgcctggccggcggcggaactggatcagctccgcgtcgtgataggtgccgcgtgccgtctcgcggaatccgaaattcgtcgcgacgcggatcgacgccgcgttggcgggcgctatgatcgcgctctgagcgcgggtggggtggttcgcgtccgcccagccgagcagggcggccaccgcttcccgcgcaaatcccctgccgtgcaggtcgggggtgatcgcccagccgcattccagcgtgcccgcaagcgaaggctcgatcgcgcgccgcacgtcctgcacgccggcctcgccgatcagccgcccttcatgctcgatcgcccagaagccgaagccgagcgtggcccacatgccgcgatagcgcaggatgcggccccacgccgcctcggtatcgagcggcttgccgccgatgaagcggacaacgtccggatccgcccacagagcggcgtaggaggggaggtcctccggccggtgctcgcgcagaaccaggcgctgcgtgctcaggacgggaacgtcgctcatgcggaggcgaggcgctctgcgatgagggccgcaaggcgtgcggcgacctcatccttgcctgcctcgggccattcctccacgccttcggcggaaacgatccggacgcggttgcggtcgccgcccatcacgccggccgcgccgatgccgctgtcgtgggagacgtcgttggcgacgatcaggtcggcaccctttttggcgagcttcgcgcgggcattgtcgacgacgttctgcgtctcggcggcgaagcccaccaccagcttcggcctcttggcatggtgtccgacggtcgagagaatatcggggttctcgaccatctgcagcgcaggcggtcctttgccggcttccttcttgatcttctggccggtcttcgtgtcggtgcgccagtcggccacggcggcgacgaagaccgcggcatcggcgggaagattggcctccaccgcctcgagcatctgctccgcagtctcgacatgggtcgtcgtcgcgccggttggatcggcaatggcgacagggcccgaaacaagccgcacatccgctccgagccgcgcgagcgcggcggcgagcgcatggccctgcttgcccgaggaacggttggcgatatagcggaccgggtcgatcggctcgtgcgtcggccccgaggtaacgatgatgcggcggccggcgagcggcttgggcgcgccgtcgagcagcgcttcgatcgccgccacgatctccagcggctcggccatgcggccttcgcccgcctcgttgctttcggccatttcgccctttgccgggccgacgaagcggatgccgtctttctccaggatggcgcggttgcggcgcgtggcgggatgccgccacatgcgcgggttcatcgcgggggcgatgagcaccggcttgtcggtggccatcagcaccgtcgaggcgagatcgttggcaaggccatgcgccatcttcgccatgagatcggccgtcgccggcgcgaccacgagaagatcggcctcccgcgacagccggatatggccgacgtcgtgctcgtcctgccggtcgaaaagctcggtgaagacgtggtcggccgacagggcgccgaccgcaagcggcgtgacgaattcctgcgcagcgctggtcatcgcgcagcgtaccgcggcgccgcgctcgcgcaggcggcggatcagatcgaggcatttgtaggccgcgatgccgccgccgatgatgagaaggatgcgtttgccggagagtgtcatgcccttgtctaagcttcccacggattgatgatctctacgccgcaatcctcgaaatccgagacattgcgcgtcgcgatggtcagcgagcgcgtctgcgcgatcgcggcgatctgggcatcgagttcgcgtaccacgcggccgatgcggtgccgatgcgcggaaatcctggcataggccgaggcgtcatgcgcgtcgaaactctggatcgggttgacgatcttttccgtcagaaagcgctcgatgacattcgccagttccagctttctcctaccatccgggagtatggccatgccgtaaagcaattcagccgtcgtgatggacgaaacgaacagatcttcgatcggcacggacgacagccacttcgctaccttcggctccgggtgtggtctgaacgtttcagagatcacattcgtgtccagcaggatcatgatcaatcgaaagccggagggtcgcgcgttggaagcgcgcgctcgggaatatcgagatcgaacccgccatgcggctcgaccagctcccgtatcgcatcatagagattggtgtgccgccgcttcggcccttcttccgtggcgatcgcctggcgcagaatggtcctgatctcctcctcaagggaaaggccatgcctcgcggcgcgcaggcgcaggctctgcttggtctcatcttccaggttacggatcgtcagcgtagccattcgtgacagcctcctgcaatgactgcaatgtaggcattgctagcattgcagtcaatttcgtgcttacagcagttccacggcaatccagaccagcgcggcggcgatcacccagagggcgaggcggccggagcgtgtgtgccgtgcctcggcccggccgatcgcctcggcggtggcggcgtcgaaccgcaggccgttctcggccatcgcgtcgatctcgcgcgacagccgctcggtgcgggtggcgaggtcgggcgcctgccgtgccagcgagacgagggcgtgaaggccgtcgcgcgcgtcgtcgatcacggcgcgcgggccgagattggccctaatccagtggccgaccacgggctccgacgccttccacatgttgaaggccgggtcgagcgtgcgcgccacgccttcgaccaccaccatggtcttctggaggagcaccagttcgggccgcgtctccatgtcgaagagttcggtcacctcgaagagcagggtcaaaagccgcgccatcgagatcgtctcggccggctgcccgtggatcggctcgccgatcgcccggatcgcctgagcgaaggcgttgacgtcatggctgcgcggcacatagccggcttcgaaatgcacttcggcgacgcgctgatagtcgcgcgtgatgaagccgtagaggatttccgcgaggaagcgccgctccttcttgccgagccggccggcgatgccgaggtcgacggcggcgatcatgccgtccgcttccacgaagatattgccgggatgcatgtcggcatgaaagaaaccgtcccgcagcgtatgccgcaggaaggactggatcaggacgacggcgagatgctcgaggtcgtggccggcggcgcgcaggccgtcgacgtcgttgagcttgatgccgtcgatccactccatggtgacgacgtcgcggccggtgcgttcccaatccacccacggcacgcggaaaccgggatcctccctggtgttctcgccgagttcggaaagggccgccgcctcgagccgcagatccatctcgatcctggtggtctgcgccagcgtgcgcgccacctcgaccggcttcagccggcgcgtggcgggcatatggcgctcctgcaggcgggccgcgaggaagaagccttcgagatcgttggcgaagcgccgcctgacgccggggcggatcaccttgacggccaccttggtcggcacgccgtcgcggaggatttcgccgggatgcacctgcgcgatcgacgcggccgcgatcggctcttcgagccgctggaacaattcgccgatcgggcggccgagcgattcctctatctcctggaccgcttcctttctcggaaaggtcgccatgcggtcctgcaggctggcgagatcgaacgcgatgtcggcgccgaccacgtcgggcctggtcgccaggaactggccgagcttgacataggaaggccccagccggtcgatcgcctgcgccaggttctggctgcgctcgcggccgcgcgccttgcgccgctccagaagccgtgtcagctgccaggcgagccgcggcgtgcccaagagctggtcgcccggaagcgcggcgaacacgccttcgcgggtcatgatccagccggcccgcgccagccggaaatatgcggcaagtgtgctcatgcggcggaagctctcaaagcttccagccggaatgcaacgcggcgatgccgcccgaatagttgcgccaggtgacccggtcgaagccggtgctgcggatcatcgccgcgaaattctcctgattggggaatttgcggatcgattcgaccaggtagcgatagggctcgccgtcgccggcgaccatctggccgatgcgcgggatggcgttgaacgaccaggcttcgtagaccttgtcgaggaacggcatctcgacgtcggagaattcgaggcagagaaagcgcccgcccggcttcagcacgcggtaggcctcgcaaagcgcggtttcgatgcggggcacgttgcggatgccgaaggcgatcgtataggcgtcgaaggtggcgtcctcgaagggcagttcctccgcattcgcctcgacgaaggtgacgtgatcgccgaggccgcgcttggcggcgcggtcatgcccgacctggagcatcgagccgttgatgtcgagcaccgtcgcgtggccgagccttcccgacgcctcgaccatgcggaaggcgatgtcgccggtgccgccggcgacgtcgagcacctgccagctcgaacgcttcggcggattgagccaggcgatcatcgcatccttccagacgcggtgcaggcccgccgacatcaggtcgttcatcaggtcgtagcgcccggccaccttgtggaagacctcgttgacgaggccctgcttctcgccggctccgacattgcggaaaccatatgcggtttccatgccgcccgcggcggtggtgcgctcctgcgacatctcttcacccgctttcgagccgtatccgaccaaccggaatcgctacgtcactctatatgttgttcacatgccggatatcaaagccgcttcccgcgcttctgtgcccgacgctataaattcggcgcgaccatagccgatcatcggccgtgaagctattgtcgaagccgcgatgaagggacgcggatggagtggggttaatttcatgattttgaaagcggaactgcactgccacatcgaaggcgccgcgtcgcccgagctggtcgcggcacaggcgatgaaatacggcagggatgtcgaaccgttcatcaggaacggctccttcgtctggcacgatttcacgactttcctggcggcttatgatttcgccgccgacctgttccgcacggaagaggactatgcgctgctcgccgagcactacctgaccggccttgcccgcgacggcgccatctactgcgagttcttcacctcgcccgaccatgcggtgaaggcgggcctgtcgcccgaagcctataccggcgcgctcggcgaggggattgcgcgggcaagggcgaagacgggcatggaaggccgcatgatcgtcaccggcgtacgtcatttcggaaccgaatcgatcgaggaggcggcgcgcttcgccgcctcgtgccggcatcctctcgtcaccggcttcggcgtcgccggcgacgagcgctccggttccatgaaggactatgtccgcgccttcgagatagcgcgggaagccggcctcggcatcaccgtgcatgccggcgagttcggcggctgggagagcgtgcgcgacgcactcgaccatgttcggccctcgcgcatcggccatggcgtgcgcgcgatcgagaatccggacctcgtcaggcgcatcgcggacgagggcgtcgttctcgaaatctgcccggtttccaatatcgagctgaaggtgttttcgagctacgccgaccatccctttccgcgcttgcgggcggcgggctgcaaggtgacgctcaactccgacgatcctccctatttctggacgacgctgcagcgggaatacgaggttgccgccgagcacttcgcgatgggggaggccgagctcgtcgccgtcacccgcaccgccatcgaggcggctttcgtggacgaggcgacgcgcggcgcgctgctttcccggcttgatcggccgcccgaagcggaaagcgggccgggatagcgaacgcggacaaaaattgtggctcggggcgtgcacaaactatctcgcatgccgccatgccgctaagatcgaaggcaaaatagagatttccggagataggaacatgggcgtaaccgtcgtcgaccacccgcttgtccagcacaagctcaccatcatgcgcgacaaggaaacgtcgacggcgggctttcgccggctcctgcgcgagatatcgctgctgctctgctacgaggtcacccgcgacctcgagctgacgacgaagaccatcgagacgccgatgcagacgatggaggcgccgacgctggagggcaagaagctggtcttcgcctccgtgctccgcgccggcaacggcctgctcgacggcatgctcgacctggtgccggccgcccgcgtcgcccatatcggcctctaccgcgaccatgagacgttgcaggcggtggaatatttcttcaaggcgccgagcgatctcggcgaccgcctggtgatcgtcgtcgacccgatgctcgccaccgccaattcggcgatcgcggccatcgacaagctcaaggagcgcggcgccaccaatatccgcttcctctgcctgctggcggcgcccgaggggatcgagcgcttcaccacggcgcatcccgacgtcgacgtcttcaccgcctcgattgacgagcggctgaacgagaagggctatatcgttcccggcctgggcgacgcgggcgaccgcatgtacggcaccaaatagccgatggctgccgcccgaccgatcaacaccgccgccatcgagaagggcacgggaaagacctggcaggcctggctggtctttctggaggaaatcggggcggcggagctctctcacacggagatcgcgcgtcgtgtcggcgacaccggcgaggcatcgggctggtgggcgcagtcgatcaccgtcgcctatgaacagcatatcggccgccgcctgcccggccaggacggcgacgggtcgtttcagctttcggtgacgaagacgctgcctggaaccatggacgaggcgatggcggcgtggcaagcgctcgccggacgccgcaccgacttctcgggcgtcgcgatcgccagcggtccgcggatgagcgcgacggagaaatggcgccgttggggcgccacgctcgaagaccgcagccgcgtcatcgcctcggtcaaccagaagacgccggacaaggcgggattcgccgtcacgcatcaaaagctcgcctccgccgaagcggcggaggtctggcgcgccttctggaaggactttctcaaggcgttttgatcggagtgcggtcggcaccagcccgggatgtgcagccgatccgacccaagtcctgcaagcaggcgttgctcaagcaaaaagcccccgccatggcgagggccttatttggtgctgtcgaagcttgttaacagccagaccgcctcttctgaactgctagatatagcaatctccaagtacaacaaatacggtccggatgcaactatatcgggggcccacataggctaactcgggactcacatatgtgacgccctataaaaaaattacatcaagtcagaaggtgaggctcctaactctattgcaatcatgccacgctaatccgagttcgttttttctgtatgtcagcgctttggattgggctaaccagaaggcacaattgcaattgcgaatcatgatacattcgataatggttgttgtaaatatatactataataatttccatatatcgggggaacacatccatatatatgcagaaattattgcgtcgacataatgggtaagaatcgagtacgatagaaataaaagagattttaaatgaggaagcgatgggaaagggagatatactgttctcattcgacatcggtaccaacagcatcggctggtgcgtgttcgccctgtcggacaatggcgatccttgccggattctggatgccaacgcgcgcatcttcgccgacggccgcgagccgaaatccggaaactcgcttgccgaaggccggcgcgcggcgcgtgccatggcgcgccggcgcgaccgctacaagcgccggcgcaaggcggttctgcgcaccctgacggaatacggcctgatgccggccgatccgaaggcacggcaggcgctcgtcgccaagaccggcgatcgcggtccgaagtcggaggaggcgctcgccgacgtctacagcctgcgcgcccgcgcgctgatggaaaagctgccgcttcatcatatcggccgcgcgctgtttcacctgaaccagcgtcgcggcttcaagtccaaccgcaagaccgaccggaagtcgaacgaaaaaggcgctatcgaaaccggcgtcaaccggctgctcgaggagatgagggataccggcgccccgacgctgggcgcctatctggcgaagcggcgttccgacggcaggccggtgcgcgtgcgtgcgggggcgtccgagcaggaggccgaggacggcaagcccgcgaagacggcctatgacttctatcccgtgcggcggcttctcgaggaggagttcgatgcgatctgggagaagcagtactcctatcacccggaagttttgacggaggaacgccgcgggcatctctttcgcgtcatgtttcatcagcggccgctgaagccggcgatcgtcggcagatgcagcttcaattccgccgagacgcggctcgccaaggcgcatccgctgttccaggaattccgcctctacaaggaggtgaacgagctggaagtggtgatgcccgaccagagccaccgcaagctgacgcttcccgagcgcgaccggctcgtcctcaagctgcgcggccagcgcaaggcgacctatgccgcgctgcgcaaggagctcaggctgcgcgacctgcgcttcaacaaggaaaccgagaatcgcaccgacatgatgggcgacgaggtgacggccgcgctggccgacaaggcggttttcggcaaccgctggtccggcttctcgacggacgagaaatggcggatcgtcgagcgcctgcgcgaggaggaggatccgttcgcgctgcatgaatggctcgtctcggaacatggtctttccgatgcggaggccgagcaggcggcgaaggtccatctgccggacggctacggcaggctggggccgacggcggtttcgaccatgctggaggaattgaaggccgatgtgatcaccgaggccgacgcggcgaggctggccggttacgaccattcgctggcgcgggcggacgaggacgggctcgatcgcctgccgaaatatcaggaagtcctcgaacggcgcatcccgcccggcaccaacgatccggacgatccctacgacatcgcgaagggacgcatcaccaacccgacggtccatatcgcgctgaaccagttccgccatgtcgtcaacgcgctcgcgcgccgcttcggcaagccggaccagatcgccatcgagctcgcgcgggaattgaagctcaacgacaggcagaaggacgaggtgaaccgcgtcatcggccgcaacacgcgcgccgccgccctgcgctcgcagaagctgcgcgacatcggccagaaggacaatggctacaatcgcgcgctgctgaagctatgggaggagctcaacccggacaagcccgaagaccgggtctgcgtctataccggcaggccgatttgcatctccatgctgttttccggcgaagtcgacgtcgaccacatcctgccctggtcgcgaacgatggacgacagccaggccaaccgcatcctgtgcgtcgtcgaggccaatcgcgtaaaggccaaccgcgcgccggccgaagttgccgaatggggcggacgctacgacgagatactggaacgcgccgcgcggctgccgcgcaacaagcgctggcgcttcgcgcgtgacgcgatggagaaatacaaggagaacgaaggctttctcgcccgccagctcaccgacacgcaatatctttcgcggcttgcccgcgaatatgccgaggcgctttatccgacggaggaacccgaccgtctcggggagcttcgccggagaaaccatgtccgcgtcattcccggccggctgacggagatgctgcgccgcggatggggcttgaacgcgctcctgcccgaccacaatttcggcgccgggcaggccaagaaccgcaaggaccatcgccaccacgcgatcgacgcggcggtggtgggcgtgaccacgcgcggcctgctgcagcggatctcgaccgaggcgggcctgcgcgaaaagctcgccctggaggagacgatcgccgacatcccgatgccctggccgggctttcgcgaggaactgaaagccgccatcgaccgcgccgtcgtcagccacaagccggaccacggaacgttgcccaagccgggtgagcacggccgcaccgccggccagctccacaacgacaccgcctatgggataaccggcgagacggacgcgcgtggcaacccgatcgtggtgcgccgcaaacccttcctgtcgctcaccgacaaggacattccctcgatcagggataccgagcttcgcggccgcgtctattcggcgaccagcgggctttccggccgcgagctttcggcggcgctcgattatttccgcaagacggacaagcagttccgtggcatccgccatgtccgggtcacggagagcctgtcggtgatccccatccgcgaccgcgacggcaatatctacaagggctacaagggcgacgccaatttccgttacgacgtctgggaactgccggacggcaaatggaaggcggacgtggtcacaatgttcgacgcgcaccggcccgaccgggcggccgaggagcgcaggccgcatccggcggcacgcaaggtgctcagcctgaagcagaacgacatggtcgcctgcgagcatccgaaggacggctacacgatcggtcgcgtcgtcaagttcaacaccgccggccagatctattttgccgcccataacgagggaggaagcctcaaggcgcgggacgccgatcgcgccgatcccttcaagtatttctcgaaatcggcgagcggcttgaaggagatagccgcgcggcaggtcaggatcgacgccaccggtcaggtcctcgatcccggcccacaggaccgggaaagccgcctggcccgcaacaagcgtttggagcgggagcgggcgtagctacacaattttaagaagtatagctactatattcgaccatggagcgggtggttgatatagaaacggaaggtctttttcttgccgttcatcgcggttttcttaccgtgagcgcgggaggagaggaaaaagggcgggtcgcgctcgacgatatcggcgcgctgatcgtgcatgcgcacggcacggcatggtcgaactcggtgatggtgcgcctttccgagcgcgccgtcccgatcgtggtgtgcggcagcaaccatgcgcctgtcgcctgtgtctggccgatcgaagggcattatgcccaggccgcccgcatgcgcgcgcagcttgccgcgggccggccgctcggcaagcagatatggcggcgtatcgtttccgccaaggtgcgcatgcaggggacgattttcgccgcgcgcggcggcgaggcgggcgcattcgatctgctcgcacgcaaggtgcgctcgggcgatccggacaatatcgaggcgcaggcggcgcggcggtattggagggcgctgttcggcgcggatttttcacgggaccgctcggccggcggcgccaatgcgcttctcaattacggctacacggtcctgcgcgcggtggtatcgcgcagcgtctgcgcgacgggactgcatccgacgatcggcatcttccattccaaccgcaataacgccttcgcgctttccgacgatctgatggagccgtatcggcctcttgtcgaccagatggttctggaactgctcgacgaggggcatgtcgaagtcaccggcgacgtcaaacgccgccttgcgacgctcaccacgctcgacctgcaaaatccggacggcaccgtttcgccgctgtccgtgcaagtgcagcgcttcgttcattcggtcgcgacatgtttcgaaaccggccggatcgaccttgcgcttccggggtcgcctcttcgcgcggaagcggcagtaagcgagcctggatgacgcggcgggaggacaagggcaatctcggcctggcgcatctgagcgggtatcagttgatgtggattcttgtcaccttcgacctgccggtcgaaacgaggaagcagagagccgcggcgaccaagttccgcctgttcctgcttgatcaaggcttcgagatgagccagttttccaactatctgcgcttctgcaacggcaaggagcagttcgaggcatatgcgcggaaaatcgaggccaacctgcctcaatggggcgacatctacatcttccagttcacggaccggcaatatgaaaacatcgtccgcttttccgaccagcgccggcgccgaagccgaaaaaatcccgagcagatggcgcttttctgaggcgcggaaccgtttttcccacatcgagcccgccgattttctgtttgttttcaggaagatcggcgggcatcgagcttagcagctcagaagaagcggtccagcggcaactgccaagatcggcgggagaaccgtggtctgagcttagcagctcagaagaagcggtccagcggcaacgatctcgtcagcgttgagtacatcgcggcgagcttagcagctcagaagaagcggtccagcggcaacgtttgctgacccgcaccatcaaacaggattagcttagcagctcagaagaagcggtccagcggcaacaactggccgagctatgtcagcgacagcgcgagcttagcagctcagaagaagcggtccagcggcaacccagactggccaacatgggagccatggccgagcttagcagttcagaagaagcggtccagcggcaacgacgtcatcatgatcggcgaaatctagtccagtccagcgcttcgcaaaagacggtcaattcaccgcgccctggcgcgccagcgcaggagccgctgctcggtccagtcgatcgccacggagctcaggaagccgagcgcgccgagcaggatcacgccggcatagaggtcgggcgcgcggaaggagcgggcggaaagcaggatccagttgccgagcccgtcgcgaccggcaagcatctcgcagacgaccgcgaggatgagcgccacggtcaggccgaggcgcatgccggcgaggatgtcggggctcgccgagggcagcgagagcttcatgatcgtctgccggcgtgtcaggccgagcgccgccccgacctcgtagagcctgggctcgacggccgagaagccgtgaatggtggcgagcagtaccggccacagcgcgccgaaggcgatgacgaagagcaccatcgcgtccgacaggccgagcagcgcgatggccacggggatgatggcggaggccggcagtggccgcaggaattccagcatcggcgccacataagcgcgcatgcgcggcgatatgccgatcgccgcgccgagcgcgatgcccgcgagcgaggcgatcagccagccccagatcatgcgctccaccgtggcgacgagcttggttgcgagatcgccttcggtcatgccggcgaccagtgcgttccaggcgcggtcggggccgggcaggaaaaccggcgatacgagcttgaggtcggcgatccattgccacaagagcacgaagccggcggcgactgcgaagctggcgatgcgccaggggaggttgcctcggaaggtcattgccgcgcctccgccccgcccgcgcgcccgaacatgccgtgttgcgcgccgaccagggcccagttgagcgcgtagccgacgatgccgatccagacgaggtaggcgagcatgcgcgccgggtccagcgcctgttgggcgatcaggataccgtagccgaggccgagcgggttggcggcgatctcgacggtgacggcgacgaccagcgcgatgccggccgcgagccggaaggccaccatgatgcgcgggaaggcagccggcaggatgatcttgaagacacgctgcatggcggaaagacgcaacgcgcgggcgacctcgaagagccgcggctcgatgccggcgatcgcggcgcgcgtcaggatcagcatcgggaaagcgcaggcaaaggccacgatggcgatgcccatgcgatagccgaagccgagcgccagcatggcgatgggaatgagcgcgaccgacggcacggggcggatcgcctctatcgtcacctccatcagccggttgagcggcggcaccagaccgaagaggatgccgaaggcaagcccgaccgccgtgccgatcgccagcccggcgaaagcgaccgtcagcgtgtcgcgggtggcgacgagcagcgagccgtcgccgatcgccgagaggagcgacaggaagacgtcgctcggcgcggccagcgccatgctctgcgttcccgagagccgcatgccgagttcggcggcaaccagcagcagcagcggaagcaggaggccgcgggcgcgcatcctcacgcctcggccttttcgatgaagtcgaagagcgagcggcgcagcgcaaggaattccggcatctcgcgggtcgagagctggtcgcgcgggcgcggcaggccgatctcggtcatcgtgccgatgcggccgggatcgggcaggagtcccaccacgcggtcgccgagatagatcgcctcctcgaggtcgtgggtgacgaagaacacggtggcgcgcgtgtcggcggcgatcgacagcagctcgtcctgcagcgtctggcgcgtcatcgcgtcgagcgcgccgaagggctcgtccatcaggaggaccttcgggtcctgcgccaggcagcgggcgatctgcagccgctgctgcatgccgccggacatctcggccggatatttgtcgccctggccgggcaggcccaccttctccagaagatgctcgatgcggtccccgcgctcggccttggccacgcccgccgcctccagcgccagcgagatgttgccgtgcgcggtgcgccagggcagcagcgccttgccgtaatcctgaaagacgatcgccacgtcgcgcctcggcttcagcatcgcctcgccgagcacgccgacgctgccgccggtcgggttgacgaggccgcccgccatgcgcagcgccgtcgtcttgccgcagccggaagggccgatgatgcagacgaactcgccttcgcggaccgtgaggtcgagcttgtcgatgatcttcctgtcgccgaaggagaggtcgacccggctgaactcgatcacgggtcgggcggctgcctgcttgtcggtttttctcatatcgtcctgtccgctccctcgtcgccatagacgacgtggagtgtgtgcccgagatgcttcatcagcatcgccaccgcttcgtccgccttgcgggcgaggatgatgtcggccagttgctgatgctcgtcgatgaaccagtcggcgttctcgaaacggcgcatcatcgcgcgtcgatagcgataggcctggtcgtagagctcgtcctgcagccgcaacagccgctccgactggcaggcggtcaggatcgagcggtggaactccttgtggagccggtcgaattccggcgcgtcctcgcgcatcgatcgcgggtcgcgctccaccatgcggcgcagccggtgaaggcaggcgagcacgccggcctcccattcgtcgtcgccggttgcgatggaccgccgcagcgcctccgcctcgacgatgcagcgcacgcgggtgatgtcctccagatcgtcgcgcgagaccggggcgacgcgaaacccgcgctggcccacggcctggatcagcccgcgcgagaccaggcgcgagaggccctcgcgcagcggcgtggcgccgatgccgtagtgagcagaaagcgcgtggatgccgagccgtgcgccggggagccagacgcccgcgagaatgtcgcgctcgaccgaggccgccgcacgctcgctgagcgtgtcgccgccttgtgccgtcgttccgttccgcgggcccgtcttcatatttcgtcggcttacttctgcaccagcgcgtcgacgtccggctcgttctgcagcatgttctgctggttcatcacgtcggcccaccaggcgagctgttcggaggtgatgaccggatcggagaccgacagcttcatgttggcgagcacttccggcggaatcttggtgaagcgcgagatcgcgccgcgcgccttgtccggatcggcattgacgatcttggccgcctcgtcgatcgaggcgcggaaggcggcgagcgcctcggggttggaatcggcccattcgcgcgtcgaggcatagaggatctgcggctgatgctcgggcaaatcctccagatagtgcgacatcaccttgccggtgcccgccgaaaggatgcgcgacaggaacggctcggccgccaccaccgcgtcgactgcgcccgactgcagcacgtcgctcatcgtcgggaaggtcacttccacgaactgcaccgatttcgggtcgacgtcgttctcgatcagccattgctggaagagcacgtgcaggaaggcgccgatgccgggcgcgccgaccttcttgccggccaggtccttggccgacgaaatttccacgccagcacgcgtgacgatcgccacggtgtcggcggtttccttggccgtcgaggaggcgccggcgaccgccacgaggtcgaggccgccgtccgtcgcctgcaggaagaccgagggggtcgggccgccgatctggagcgaattcgacaggatgcccgccgggatgttggagttcagcccgatcaggatcagctcggcgtcgagcccgttcttctcgaagatgccttcctccaccgcgatcgccgccgaggcgcaatcggtggtggcggtgcagccgatgacgactttttcctgcgcggacgcgatcgacgtcatgcccatcagcacggcaaggaccgtgccgagccgcgaggctccattcccaagcttcatgatttcctcccttacaaacggctttccaatcgtgccgctttgatatatcgatagaaacatgaaatatatatattcgcaagagggaggaatacgtgaagcttgcgacttatgaaaacggacccggaaacgcttccgtcgccatcgtccattccggaaacgcgaaactgttcgacctgcggcttgccgccgagcgcgccggccgcgacgcgtcggccttcgcctcgatgatttcgctgatggacgcgggcaaggcggggctggacgccgcccatgaccttttcgaccgccatggcggcggcggcgatctcagcgtggacgtttcttccgttcggctgctcgccccggtgccggaaccgcgccagatgcgcgacggcatgagcttcccgctgcatatccgccaatcgccgcgcggcatgcgcaagctgctcgcggccggtgatccggcggcgctcgccgccatcgaggcggagccgctcgcggacctgccggaggtctaccgcaagcttccgatctactacatcaccaaccgcatgatcgtcgccgggcccgaggacacggtgcgctggccggcctactccaaggtgatggactacgagctggagatcggcgtgttcgtcggcaggacgggaaccaatattcccgcttccaaagcggccgagcatatcttcggctacacgatcttcaacgatctttccgcccgcgaccagcaggcgatggagatgcccggctggctcggacccgcgaagggcaagagcttcaacggcggcaacgtgctcgggccgtggatcgtcacgccggacgagatcggcgatccctacgcgctcgccatggaggcgcgcatcaatggcgagacggtcgccaggggacgctcggaaggcatgctgttcagcttcgaggaactgatcgcgcatatgtcgcgcgacgagacggtctttgccggcgagttcatcgggtccggcacggtcggcaatggctgcggactcgaaaacggccatttcctcagccatggcgacacgatcgagctggaaatcgagaagatcggcaccttgcgcaacaagatcgtccgccaggacgcctgagcggccgtcccgatcgcctgctatcctggcctcccgccggagcgggaggccccatcgcatcaaagcgtcatagggaggaaaccatgacacgcatcatcgacctgtcggtgccgatcgccaacgacattccggccgatccgccgatccagattccgtcgatcgagtatatcgaccacaagcagagcctgccgcaattgctgcccttctttccgggactgaagccggaagacctgcctgacggtgagggctgggcggtcgagcgtgtcgtgctctccacccacaatggcacgcatctcgacgcgccatggcactatcattcgacgatgaatcgcggcgagcgcgccatgaccatcgacgagatcccgctcgaatggtgcttccagccgggcgtgaaactcgacttccgccattttcccgatggctatgtcgcgaccgccggggatgtcgaggaagaactgaagcgtatcggccacgagctgcagccgctggagatcgtcgtcgtcaacacgtccgcgggcgccaagttcggccaggccgactatgtcgcgagcggctgcggcatgggctacgaggccaccatgtatctgctcgaccgcggcgtgcgcgtcaccggcaccgatggctggagctgggatgcccccttcgttcataccgccgggcgttaccagcgcgaaggcgatccctccatcatctgggagggtcacaaggcgggccggcataccggctattgccacatcgagaagctgcatcgattggaggaccttcccgccaacggtttcaaggtgagctgcttcccggtgaagatcgaacgcgcctcggccggctggacgcgcgccgtcgccatcctcgactgagagccgatgccgctggatcacttgccgtttcgccgcgcgtgatcctgcgccgcgccgccggcttctcgcaatccggcgcggcgctctcctccaccatcgccgacatctcccgcaacccggcgaagctcgattcgagcttcgccggagcggaatcgccgttctgaatccttgttgacactatggaatgaatattccatattttttcatcaatggcgttcatgttctatcttgaggccgaagagccgtcgggaagggaacatcggaaatcccatagggagggaatccggaaaatcggggtgccgccggacacccgcaatgtggaggagcattcagatgaggaagctattgttcggcgtcgctctgtcggcgctgatgaccacttcggcgatggctgagaccatcggcgtttccatggcgttgttcgacgacaatttcctgaccgtgctgcgcaacggcatggtcgaatatgccggcgagctcgacgatgtcgagctgcaggtggaggacgcgcagaacgatgtcggccgccagctcaaccagatccagaacttcatcgcgtccggtgtcgatgcgatcgtcgtcaatcccgtcgacaccgacgccaccgtcgccatgaccaaggcggccgccgatgccggggtgccgctggtcttcgtcaaccgcgagccggtcaatgtcgacgacctgccggaaaaccaggcctatgtcgcctccaacgagcaggaatccggcacgctcgagacgcaggaaatctgccgcctcctgaaggagaagggcaagggcgaaagcgccaagatcgtcgtcatgatgggcgaattgtccaatcaggccgcgcgcatgcgcaccaaggacatccacgacgtcatcgccaccgaggaatgttccttcatggagatcgtggaggagcagaccgccaactggcagcgcacgcaggccgccgacctgatgaccaactggctctcggccggcctggaattcgatgcgctcgtctccaacaatgacgagatggcgatcggcgcgatccaggcgatgaaagccgccggcaagaacatggacgaggtgctggtcggcggcgtcgacgccacgcaggacgcgcttgccgcgatggccgcgggtgatctcgacgtcaccgtcttccaggatgcggcggggcagggcaagggcgccgtcgacgcggcgctgaagctcgcgcgcggggaggaggtggacaagaaggtctacattcccttccaactcgtgacgccggagaacatggacgagttcaccgccaagaactgaggaccgcggacggccggaggagtatagtgggggaagcccggggcttccctctccggcacggctgcgcatcgagtcgtccgccccgccttcgggcgacggcaatgatggaaaagaacgatggctaaccaggcagaggcggtctcgaccgccgcggagtccgaacaggtcaaacggccgcgctcccacgagctgaacgcgctcgtggggctggtgggcatagcgatcatcttcgaattgctgggctggtggcttcaggggcagagcttcctgttcaacacgcaacggctcggcatcatgatcctccaggtctcggtgatcggcatcatcgccatcggcgtgacgcaggtcatcatcaccggcggcatagacctttcctcgggctccgtcgtcggcgccaccgcgatgatcgcgatgagtttcgcccaggtgagcacctatccgcgcgcggtctatccggagctgaccgacctgccgttgatcgtgccggtattgatcgggctcggctgcgggctgatcgccggcctcgtcaacggcctgctcatcgcctacaccaagataccgcccttcatcgccacgctcggcatgatggtcacggcgcgcggcattgccaaatggtacacgaggggccagccgatctcattcccgaccgacggtttcgccgccatcggccagggcatgacaccggtcatcatcttcctgctgatcgcgctgatcttccacgtggcgctgaaatacacagtctacggcaagcacacatacgcgatcggctccaacgagcaggcggcccgcatgtcgggcatcaacgtcgagcgccatctcgtgctcgtctatgcgatcgccggcatgctcgctgcgctggccggcatcgtggtcgccgcgcgcggcctgacggcgcaggccggcatgggcaccatgtacgagctccacgccatcgccatggccgtcatcggcggcgtgtcgctcaccggcggtcgcggctcgatcgtcggcacgctgatcggcgcgg

SEQ ID NO: 3018 - DNA, 23294 bp, synthetic construct
  source 1..23294: mol_type = other DNA
  misc_feature 1..23294: note = Synthetic
catggtggcgctgatcgtgatggtgtcgagaaccgtcaccttctcgccggccttggcgtcctgctgctcctgctttttcagaaccggcgcgtcggccgcctgctgcgcgcgggccaggccgggattgaacaggcaaaggacagtaagggctgagccagccgcaagcaggttgcggggcagcggggagccggccattcgaagttctccagaaaacagggacggctggctgtgaatggctggcttgtgtcggtgagctataacgctcgataaaaatcttgatttataaagtcaagttatatcctcttaggccagatcgagaatcgcagcggtgatgctgcgacgctgcgcgacgccaggatgggacattgatgccaatgatacgagatagaacccgagacgctttttcagcgcggtcccagcaggtgatggtgctcttcgtcttgcaggccttggcgcttctgctcgtggtcgcagccgctcatgccgagcccgcttacaggcgcatcgtctcgctcgggccggatgtcacggagattgccatggcgctgggcgccgccgaccgcattgtcgccgtcgaccgctccagccgctaccccgaggcggctgcggccaagccgaatgtcggctaccgccgtgcgctttccgccgaagggatcatcgcgctcaatcccgacctgatcctggctgccgaggatatcggcccacccgaggccgtcgacatcctgaaagggctgtccgtgcccatgctgttcgtgcccgaaggcaattcgggcgaggggatcgtgcgcaagatcgaggtcatcgccaggattttgggcgaagaggaaaagggcgaacaccttgccgctaccgtgctcgccgatttccgggaggcagccgaactgggcgcctccattccgcaagccgaacgccgcaaggtcgtgttctttcacggtctcgcacggctgacgggcgcgggttcggacacctccgccgacgccatcatccgctatgccggaggcaccaatcctctcgccgaatactcgggctacaaggcggtgtcggaggaaaagctgctcgaagtcggaccggatgtggttttgatgatgccggatgccgcgggcgggcccaagcccgacgacgtctttgccattccggcgctggcgacgacgcctgcgggcaagaataaagcgctggtggtgcttcaagggccgtacatgctcggcttcgggccccggaccgccgaggcaatccgcgatctcgcccgcgcgctctatcccgagcgtttgcagacgcaaggcaattgagggaggcggttgctcggcagcgcgcccgcccccggtccaaggctcaggccttttcggcggcctgcgcctgcgcggcagccatatccatccacatgacctcccaatggtggccgtcgagatcgtcgaagctgcggccgtacatgaaaccgtaatcctgcttcggcccgacatccggcttgccgccggccttttcggctttctccgtcatcgcgtcgacgtcgtcgcgggaatcggcggacacgcagatcaacacctcgctggtggcgtgggcgtcggcgatgggcttctgcgtgaactggctgtatttcggatgggtcagcagcatgacatggatggtctccgagaaaaccatgcaggccgccgtctcatcggtgaactgcggattcaacgtcgcgccgatggcttcgtagaaggcgatggatttgggcaggtcggcgacgggcaggttgacgaagataagcttggacatggcatcctcctctcgatttcgatttgacgatcatgccggcttaagttataaaaagcaactatgaagttaaaaaaaataactgaaagagaaaagcagagcccgaagcggctttacgaagacgcttgcgccaccgcgcatgcgctcgatttgctgggcgaacgatgggctattctggtcatccgcgaactcatgctggggccgaagcgcttcggcgacctgcgcgcggatttgcccggcatcagcgccaacgtactgacgcagcggctcgaagggctggaagcgagcggcgtggtcaagcgacgcaagctgccgccgccggccaacatccaggtctatgaactgaccgagtggggctatgaatccgagcccatcttccaggccatggggcgctgggctgcgcggtcgccgctgcacgatccgacactgccgttcggaacggtctcgctggtgctgtcgatgcggacgatgttcgatcccttgcgcgccgatggcctggacctgactgtgggcctcaagctcccgaatgacgggttcgtggttcgggtaatggatggctcgattcacgtggaacgcggcgacccggctgaggctaaggccgtgctcaccggaaatgcgcaaatcctggccgctgccttctatggcggcgttccgctcgcggacctcgaagcgggcggtgcgctgaagctggacggcgacagggaagctgccgaacggctggtttcgctgttccccctgccgtcgaaggctcccacggcagaataagccatctccggtcaggtcccttgcgcgtagctctctatcgcgcgagcgaaattcggcgcgccgttacggcgttcggccttgatgaagccggagaacgaattccagaatgactgcgcgtagtccttgaaataggtgtcggccacctccttcgaacaaaggtcgccggacacgcaggtcgagacccggttgaggaaatagacgatccggtcgaactggtcgcggaagtcggtcaggggcatcgcgccgccctgttcggtcatcgcctgcgaaccgatgcgctggaaatagacgagttgttccgccggcgtcgcgcccgcgggaaggaattgccggttggccgcgtcgagcgcatccagccgctgccgcactgccttctgcgcctgctggtagtcgggctgctcccacagcgtcaccagatccagcgtccgctcgacgcgcttctcgtcgcgcccgttgagaaactggtagacggtgaaagccgcgccgaagatcagcaccaggcgcagcgccaggccggaccacgcgtaaaccagcatgcgccagtcccggtcggtgaacggattgctttccttcttgatctcctgcgggctttgccacggcaagccttcgccggtttccggcaggaccgtcttgggtttgggcgcaatgccggcgacgggcggggtgaggggcgcggcgtcgctcatcagcagcttcccagggcgatgcgcagcgacgggtcgagcttcagccccggctcctgcagctttttccgcaggcagtcgagctgcgtgcgcgagaccatgaaggtgacgttcggctcatccggcgtggccgtctccgggccgacaggggagacgaggctcttgagcggttcgatcacgccgcgcgcctgttcgcaggcactgagatcgaccacaacggcgtttcccgctcgcttggcaaattcgtcatagctgtcgaggaagcaggaggcgagctccgcattggtgacgatttccttgtcgcagacagcgcaagctccatccgccaacgcctgcgaggataccgcggccagtatggctgcgagcaggaagcggcatgcggaagcaaggactttcatcgcatcaccatagacgttgatgtaaaccgttgtgcgccggagtctggcaccatcccattgtccccaaagcctggcgccgcgcaagcctgtcgtcacgagcgcgggcgggtctcgatcgggaagatcatgaccgcgccgcccgccttggctttgtcgttgagtttggcggccgagcgggtagagggcgcaagcccgatatcgtccagcaaggcgccgaacgaggcctgcgcgacgcctcgcgtcgccggcagcaccccgtcctgttcgaggaatttcaaatcctcgacctcgctcagcggcggggcttcggtcagaactgcgatcatgcgctccatgccgaagctcgattcggtgatctccagaatgccttcctcgaccttggcgcccgcgaccaggcgctgggcgtccatgtggctgatcgaatagtcactgccgacatagaggatgttgatgtcgacgagatcgggcgaggcgttttcggccagcacatggatctggtcgccgggattgaggatcggcaccgacgaagcctgcagcggctccaggtcgtcccgtccgtcgcgcttgatgaggaactgcaccgacacgtcttcaggcttgtagtccgacgccgcggccagtcgcgacagggctgtggcgcggaaaatcttcagcaggttctccgccgtctttttcgccgtctcttcggggttggcggcatcgagcgtcaccgaaggcggcttgctgccgctgtcgagttcgatttcgccggagggcggcagaaaccaaagtgcgggctcggcgcttgcattagcggatgcgccgggaagcgttttctcggcccatacggcgagccgaaggtcggcctccgcgcctgcgtcgaccagcctgatgcgaaagcgctgctggtcgtccctggccagcgtgtcgagcatctggttggcggcattgacctgatcgaccatgccctcgatgggcgatggccgcgccaccgtcagcatgtagtcgacggaaacttccgccagccgcgcatagacatttttgggcaggtcggcgagttttatggcgcgcttgccctcataggtgacgggagccagcttgctggacaggttcctggcggaactcacctcgagatagcccagcgcttcttcgggcttcgatgtcggcgagggcaggattgcgagcttggtgcccttggacaagcggtgcagggagcctgccggcacggttgcggaattgccgtccacggtcaccggccactgcatgacggtatcgagctgttcgctgtcgaaggcacgcgcgtcgagatcgccctcgaacagcggcgtcggccgctcgcgccggtcggcggaatattgctgcagcaccgcatgccccagctgccggtaggtcgcgcccggattttccgcgagcttggagaacagcgtgtaggtgaacagcccgtagcgctcggcctgcggttcgcctttcggcaggggcatttcgggcgtcgtctcgatggtctgggcggcgaagaacgcgaccaggccgccctttgcaaggggcgcagcactggtcggcgaggcggtgccgggcgaaaacgcgcggaccgcagcgtcgccggtcttttcgtcggtcagcgaaaaggccgcctggcgttccgccggcgcttgtgtggctaaggcctcggccttgctcacctcttcggcgggaatgcccaatgtgtcgaaatccagcttccgctcaaccaccacatcgtcgccgatatcggcggcgcgcgtggcactgccggaatggcaggcgtcgatgacgaaccagacgaaggcgcccttgtcgcggatggcgtccagcgccgcgccgatctcgtcatccatcagcgcattgggcacgccctggtcgcggttcgcccatttgccggtatctgcgggcaggaaaatctcgtccagcccgtcggtttcgttgccggcagccgtctccggctgctgtgcgccgtggccggaaaaatgcagatagacgaagtcgtcgcgctgcacggtgtcggccagtgtcttgagttgggccaggatcgcttcatgggtcggcgatcccgccgcgccttcgaggccatcggcgagaacaaccacattgtcggccgagaaaggcaccggcgccgccgtcgtcagatactcccgcacaagccgggcatcgtggttgggaccgatgagcgctgccttgggcggcaggttgggataggccgtgaccgccaccagcaaggcatgattggtccgcgccacggcggcacccgacagagcgcctaaagcggcaaaagacagagccgtcgcagccagaaggccgcgcagatgtttcgcacccatcatgtcagaagtctcccaagccccgatgatcccaagcacgccgattttagacgaacattttggctgtattgcggagttttgtcttcatcgctgtggcgatgtcatggttgtttcgccgagatgccgattatctttgtcggcgccgcgcgctagcaatagtcgcgccgtgtggctatctggagggggatacgttataaagtccgcaccgcaggagcaggcagtcatggtcaccaaagttgcgcttaccaagaaccagaagctggtcctggaaaagctcgaagcggcaaaggcgccggtcagcgcctacaacctgctcgacctcctgcgcgagaacgggtttcgcgccccgctgcaggtctatcgggcgctggacgcgctgatcaaggaaggcttcgtccataggctggaaagcctgaacgccttcgtcgcctgttccgaacagcacgaccacagccagcacacccaccacatgaccgcctttgccatttgcgacacctgcggccaggtcaccgagttctccgacgaatcgatcagccaccggctggatgactggatcggcgccaccggcttcatcgccaagaaggcggtgatcgagttccgcggcacctgtgccagctgcgctgccctggcggcgtagcccgctaagctcagcccctcaatgcgcctcgtcccagttgtcggcggcgcgggcgtcgaccttcagcggcacggagagcgcgacggccggcatggcggcatcctccatcacccttacgatcaccggcatggcggcttccacgtcttccgctgctgcctcgaacaccagttcgtcgtggacctgcaacagcatgcgcacatccggcaggccggcctcgaccagcgcaccctccatgcgcgccatggcgcggcggatgatgtcggccgccgaaccctggatcggcgcattgatcgccgcgcgctcgctgttggcgcggatcgacgggttcgaggccctgatttccggatagtgcgcgcggcggccgaagatggtttcgacatagccggtgtcgcggcagaacgccttggtgcggtccatatagtcgcggatgccgggaaagcgctcgaaatagcgcttgatgtaggcgccagcctcctcgcgcgggatcgacagctggttggccagcccgaaggccgagatgccgtagacgatgccgaagttgattgccttggctctggagcgcacttcgcgcggcataccctccaccggcacgccgaacatctccgacgccgtgatcgcgtggatgtcgtcgccattggcgaacgccgccttgagctgcggaatgtcggcgacatgcgccaggatgcgcagctcgatctggctgtagtcggccgagatcagcttgttgcccggctgggcgatgaacgcggtgcgcaccttgcgcccctcggcggtgcggatcgggatgttctgcagattgggttcgttggacgacagccggccggtcgatgtcgccgccatcgcataggaggtgtggacgcgtttcgtctccggatggatgtagcccggcagcgcgtcggtataggtcgatttcagcttggtcagctggcgccagtcgacgatcttgcgcggcagctcgtagccttccgtcgcgagttcctccagcacttgcgccgtcgtcgaccattgcccggatttcgtctttgtgccgccgggcaggcccatgcgcccgaacaagatgtcgccgagctgctttggcgagccgatggtgaatttttcgccggcaagctggtagacctcatcctcgagtgcggcggcgcgctgcgccagttcgcctgaaagccgcgacagcatctgcctgtcgaccgagacgccgcgttcctccatgcgcgccagaaccggtaccagcggcttctccagccgctcatagacggacatcaagctattggcgacgaggcgcggcttgagcacctgccacagccgcagagcgagatcggcgccttcggtcgaataggtcgtcgcgcgctcgatatcgacgaggtcgaagctgacgacgctcttgcctgagccgacaacatccttgaacgggatgacggcatggccgagccagcgttcggcgagcgcgtcgatgccgtggccgccggttcctgcgtccgccacataggacatcagcatcgtgtcgtcgaagggcgcgatgtcgacgccgagccggtgcatcagcagccagtcgtatttcgtgctttgcccgaccttcagcacggacggatcggacaaaagcggcgccaacaggggaaacgcctcgtcgaaggaaagctggtccggcgcgcgcccgccgccaagcaggtcgactgcgctggaacggtggctgagcggcacataggcggcgcggccgggccgaatcgccagtgagaagccgaccagttcggcctgcatcgggtcgagcgacgtggtttctgtgcggaaggcgacgatcccggcctcccgcgcctccgccagccatgcctgcagcgtggcaagatcgcggatggtggcataggcgctacggtctattttggaagaggcggccgcgtcggcgcgggactgcgcgagcgcggagggtgtgaagccggcctttccctcccccttgaggggagggtcggcgcgcagcgccggggtggggtcgctgccgtcatcgacgaccccacccgcgcctgcggcgcgacctccccgcgagggggaggtggagtcggcgccagccccgacatccggcccatgggcatcctcgacgcgctgcacggtgatcgtcgccggctcgatctcggaagcctccgtaccggtcgcctcggcgacgcggcgggtcagcgaggtgaattccatcgccttcagatagccgatcagcttcggcccgttggccgggtgcagcaccagatcgtccagcggttcgggaactgcgacatcgttcttcagccgtaccagctcgcgcgaaatccgcgccttgtcggcattggcgatgatggtttcacgccgcttgtcctgcttgatctccgacgccctctccagaagcgtgtcgagatcgccgaacatttccagaagctgggcggcggtcttcggcccgatgcccggaatgccgggaacgttgtcgacggaatcgccggtcagcgcctgcaaatcgaccatcttttcgggcggcacgccccatttctcgatgacctcgggaatgttgatctgccggtccttcatcgggtcgtacatcgacacggtcggcccgacgagctgcatcaggtccttgtcggacgacacgatggtggtgtcggccccggcctcgcaggcgagttttgcataggtggcgatcaggtcgtcggcctcgaacccctccatctcgatgcagggcagttcgaaggcgcgggtggcctggcggatcagcccgaattgcgggatcagatcctccggcggcgcggagcggttggccttgtattcggcatagagctcgttgcggaaggttttcgacgaatagtcgaagatgacagcgaaatgcgtcggcaccacgccgacatcggtgttgcgcgcgtccttcatcagcttccacagcatgttgcagaagcccgacaccgcccccaccggcagcccgtccgacttgcgcgtcagcggcggcaaagcgtgataggcgcggaaaatgtagcccgagccgtcgactagaaagagatgatcgccttttttcatggcgctagccgtaacgccaagcgccaaaactgtccatgtttaaggatgtggaaggtgccatggaatggcaggagatgggcccggcagcaactccacacctacgtcattcccgtgatcgtgctcggcttcgcctcgcttgccatggaatgacgaagcggagagggcttcgctcgaccggcctgtgtgcttcgacaagttgtggaggtaggtccgccgaaaggaaagtcagagccggatgccggaacgaaaaagcccacgccgtagcgtgggccttatctggtgctgttccagcttgttaacggctggatcgcgatttctgaaccattaatctctcactaaataactgagactgcaagaggaaattggttgaagagatatctgaaataaacaaccataaatttcaaagccgattgcgaagaatgaaccggggggatcatgctgacattgggaattgacatcggcagtacgtcgcttggctggtgtttgatcgagacgcaaggcgagccgctggaaaacgactttggcaaaatcgtcgccatcggcatccgcatcttttccgatgggcgcgagccgcagaccaaagcctcgcttgccgtccagcgccgcgcggcccgcgccatgcgccgccgccgcgaccgttatgtggcgcggcgcggcgcgttgctgaaggctctgaccgactatggcctgatgccggcaaacgaggatgcgcgcaaaaagctgctcaaggaaaccggggatggcgagggcggcgatctgtccggcagcatctatgggttgcgctcccgcgcgctcggcgaaaagctgcacccttaccagatcggacgcgttctctttgcgctcgaccagcgccgcggcttcaagtccaaccgcaagaccgacaagggcgacaacgaggcggggaaaatcgccattggggtctcgaggcttcagcagaagatggcggaggcaggagccaaaagctacggcgattttctctacaagcgccgtctggacggtaagtccgtacgcacgcgccttcgaccggaatcgggagaggacgccaagggcgacggctacgatttctatccgtcgcgccaggcgcttgaggatgaatttgatgatgtctgcgccgaacaggccgggcaccatcccgagcttctgacgcaagagcgcataaaacacctgcgcgacatcaccttctaccagcgcccgctgaaaccgccggtcgtcggcaaatgcagctacaaccccgccgaggagcggctggccaaggcgcatccgctgttccaggaattccggctctacaaggagttgaacgaactcgaactgatcgacgagcagcagaagcggcgcaagctgacgctggatgagcgcgacaaactgtacagccaattgaggggcgcaaagaccggtaccttcatcagtttgcgcaagacgctgggtctgggcaaagaaatccgtttcaacaaggaaagcgaaacgcgcgacaagcttttgggcgacgaggtctattcggcgctttccgacaagaagggtttcggtaaccgctggtcgaccttcgggctggagcggcaatggcagatcgtccagaaactgcgcaacaccgaagacgagttcgaactgcatgcctggctgacggccgaatgcggcctgaacgacgatcagaccgaagcggtggccaaggtgcatctgccggagggctatggccgcatcggcgagacggcggcgaaaatgctggtcgatgccttgaagacggaaaccgatgccgagggcaaggtgatcccggaatcggaagcggccaagcgctgcggctacaaccattccgacaagagcgacctgaattttcccgggcacaaggaactgccgcactatcaggaggtgctggaccgccacattccgcccggcaccggcaatcccgacgatgtctatgacgtcttcaagggccgcatcaccaacccgtccgtgcatatcgccctcaaccagctgcgccgcacggtcaacgcgctgatcaagcgccacggcaagccggaccgtatcgccatagagctcggccgcgagctcaagctcagcgacaagcagaaggacgagatcgaccgcaccatccgcaagaacacgcgcgaggcggaggcgcggtcggaggagttgaaagcgctggggcgggccgacaccggctacaaccggctgcggctgaagctctggcaggagctgaacaaggatcagccgctcaaccgcgtctgcatctattccggcgagccgatcacggcggcgatggtgttttcgccggaggtcgatatcgatcacatcctgccctattccaagacgctggacgacagcgaaggcaacaagatcctgtgcaagacgcatgcgaaccggcagaagcgcaaccgcgcccccgccggcgtgtccggctgggcggatcgctacgaagacatcctcgcccgcgccagcaccttgccgcgcaacaagcgctggcgcttcgccgcggatgcgatggagaaattcgccgatcaggaggggttcctggcccggcagctgaccgacacgcaatatatgtcgcgcctgtcgctgacctatctcgcctcgctctacccgaccgaggaagccggcgccgacggcgtgctgcgccggcacagccgcatccgtgcgctgcccggccggatgacggagatgctgcggcgcaaatgggacctcaacgaccttctgcccgatcgcaacatcggcggcagcgacacggtgaaggagaagaaccgcaaagaccaccgccaccatgccgtcgacgccttcgtcattgcctgcaccagccgctcgctgatccagcgcatcgccacggcttcggcgaagctggaggcggagggcgcggaacgcgtgatcgaaaaaatcgccgacccctggcccggttttcgcgagcagctgcgcgaggcgctgcgcaacaccgtggtcagccaccggcccgaccatggcaccgtttcgcgcgaggcctatgcctccggccgcggccagaccgccggcaaactgcacaacgacaccgcctatagcccgaccggcgaggtggacgagaagggcagtccgcgcgtcgtgcgccggcggcagctctccgatttcaaatccgaaaaggatttggccgcgatccgcgacacgcaattgcgcgaggcgctgtgggctgcgacgcgcgggctttccggcaaggaattcgaagcggccttgatcgccttttccagggccgaaacattggacgggcggaaaaacccgttccggaatttgcgccacatccgcgtgctggaaaccgaaaccatcattcccatcaaggacaaggacggcaaggtctataagggctatctcgggggcggaaactaccgcttcgatgtctggcagcttccggacggccgctgggatgccgatgtcatctccatgttcgaggcgcaccagcccggctatgtctcgaagatcaggcaggaccatcacaatccgaaaaaggtgatgagcctgcagatcggtgacatggttgcctatgagcatcccgaaagcggcgagcgggtgattgcgcgggtgcgcaaattcgaccagcgcaacaagcagatctatctggacccgcacaatgagggcggcagactggacgatcggcacaaggacgaggccgacccgttccgcagcttcagcaagcggccgaacgctttgaaggccatcaaggcgcgccaggtgcgcgtcgacgagatcggacgcgtctgggaccctggcccacgcgtctgagtctcggctttgtttgtgcaggcttcacactctgccggcgccgccatctcaggttgcatgtcgcaattgattttaaccaaaggtagattatcgtatggcaatctacctttggttgcgtgtggcgtatggatcgggtcgtcgacatcagcacggatgggctgcatctggcggtgcatcgcgggttcctgaccgtctccgccggccacgaggagaagggccgcatcgcgctcgacgatatcggcgccgtcatcgcccatgcccacggcctgacctggtccaacagcgtgttcgtcaagctggccgagcgcaacgtgccggtggtgatctgcgcccagaaccatgcgccgatcacctgcctgtggccgctcgccggccaccatctgcagggcgcgcgcatgcgggcgcaggcagccgcgcccaagccgctgaccaagcaactctggcagaagatcgtcgccggaaaaatcctgatgcagggcgcggtgctgtcggcttccggcggcgagggcgcgggttttgccatgctggcgagaaaggtccgctcgggcgacccggacaatctcgaagcgcaggcggcgcgccgctactggtcggcgctgatgggcgccggttttcgccgcgatgccgacggcgacgggcccaacgcgttgctcaactatggctacacggtgctgcgcgccgtgctttcccgcgccatctgcgcggccgggctgcaccccacacttggcattttccactccaaccgcgccaacgccttcgcgctggccgacgatctgatggaaccctatcgcccgctgatcgaccgcgtggtgctgtcgctcatggccgaagacatccgcgacgtcacgtccgaggccaaggcccggctggtcaagatagccgatctggacctcgacacatcggccggcaccagcccgctttcggtgcaggcgagccgcctggtccattccgtggcgacctcgttcgagaccggcatcgtggcgctcgacctgccgcgcccgcctgatccgctggcgctcgccgccctcggccgccgcgcggaggcgccggcatgaccaccttttacacgcaacagggaggcggcgagccaacgcatctgtccgcctacaggctcatgtggatgctggtgacgttcgacctgccggtggaaaccaaaaaacagcgcaaggcggccagcgcctttcgcctgcatctgctcgatctcggcttcgagatgagccaattgtccaactatctgcgcatctgcaacggcaaggagcaattcgatgcctatatccgcaagatcgagagcagcctgcccgagcgcggcgacattttcgtcttccagttcaccgaccggcagtatgaaaacatcatccgattctccgaccagtcacgccggaagcgctcgaaaaatcccgaacagctcgcgcttttctagcgattcgctggatttcggttggcttcccggggctcaaatcgcttggaaaaccaaggatttgagccccgaaatagcctagcagttcagaaatcgcgggccaactgcaacaacaagctgcggcaggtgtccaccgacgcgagcctagcagttcagaaatcgcgggccaactgcaacagactgatgttgttgacgattctggcgtctagcctagcagttcagaaatcgcgggccaactgcaactggtcgggccgcttgctctttcctgatgagagcctagcagttcagaaatcgcgggccaactgcaacttaaggcgcatctggagcgccagcgcgaagagcctagcagttcagaaatcgcgggccaactgcaacagcagcccccgcctcctcccctccaccagcagcctagcagttcagaaatcgcgggccaactgcaactgaagaacctcgccgaagatgcggactgcgagcctagcagttcagaaatcgcgggccaactgcaacttgaccacgcgcggctcgccagtccatctcagcctagcagttcagaaatcgcgggccaactgcaaccgattccgctttaaccacgcgaaaacatcgagcctagcagttcagaaatcgcgggccaactgcaaccggcaacgtccgatccagataagccatgatagcctagcagttcagaaatcgcgggccaactgcaacgtatcgaggggaacacgctgttcaccgacgagcctagcagttcagaaatcgcgggccaactgcaactagacccggccgtcggccgagacgatggtcagcctagcagttcagaaatcgcgggccaactgcaacttgcgccgttcgaagacatcgggttgagccagcctagcagttcagaaatcgcgggccaactgcaacgcacccgtcaccgtcctcgtcatctgatttagcctagcagttcagaaatcgcgggccaactgcaacgcgtcaacaccatgcacgaccaggccatgaagcctagcagttcagaaatcgcgggccaactgcaacgcgggcgggttgtactggctgacaaggtagagcctagcagttcagaaatcgcgggccaactgcaactcgcgcgtgatcgtggccgagccggtcagtagcctagcagttcagaaatcgcgggccaactgcaactgttcgagcgctcgattggcatgtcgggacagcctagcagttcagaaatcgcgggccaactgcaacgccgccgtggtcgcgtagatgacccccccaagcctagcagttcagaaatcgcgggccaactgcaacagactgcaatggtgcttttgacatgtgggtagcctagcagttcagaaatcgcgggccaactgcaacgccttccaagcgctgatcgccttcgggcagagcctagcagttcagaaatcgcgggccaactgcaacccggcctgcatcgagcaatgacgcatgcccagcctagcagttcagaaatcgcgggccaactgcaacggggagtaacgacgacaactgtcatggagcagcctagcagttcagaaatcgcgggccaactgcaacgacgcatagaacggttcgccgtaacagctcagcctagcagttcagaaatcgcgggccaactgcaaccgcagacaacgacaatcatgctgccacgaaagcctagcagttcagaaatcgcgggccaactgcaactcctggatcagccgaaacagccacgagggcagcctagcagttcagaaatcgcgggccaactgcaacgacctcttgtcggcatggcagtcaacacgaagcctagcagttcagaaatcgcgggccaactgcaacacgcccgcgtagttgtgaatgttctggttgagcctagcagttcagaaatcgcgggccaactgcaacgccaccggctctgcctgctcgtcatgagcgagcctagcagttcagaaatcgcgggccaactgcaactggaagaaaaggcagcttgaatgcgcatgaagcctagcagttcagaaatcgcgggccaactgcaacagagaccccatcatccacatgcaatcgctcagcctagcagttcagaaatcgcgggccaactgcaacatagaccgatgatgtgtcctcacctgccatagcctatcagttcagaaatcgcgggccaactgcaacagggccgcgccggccaactcctggcgaattagcctagcagttcagaaatcgcgggccaactgcaacagcgtggaactcaaggtatagttactgcgaagcctagcagttcagaaatcgcgggccaactgcaacgtgggggcctcttcagccttgcgcgcaatgagcctagcagttcagaaatcgcgggccaactgcaaccctagtcggccgacatcgcccggcgacaggagcctagcagttcagaaatcgcgggccaactgcaaccggacgatcgcgaatgttctcggcttcacggtgttataaggactttccgatagagctgactgcatctgaggaggcggcgtatgcagtcaagtctggcgttgagtgtcggcctgccggcggcgctttgcatcatcatgcttggtctggggctatcgcttaggctcgaagattttgttcgtgtccttgcgcgcccgtggccggtgatggtcggtctgttctgccagatcatcctgttgccggccttgtgttttctccttgtgtccttgtccggtcttccgccggcgatctgcgttggcatgatgctgcttgcggcaagcccgggtgggacttccgcggcactgtatacgcatttggcgcgcagcgacgtcgcactcagcattgcgctgacggccatctcctcactgctcgcgattgtgagcttgccgatcatcgcaaacctgtccctgctggcgttttacggtgaaaacggcgccgtcaggcttcagcttcatcaggttatgcagatttttgcgatcgccatcgtgccggcattggtcggcgcctacattcacaagcggcatccagtcctcgcgggaagactcgacaagccggtgagacttctggccacgctctttctcgcaacggtcgtcctcgtcgcgttggtcgggcagtggcgtctgctggtgacatggggacctacggtcggcgcggtcgcgcttgccttcaacgggatggccttggccgtcggttattgggtccccaggatgctcgatatcgagcggcatcagtcggtcgccttgtcgatgtcgatcagtttgcgcaacgcggcgctggtcatcgccttggcgatgagcgagcatatgctgaacgacccggaaatggcgatagcgccggcggcctacggccttgtcgcctatctcgtcggcgggctgttcgtgtggagccttgttcgcaaccgagtctagcagcctggagatgacgggccacccgcaaccctgcgcgccggataccttgaggaaacggcaaagcttgacgcatttcggcgattgtcgcaatgagctttagcagttcagaaatcgcggatggtcccgcgaacgggggaatatccgctgatgtcacgacaggccgatcatgaaacggcattcgcctttcccatcctgatcggcgacatcggcggcaccaatgcgcgctttgccgtggtcgacggcccggatgcgcccgatggcgcgccggtcgtggttcgcacggcggatttttcgaccatcgacgacgcgatcaaggccattgccgaaaaacgcgacggccccgcgccgcgctcggcgatccttgctgtggccggacccgtcaatggcgacgagattccgctgaccaattgcccctgggtcgtgcggccgaagcagttgcgcagccttggcctcgccgacattgtcgtgctcaacgatttcgaggcgcaggcgctggccgtcgttgccctgggcgacgagcatatggagaagatcggcggcggcgagccgcaggaggaggccggaaaggttgtgctcggtcccggcacaggcctcggcgtcgcgggtctggtctatgcgctggggcgatggatcccggtgccgggcgagggcgggcacatggatatcggcccgcgcacgccgcgcgatttcgacgtgtttccccgcatcgagcatatcgacggcaggctgtcgggcgaacagatcctgtgcgggcgcggcctggtcaatgtctatcgggccgtggccgaaaccgacggcaagccggccacgatgaccacgccggcggaggtgaccgcggcggcgctggagcggcgcgatccggtggcggaagaggcgctgtcgatcttcgtcacctgcctcggccgcacggcgggcgacgtcgcgctggtgttcaagagccgcggcggggtctatctcaccggcggcattgcccagaagatcgtcccggcgctgaagaccggcgccttccgtgcggcgttcgaggacaaggcgccgcacagcgccctgatgcggaccatgccggtctatgtcatcacccacccgctcggcgcgcttgccgggctcgccgcctatgccaggacaccgtttcagttcggcgtgcagacccatggccgccgctggcgctgataaagccggtttcgtccagcgccgacttcatgtaggaggggcgcgaagcgccgcccggaacgggcactggcgcagcgttcacgggaagccgggttgagttcgagcaaaagccaggacacgtcatccaagggtggcgaagtcgtctccatcctcaagcgcatcgttgccgaaaacggccgcgactatgcgtggcagtatggcatcgccgctgttttcctggtcgcgatcgcgggttcaacggcgtttaccgcctggatcatgcgcgacgtcatcgacgagattttctaccgccagcgcgccgacctcatcgccgtcatcagcctgtcgatcatggccgccttcatggtccgtggcgtcgccacctatggccagtccgtcatcttggcgcgggtcggcaacaatctcgtcgcgcggtaccagaagcgtattttcgaccatctgatgaagctcggcatggatttcttcgccgagaaccgctccggcaccttggctgcccagatcaaccagaatgtcggcggcgtgcgcgacctgctcaacatgctggtcacctcggtggcgcgcgacgcaatctcgctggtggcgcttgtcgcggtgatggtggtccaggaccctgtcctgtcgctgatcgccttcctgatcgggccgccgctgatcctttcggtgaactatctgatgcggcggctgcgcaagctcaaccgcgacgccatcgtggtcggctcgcaactcggcggggcgatgcaggaggctgtgcagggcatcgccatcgtcaaggccttcacgatggaagaccagctgtcgcgccgcatggcggcgcttgccgaagatgtcgagcagcgttccaacaagatcgcgcgggtctccgaacgcctgtcgccgatctcggacatattggccggcatcgtcatcgccatcgtgattgcctatgccggctatcgcgccaccgccggcggccagccgcccggcacaatctttgcgttcgtgaccgcattgcttctggcctacgacccggcgcggcgtctggcgcgcacccaggtcaatctcgagcgctcgctggtcaatgcccgcatgatctacgagatcctcgacctcgagccgcgccagggcgatgcgccgggcgccaaggccctttcggtgtctgccggagagatccgcttcgaccgggtcaattttgcttatgccgccgacctgccggtgctgcgcgatttgagcttcaccgctgaaggcggcaggaccacggccattgtcggtgcctcgggggccggcaagtcgacgatcgtggcgctgctgcaacgcttctacgacgtcaccggcggccgcatcgagatcgacgggcaggacattgccggcgtcaccaagcagtcgctgcgccgctccatcgcctatgtctcgcaacatccctatctgttcgaaggcacggtgcgcgacaacatccgctatggccgcgaggaggcgaccgacgccgagatcgagcaggctgcgaagctggccgaagccgacggtttcatccggcaattggctctgggatacgacacgccgctgggcgagaacggcgccaccctgtcgggcggccagcggcagcgcctgtccattgcgcgcgccatggtgcgcaacgcgcccatcctgctgctcgacgaggccacctcggcgctcgacaacgaatccgaggccaaggtgcagcaagccctggctgccgccatgcagggccgcacgacagtggtgatcgcgcatcgtctgtcgaccgtcatcggcgccgaccgcatcgtcgtgctggagcagggccggctgatggagcagggcacgcataccgagcttctggccgatccgaacagtctgtatgcgcgtttctatcagttgcaggacgaccaggatatcggattggttgacgacatagccgatgccccccaagacagggacgaagccgtcgagcgcgcaatcgaggagagacccgcatgagcgaaatgggactggtcgtggtgggtgcggccggacgcatgggacaggcgctgatccgcgccatctctgcgattgacggcgcccggctcgtggctgcggtcgagcggccggactcgccgcgcatcgggcaggatgcgggcgagctggccggcatcggcaaaaacggcatcgtcatcgccgacgatccgctgcccgcctttgcaaaggccgacggcgtgctcgacttcaccagcccggcctcgacggtcgagttcgccggttatgcggcacaggcacgcatcgcccatgtcatcggcaccaccggctgcggcgcagaggacgatgaacggatcgccgccgcggcgcgccatgctcccatcgtcaagtcgggcaatatgagcctgggcgtaaaccttctggccgtgctggtcgagcaggctgccaaggcgctcggaccggacgacttcgatatcgaggtgctcgaaatgcatcatcgccacaaggtcgatgcgccgtccggcacggcccttcttctcgggcaggccgcggcaatcgggcgcgaggtcgcgctcgcggatcacagcgtccgggtgcgcgacggccacaccggcgcgcgcgcggccggcaccatcggctttgccacgctgcgcggcggttcggtcgtcggcgaccactcggtcatcctggccggcagcggcgagcgcatcaccctgtcgcatgtcgccgaagaccggtccatcttcgctcgcggcgccgtcaaggcagcgctctgggcgcatggccgcaagccaggcctttattccatgcgcgacgttctcgggctctgaggacgtcgccgcgtcagtttgatcgttgaagggaaggaagacaatgtcgggaactctcgtgctcgtccgtcatggccagagcgaatggaatctgaagaaccttttcaccggctggcgcgaccctgatttgaccgagcagggccatgccgaagccaaggaagccggcgaaaagctcaaggccaaggggctgaaattcgatatcgccttcacctcggttctgacccgcgcgcagaagacctgccagcatattctcgacggtctcggccaaagcgagctggaaaccatccgcgaccaggcgctcaacgaacgcgactacggcgacctgtcgggcctcaacaaggacgatgcccgcgccaagtggggcgaggagcaggtgcatgtctggcgccgttcctatgatgtgccgccgcccggcggcgagagcctgaaggacaccggcgcgcgcgtctggccctattacatccacgatatccagaagcatgtgcttgccggcaagacggtgctggtggccgcgcatggcaattccctgcgcgccttgatcatggcgctcgacggtttgaccagcgaggaaatcctcaagctggaactcggcaccggcattccggtcgtctacaggctgaacgccgattcgaccgtggcgtcgaaggacgtgctcggctgagccgattttatgggggataggtggcttcgcatcgcctgtttctgcgctttgccggctgccggacagggaatgttcggcaatcggcgggggatttgaaaaagcgcgttgacaggcatcgtttgcccgcttacatgagcccgcaccagcccagatggcggaattggtagacgcgcacggttcaggtccgtgtgccgcaaggcgtggaggttcgagtcctcttctgggcaccattcccatcccgactaccaacgggatcaagcacttaacattgatattcggctcgcccccgggcgtgtcgctctctgctcggaagcacgccgatgcggcttgcgcggctgatgtcgtcaagacgcaacacccccggcgaaagaacagtcggagggttgcggacgacaggcgaccgtggccaaatgcgcccaacttgccgacttgccattcgggtatcagtgccggacgcgtatcagcggaatttgccatgcctcgcctgtcccttgccgcgtccatcgcctgtcttgtgcttttcgccgggcctgcaatcgcacaagaggctccaacagccgccgccttgccgccggtcgagggaaagccttccgcgaccgccatggttgagggcgttgccgctggcgatttg

SEQ ID NO: 3019 - DNA, 23294 bp, synthetic construct
  source 1..23294: mol_type = other DNA
  misc_feature 1..23294: note = Synthetic
tattggctgcaccgcaacctgttcggcagggccgaacgtcttcgtctcgaagccaaggtcgccggtattggcgagaccctggacccggccgacttcacctaccggatcggggcgaccttcctgaagccgggcgtctatacgcccgacaccgatttcgtcgcctcgctgatcggcgaccgggaggtgctggagccctatacccgcacctcggtcaatgccgaagtcggcttcacccatatgttcacgccggagctttcagcgcgcttgttgctcaccggcggcgtttcgcgcttcgatgacgatgtcttcgggagacgagaattcgccaatatcggcctgcttggcggcgttatctatgacagtcgcgacaacaaggtcgacgccacggaaggctattatttcgaagccacgctcgaacccttctacgaattcaactacggcaatgccgctgcgcggatgaccgccgaggcccgcgcctattacggcttcggcgaagacgatcgcatcgtcgccgcgggccgcgtgaagatcggcagcatcggcggcgcgccgatcgacgagatcgcgcccgacaagctgttctttgccggcggcggtggttccgttcgcggctacgcctatcgcaatatcggcttgccgggcccggatggcacgataacaggcggacgctccctgatcgagggctctgccgagttgcgcgccagggtgaccgacacaataggcctcgtcggatttatcgatgccggctatgtcggggccgacacattcccgcatttttcggaggatctgcgcctgggcgcgggtgggggcctgcgctatctcaccggtctcggaccgatccggctcgatgcggccgtaccgctcgatccgcgggacggcgacccagacgtcgctttctatgtcggaataggacaagcgttttgacccggatctttctggccatcgcccttttcttacttgccctgccggcccttgcgcaggacgagcaggccgaccgctcctatttcgtcggcttcgtcgaggatcagctttccagccccaaccgccagatacgcatcaacaatatccagggcgctctctcctccaatgccaccatcggcgagatcaccatcgccgaccgggagggaatctggctgcgtatcaccaatgcacgcatcgtatggacgcgctccgcgctgctgctggggcggctgaatatcgacacgctcgccgccgatcgcatcgacgtgttgcgcaagccgctgcccgacgagagtgcgccggctcccgaggcagggggattccgggtgccggaactgccgatttccatttcgcttggcgcgctcgagatcccgcatgtcactttcggcgaagacgtgttcgggttggcgtcggaaatggccatcaccggccggctgcaactcgccggcggctcgctcgacaccgcccttaacgttacacggctggatggcccaggcggccagctcaccctgaccgccgcctatgccaatgccagccaggtgctcaatctcgatctcaagctcgacgaaccggcaaatggcgtcgttgccaacctcctcaatatagagggccgcccgccggtggcgctcgccttgcagggagaggggccgcttgccgagctcgaccttgctctgacccttgatgccgacgcccagcgtgtactgacaggcaccacccggttgcgccggcaaagcgacgggcttgccttcaacgccgatgtcgaaggcccgatcgcacggctgatctcgccgaggttccgttctttctttggaaccaatacgacgctgcaggcagccggctccgtcaaggatggcggaggaatggtcctcgacaatctcgacctgcaaagcgcggctctcaaggttaaggcagcggcacaaactacagccgatggtttcctccagcggttgacgctcgatgccagcgtcgacaatggcacggccgagaaagtgcttctgccgcttccgggcgaaaacactgtgcagcgcgcggccgtgaagctcgctttcggcgatagcgcgggtgaggaatggaccggctcggtccagatagacgatctttcgacggaaaccttttcatcgaagtcggtggaagtgcttctttcgggtctggcgcagaacatcgccacgccggcggaacgccggatcacgtttacggccactggcggtgcgtcgggcgtcaccgccacccgtgccgatatcgccgaagcgcttggcgaccgggtcaccctcgacatcggcggtgactggcaggccgggcaaccggtcaagctggccaaggcgctgcttgccgccaacggcctcagcctgtcgatggaaggcgatattgccgaatatgccttcaatggcgacatcggcatcaaggcaagcgcgctggcacctttctccgcccttgccgggcgagacctgtccggcggcatcgatcttgccgccaagggcgaggtgaagccgctgaccggcgctttcgacctcgcgctggacggaaccgccaccggtcttggcataggcacccctgccgccgacaatcttctggaaggccagacccgcattaccggcggcatcgcccgcggcgaaaccggtctgatggcgcgccagttgcgcatcttcaacgaccaggtcgaggtgacggcggatggcagcttcgccaccggcgcgtccgacttcaacttcgatcttgcaatcagcgatctggcgctggtgtcggaaaaagctgccggcaggctggcggccaagggacgcgccagcggcagcgatggcctcatcggcctgaccttcggcgccgaagtgcccaccggttctcttgtcggcaagacgctgcgggaagcggtgatcggctttgaaggcacgctgcgcgacaaggacctcaacggccagctgaccggcaatgcctttctcgacggcgtcagggtcgaactggcatcggcattggccgtttcggaaaatgaaaagcgcctcggcgacctcgcatttaccgccggtggagcgaagatcacgggcgacgtgacccagaccagggaagggctgatcgagggcaagctggtgctcgacgccgccgacatctcgaccgccgctgccctgctgcttcgcgaggcgaccggcgccgtcaatgccgatatcgccctcagccatcgcggcggcaagcagaacgccgccatcagggccgatgccaacggggttgcggtcgacacgatcaggctcggcaaggccaatctcgacgccacgctggaggatatcttcaacgtccccatcgccaatggcacattgggcgcaagcgacgtgtcggctgccggcatcgacatcgccaccttgcaggcgacggcccgccaggaattccagaccaccaatttcagcgccgatgcgacgctgaagaacggcaccacggcttccaccaccggagcattgtcgcccgtcgaaggcggttaccgcctcgccttgcgtgatttggaggtccggcaaggcaatctggcagcccggctggtcgagcccgccgccctccagatgcgtggccagaggatcggcatcgataatttgctgctcgatgtgggcggcgggcgtgttagtgcacgcggagagattgccgaccggctcgacctggccgtgaacataacggatctgccgctggcgatcgccaatacgatcaagcccgatctggcgcttgccggaaccctcaacggcacggccaatatcggcggcacccgcgcccagcccgatataagcttttcggcacagggccgttcacttgccgccgccgcattgcggcaggcagggctgcgctcgatcaacctcgacgccgagggcacttccaccacgagccggctcaatgtgaaagccgccgtcaccagcccggaaggcctgcgtgccaccgtcaacggcgcggtgccgctcgacaagggcgctatgacgctcgacgttgccctcgaagcatttccgctggcagtcctcaacgcggttgcccccggccaggagcttggcggcacattgtcgggcacggccaggctgacaggtacatttgccgacccggctgcagcctttacgctgcggggcgccggggtgcgtgctgcagcgcttcaatcggcaggtgccgcaccgcttgagatcaacgcgacaggcaatttcaccggcagggtgctgacgctgtcttcggccgaggccaacgggccgcaagggctatccgtctcggccagtggccgcctgccggtttccggcaccggcgtggagctttccgtgcgcggcgaagcccccttggcgcttgccaaccggttcctcgccgagcgcggggcgcaggtgagcggaacgctgcaggcgaatgccaccgtttccggcagtcttcaaaatcccgtcattcacggaatgttctcgacacagggtgcggaattcatcgatcccgagagcaacacccgcctgcgctccatcgccgtcatgggcacgatcgacggtgatcgcgtcacgcttcgcaacgcctcggccaatctggctgcgggcggttcggttgcagccgccggcaccatatcgctggacgcggccgccgctttccctgccgatctgcgcatcactctcaacgatgcccgctatgccgatggcaatctggtggtcgccacggtcggcggtgtgctgactgtcaccggcggcctggcccgtgacccgctgattgccggcacgattaccgtcagccgcgctgagatcaccgtgccggacagttttgccggcggggctgcagccctcgacgtcaagcatcgcaacgccccggcaggcgttcaggcgacgctgagacgggcacgtgccgacgacggcacgccgacaccgaccagcaggccgagcgtggcgcggctcgatgtgacggtgaacgctcctgcccgcatattcgtgcgcgggcgtgggctcgatgccgagcttggtggctcggtgcggctgaccgggccggtcaccgatatccacccggtcgggggctttgaactcatccgtggccgcctcggcattctcggccagcgcatcaccttcgacgagggcacggtaacgctggtgggcgacctcgatccgttcctgaacttcgtcgcgcgttcgggcggcaatgacatcaccgtcttcatcaccgtcaccggcagggcctccgacatcagcgtgaaattctcctcgcagccggaactgccggaagacgaagtgctggcgcgcctgatcttcaaccgcagcatcaatgaattgtcggccttccagatcgcccagcttgcggcggccgccgccgagcttgccggcggctccaacacctcgctgctcggcagcctgcgtggcgcgaccggcctggatgatctcgatgtggtgaccgatagcgagggcaatgcggccctgcgtgccggtcgttatatccaggataatatctatctgggtgtcgaggcgggcgcccagggcacgacgcgcggtacgatcaatctcgatatcaccgaggatctcaaggcgcgcggggcggtcggctccggcggcgattcgagcctcggcgtcttctacgaaaaagattattgaaccctgttccggcaagcacggctgcgcataaattggcgatgtcgaagtttcgcctgcacaggcataggcaagcccgcgcgatcagtctaatagggtcacctttggcgatgcccgcccgaacggaaacgcaagacggtccagaatttgagctccagccgtagaaagtctgaagtcgatcgaggcgagatcgtagccgtgattcggcgcgttctggccgaaaatggccgggaatatgttgggtcctatgcgatagcggccgtttgcatggtcgccgtggcgctcacgaccgcctaccccgcatggatcatgcgcgacgtgatcgacgacatattctatcgccagcgcagcgacctgatcgtgctgatctgcgcatcgatcctggcggccttcacccttcgcggcgtggcaagctatatgcaggccgtcatcctggccaaggtgggaaacaatctggtcgcccgctaccagaggcgattgttcgaccatttgatgaagctcgatgtcagcttcttcaccgagacgcgatcgggccatcttgccgcccagatcaaccagaatgtcggcggcatccgcgatctgctgtcgatgacgctgacggctgtggcgcgcgacctggtgtcgctggtggccctggtcaccgtcatggtcatgcaggacccgctgctgtcggtcatcgcgttccttatcggcccgccgctcatctatgccgtcaactatctgatgcggcggctgcggcgtgtcacaaggcaggcggtggagatcaattcgcatctgataggctccatgcaggaagcgactcagggcgtgtcggtggtcaaggccttcaccatggaaagccagctttcgcgcaagatgagccagctcatcgaccatgccgaggagcgctccaacaagatcgcgcgcgtgtcggagcgattgacgccgatttccgaaatgctggccggtttcgccgtggcgggtgtcatcgcctatgccggctaccgctccacccatggcgggttgctgccgggctcgaccgtttccttcatcacggcgctgttgcttgcctacgatcccgtccgccgtctcgcacgcctccaggtcgggctcgagcgctcgctggtcaatgcacggatgatctatgagatcctggacatcgagccgcagcagggcgacgcaccgggggcacccgaactgaaggtggacaagggcgaggtccgcttcgagagggtatccttctcctatgcgcctgacctgcccgtgctgaacgaaatcagtttcgtcgccgcggccggcaagaccaccgccattgtcggcgcctcgggagccggcaaatccaccatcaccgcactgctcgaaggcttctacgatgtcgatagcggctcgatcagcatcgacggacaggacatatccaaggtcaccaaggcctcgctgcgcaacgcgatcgcctatgtctcgcaacagccttatctcttcgaggggaccattgccgataatatccgctatggccgcgaaagcgcgaatgatggggagatcaggcaggcggccgatctcgctgccgccgaccagttcatcggccagcagccgcagggctatgatactctggttggcgaaaacggcgtgactctgtcgggtggccagcgccagcgcatctcgatcgcccgagccatcgtgcggcaggccccgatcctgctcctcgacgaagcgacctcggcgctggacaatgaatcggaagcacgtgtgcaagaggcgctggccacggtcatggaagggcgcacgaccatcgtgattgcccaccggctttccaccgtggtcaatgccgatcatatcatcgtgctggaagagggccggctggtagaggaaggaacacacgacgcactgatcaccaatccgcatggcgtctatgcgcgcttccaccgactgcaaagcggcaaggggctcggcctggtggacgatacgaaacagatggagcccccggccaaggctccagggccggcacggccgacacggagaaaaaccgcatgagcgatatgggtcttgtcattgtcggggcaggcggccgcatgggccagacgctggtccgcacggtccattcaatgccgggtgcgcggctggcgggcgcaatcgaacgtcccggctcgccctatgtcgggcgcgatgccggcgaattggccggcatcggcatcgtcaatgttccgatcaccgacgatccgcttccggcctttgccaaggctgatggggtgatcgatttcacgtcaccggcggcaagccgggaatttgccggctatgcagcccaggcccgtatcgtccatgtgatcggcaccaccggtttctcggccgaagacgacgctgccatagccgccgcggcgcggcacgccactatagtcaaatccggcaatatgagccttggcgtcaatctgctggcagagctggtggagcaggctgcccgggcgctcgggccggacgatttcgacatcgagatcctcgaaatgcatcaccgccacaaggtcgatgctccgtccggaaccgcgcttatgtttggcgaggcggcggcagccggccgcgacatcaagctgccggacaacagcgtgcgcgtaagggacggctataccggcccccggcaggcgggctcgatcggctttgccacgctgcgcggcggctctgtggtcggcgaccattcggtcatcttcgccggcgccggcgaacgcctgacgcttacccataattcggaagaccgctcgatcttcgcccgcggcgcggtaaaggccgccctttgggcccatggccgcaaacccggcctctattccatgcacgacgtgctgggcctgtcctgaagactcgtgacggaccagcctcccctttcaccttcaaggagcaagttatgaccggaacccttgtgctcgtgcgccacggccagagcgaatggaacctgaagaatcttttcaccggttggcgcgaccccggcctgaccgagcggggcgtcgccgaggccaaggcagcaggcgcgaaacttgccgcgcgcggcttgaagttcgacatcgccttcacctccgcgctgacgcgtgcccagaacacctgccagtacattttggatgccaccggccagggcgatcttgagaccatccgcaacgcggcgctgaacgagcgcgactatggcgacctcaacggcctcaacaaggacgatgcgcgggcaaaatggggcaaggagcaggtgcatatatggcgccgctcctacgacacgcccccgcccggcggcgaaagcctgaaggacaccggtgcgcgcgtatggccctattacatgcacgatatgcagccgcatgtgttgcgcggcgaaaccgtgctggtcgccgcccatggcaattcgctgcgcgcgctgatcatggcgctggaggggatttcgggagaggagatcgtcaacctggaactcggcaccggcgttcccattgtctacaagctcaacgccgattcgacggtggcttcaaaagaggtactggccgggtaaggctcccggccccgcgctggcaggcggccattttgtctcaacttcgacctgaaatggtatttcggcaaaatgcgcgttgacacggtgacgctgcccgcttacatcagcgcccaccagcccagatggcggaattggtagacgcgcacggttcaggtccgtgtgccgcgaggcgtggaggttcgagtcctcttctgggcaccatcatccgcagagcctgattcattcaggctcgcacccttatctccctttattgaagatcacggctgcgagcgacagggtgtcgagcgacaccgatctgcttgggctcaggcagcaatcctgcggcgatgaagacaggacaggcatggtcccggagccggccatgccgatgccggcatccggcgcaaacatcgtcgaaatgatgtcgttccgcatacattgccgacaattttgcctgagcaaaacaggcacgaggcgtccccccaagggttctccgcaaaaccaaaaagcccccgccgtggcgagggccttatttggtgctgtcgaagcttgttaacagccagaccgcgttttctgaactgctaggcagtaattagtacatatcatccaacaatcaaaaatcaaagcgtaaatacttaataggagagagactataaaaacagaggcggattcctcttgtggaggaatccgcccagcagatcagaagacgccgtctgacagtaactacataggtggcccattctggtcaatctgacatgaatgcacctcaagtagccttccgctgcgttggaggcagcgcttctgtgggttgtaactatgagttacggcgtgtcgacacattcaactgtggacgctggagagtcggcacgacacccacaatagtagataatatttactgagtcgcttcgcctgtcaaattacataaactcatatgccttatataggtggcgcatttactatattagcttcatttgacgttccccaaaaagtaagcattatacgaacaattgtgaaggtagggggcgacatgacagagcgtgcatttgcgttcgatattggaaccaacagcctaggcggctgtgttttcaagctagatactgacgggcgccccatcgctttagaacatatgcttgtacgcatcttctcggatggccgcgagccgaaatccggcaattcgctggccgaggggcgtcgcgtggcgcgtggcatggcgcgccggcgtgaccgctacaagcgccggcgcaaggcggttctgcgcacgctgaccgaatatggcctgatgccggccgaccagcaggcgcgcaaggaactgctggccgaaaccagtgatcgcagcccgcgggaggcggtcgagcaagcgcttgccgatgtctacaatctgcgggcgcgggcgctgtcggaaaagctgccgctgcatcatatcggccgggcgctgtttcacctcaaccagcgccgcggcttcaagtcgaaccgcaaggcggatcgcaaaagcaacgagaagggcgccatcgagatcggggccaatcggctgcatgaaaaaatgcaggaggccggcgcccgcacgctcggccagttcctggccatgcggcgcgccaaaggcgaatgggtgcgcgtgcgtagcggcgcgctcggcgaggagggcgccgatgacgggagaaactcaaagactacctatgatttctatcccgtccgcaaactgcttgaagaggaattcaatgcgatctgggagatgcagcagccatattaccctgaggtgctgacggaggatcgtcgcagccatctgttcagggtgatgttctatcagcggcccctcaaggcggccattgtcggcaaatgcagcttcaatccggctgaaacccgtctgcccaaggcgcatccgctgttccagcaattccggctctacaaggaggtcaatgagctggaaatcgtgttgcccgaccagtcccaccgcaagctgacgctcgatgagcgtgataccttggtgcggcagcttaaaggtattcggaagacaacctataaaacgctcaggaagaccctcaaactttctggttcggaatttcgcttcaacaaggaaaccgacaatcgcgtcgacatgatcggcgacgaggttaatgcggcgttgtcggacaagaaggcgttcggcaatcgctgggcgaccttctccactgacgagcaatggacggtcatcgatcaactgcgcgagcaggaagatccgctttccctgcatgaatggctggtcgtaacctacggtgttccggacgatgcggccgaggtggtggcgagcatccatctacccgacggctatggccggctgggcctgacggctatatcgtcgatgctggaggaactgaaagccgacgtgattcccgaggcggaagcggcaaagcgggcaggctacgatcatgccctggcgcccacggatggtgatcttgatcggctgcccaaataccaggaaattctggagcgtcgcattccgccgggtaccggcgagcccgacgacccttacgacgtcgccaaggggcgcatcaccaacccgacggtgcacatcgcgctgaaccagatgcaacaggtggtgaacgggctcatccggcaatatggcaagccggagcagatcgccatcgagcttgcccgggacttgaagcttaacgaaaaagagaaagccgaagtcaaccgcaagatcggtgaaaacacgcgtgccgccgcaaagcgctctgaaaagctgcgcgaactcggccagaaggacaatggccacaatcgcaacctgctgaagctgtgggaggaactcaacccggacaatccggaggaccgcgtctgcatctataccggcaggccgatcggcatccgcatgctgttttccggcgccgtcgatgtcgatcatatcctgccctggtcgcgcacgctcgatgacagccaggcaaaccgcatcctctgcgtggtcgaggccaatcgcgtcaaacgcgatcgcgcgccggccgaggtggccgaatgggcgagcgattacgacgcgatcctggaacgtgccaaccgcctgccgcgtaacaagcgttggcgctttgcccgcgacgcgatggaaaaatatcaggacgaggaggactttcttgcccggcaattgacggacacacagtatctgtcacgcctggcgcatgaatatcttgtcgcgctttatcccgccgaggaagccgatggcgacggtgtgctgaagcgccgccggcatgtccgcgtcattccaggccgcctgaccgagatgctgcggcgcaattgggggctgaactcgatcctgccggatcacaatttcgctggcaccgcgcaggccaagaaccgcaaggatcatcgccatcatgccattgacgccgccgtggtcggcgtcaccacgcgcagcctgctgcaaaagatctccacccaggcggccctgcgcgagacgatcgcgctggaggaaacggttgcggatattcccgaaccgtggccgactttccgcgacgacctcaaggccatggtcgagcggatcgtcgtcagccataagcccgaccacggcacgctgccgaagcccggtgaaaacgggcgcaccgccggtcagcttcataacgacaccgcctatggcatcaccggcgaatgtgacgcgcggggaaacaccatcgtggtacggcgcaagcccttcctgtcgctcaccgacaaggacatccctaacatccgcgatgatgagttgcgtcgccgcctctattccgccaccagcggcctgaccggcagggagtttgctgcggcgctcgactattttcgcaagaccgaccagaaattccatcggatccgccatgtgcggctgaccgaatccctgtcagtcatcccgatccgcgacaaagagggccgcgcctacaagggctataagggcgacgccaatttccgctacgacgtgtgggaattgccggacggcaaatgggtcgccgatgtcgtcaccatgttcgacgcccaccggcccgaccgggaccctcaggccgccaggccgcatccggctgcacgcaaggtcctgagcctgaagcagaacgacatggtggcctatgaacacccgaaggacggactgacgatcggccgtgtcgtcaaattcagtacggccggccagatttatcttgccgggcataacgaggccggcgcattgaaggcacgggatgccgataaggacgacccgttcaaatatttttcgaaggcggccagtgggctgcgtgagatcggcgcgcgccagctccgtgtcgatgggaccgggcgagtgttcgatcccggcccgcaggaccgggagacccggctggagagaaaggcgaggctgggagattaaccacaaaatacatatcttctgtgcacctagtgattgtatatatattatcatacaattatggagcgtgtggtcgatattgaaaccgatgggcttttccttgctacgcatcgcggctttctgaccgtaagcgaggcgggcgaggaaaaagggcgtatcgcgcttgatgatatcagcgcgctgatcgtgcatgcccatggcacgagctggtccaattcggtcatgctgcgcctgtccgagcgtgcggttccgatcgtgatctgcggcacaaatcacgcaccggtcgcctgtgtctggcccatgcagggccattaccagcagggcgcgcgcatgcgtgcgcagattggcgcttcccgcccgctcggcaagcagatctggcgtcagatcgtggcggccaagatacgcatgcagggtcatgtcctgtccttggcgggaaaggaggctggcgcttttgatctcctggctcgcaaggtgcgttcgggcgatcccgacaatatcgaggcgcaggccgcaaggcgctattggaaggctttgttcggaccggatttttcgcgtgatcgcaccgcagacggcgccaacgcgctcttgaactatggttataccgtgctgcgggccgcagtctcgcgggcggtttgtgcggccggtttgcatccgaccatcggtgtgttccatgccaaccgggccaatgcctttgcgctttccgatgacctgatggagccctaccggccgctggttgatcgcatcgtgcttggaatggtcgcccaaggaaatgtcgaggtgacgagcgaggccaagcgtgagctgacggcaatcaccacgctcgatctggagaatggtgacggcaccgtctcgccgctcggtgtccaggtccagcgtttcgtccactcggttgccaccagcttcgagacaggcagtgtctcggtcgcactgcccagcggcaacgcaagctgctcatcggcatcggcaacaagcagcttagcagttcagaaaacgcggtccagcggcaaccgattggtgcctttcagcacacccttgccgagcttagcagttcagaaaacgcggtccagcggcaacaggcgcggccttcatgatgtgccgcacaatagcttagcagttcagaaaacgcggtccagcggcaacaccgcttgaacacgcgttgggcggtgaattagcttagcagttcagaaaacgcggtccagcggcaacggcgaagcggctgaccataggcttcgcagaagcttagcagttcagaaaacgcggtccagcggcaacaaagccaggaggcgcccgtggcgcgtgcgaagcttagcagttcagaaaacgcggtccagcggcaacgaaagcgcccagtcatcacggatcgagcctagcttagcagttcagaaaacgcggtccagcggcaaccagccactgcaggacaccgcccatgccgcgcagcttagcagttcagaaaacgcggtccagcggcaactttggcgatctgatgccgatgaagtatggcagcttagcagttcagaaaacgcggtccagcggcaactgcggccggacggtacccgcgcggccggcagcttagcagttcagaaaacgcggtccagcggcaactatcgcgaagcacggcagatgatcggcgacagcttagcagttcagaaaacgcggtccagcggcaacgttctttgccttgttcaagatttcatcgaaagcttagcagttcagaaaacgcggtccagcggcaactatccgggccagcggtcagccttgcggcatagcttagcagttcagaaaacgcggtccagcggcaacgatccgaataagtcagatgaggaaaacgccagcttagcagttcagaaaacgcggtccagcggcaactgatcgatatacttccacaattcggccttgagcttagcagttcagaaaacgcggtccagcggcaactggacgggctttttgcgtctctgcgggaacagcttagcagttcagaaaacgcggtccagcggcaacttgacggcgactttcagcttgtcggcgttgagcttagcagttcagaaaacgcggtccagcggcaaccaactgcggacctatgcgctcggcgcgatgagcttagcagttcagaaaacgcggtccagcggcaacggcgccggaagacgaccgcctcgtcgacctagcttagcagttcagaaaacgcggtccagcggcaaccaaccgcggacctatgcgctcggcgcgatgagcttagcagttcagaaaacgcggtccagcggcaacggcgccggaagacgaccgcctcgtcgacctagcttagcagttcagaaaacgcggtccagcggcaacctggcatcgtcacggcagagcagatcgcccagcttagcagttcagaaaacgcggtccagcggcaacagataggaacggtaggcgcgcagaggacctagcttagcagttcagaaaacgcggtccagcggcaacggaagcgcaaaaggtgaactgatgaacagaagcttagcagttcagaaaacgcggtccagcggcaacgccggtgccataaaccgtaccggcgggctgagcttagcagttcagaaaacgcggtccagcggcaacacgttgctattgactgtcagggcataggcgagcttagcagttcagaaaacgcggtccagcggcaacagtacgtatctatttactgcctcattgggcagcttagcagttcagaaaacgcggtccagcggcaacaagagggacacggcacgccgtacgcaacggagcttagcagttcagaaaacgcggtccagcggcaaccgttgccatagacggcaacgcctacacggaagcttagcagttcagaaaacgcggtccagcggcaacctgaaggcgagttgttcaccgttacaccaatagcttagcagttcagaaaacgcggtccagcggcaacaggtcggcaaccggttgtctatttcccggctagcttagcagttcagaaaacgcggtccagcggcaacgccagcggttcgatgattgcggttcggcacagcttagcagttcagaaaacgcggtccagcggcaactcgttgattctctgctgccagaactgcttgagcttagcagttcagaaaacgcggtccagcggcaacgcccgaaagtggtcagaagtaggctgggtcagcttagcagttcagaaaacgcggtccagcggcaactagtggttgccctttgcgtaggcccagttgagcttagccgttctggcgcagggttagccgcgttccatagtgttgcaaaatttgcagtgtcgcggccggccttaatcgatgtcgaaggagacgccttgggcgagcggcagggcggtggaatagttcaccgtgttggtggcgcggcgcatataggccttccacgcatccgatccgctctctcggccgccgccggtctccttctcgccgccgaacgccccgccgatctcggcgcctgaggtgccgatattgacattggcgatgccgcagtccgagccctcggccgacaggaaacgctcagcttcctgcaggtcacgggtgaagatcgaggacgacaggccggcccccaccgcattatgctcgccgagcacggcgtcgaagtcggaatatttcatgacatagaggatcggcgcgaaggtctcctccgtcaccggcgaaacctggcgcggcatttccacgatagccgggcggacataataggcctgcgccggaccggtctcgacacgttcgccgccggtcaccgagccgccggctgcacgtgccttgtcgagcgcggcctgcatgccgtcgaaagcggccttgtcgatcagcggcccaaccagcgccgaggtttccagcgggctacccacggatacgctccgataggctttcttcaggcgtggcacgagttggtcatagacgctgtcatgcacgaacaggcggcgcagcgtggtgcagcgctggccggccgtgcccatggcgccgaaggcgatggcgcgcagcgccatgtcaagatcggccgacgggcagacgatgccggcattgttgccgccgagttcgaggatggcgcgggcaaagcgcctggccagccttggccccacctcacggcccatgcgggtcgagccggtggccgagaccagcggcaccgtggggtgatcgaccagcacctcgccgacggcgcggtcgccgatcagcacggtgagcaaatcggccggcgcatcggcgccgaagcgcattgccgcgcgggcaaagatcgcctggcaggccaacgcggtcagcggcgtcttttcggaaggtttccacaccaccgcatcgccgcagaccagcgcaagcgcggcattccacgaccacaccgcgaccgggaagttgaaggccgagatgacaccgaccacgccgagcggatgccaggtctccatcatgcggtggccgggccgttcggtggcgatggtgagcccatagagctggcgcgacagcccgaccgcgaaatcgcagatgtcgatcatctcctgcacctcgccctgcccctcggaggcgatcttgccgacctcgatcgagaccagccggccgaggtcttccttgtgggcgcgcaactcctcgccgagcaggcgtaccagttcgccgcggcgcggcgccggcaccatgcgccaggccttgaaggcctcatgcgcagcctcgatcgccctgccggcatcggcaggcatgatcgtcttcagtgccgcgatctcttcgcccgtcaccgggctgtagacgacaagatcgccgcccgaaagcgcctcggcggccacgcccagccgcgaaagaagctcggaggtttcctgctgcacattcatcttgaaattccttcctggtctcgcggccgtccgcctgcacctgttcctggagaggtgccggggccgttgcctgctggagtctgcggcgatgcccatgtgcctggccgcaattatatgtcgatggcgtagcgtgccggcaaaggcgccgtcaactggcgacttggcttaaagaattgaacaaaaagactgaaagtgtctcatcggcctatggacggcgcgtgattgttatgtttgactgtatatatcgatccgctgtctgacacggatcatcacgcaccatttgggggaaatgtcatgctggcatgcaagggtttcggattggggatggcggccgccattggcggcatcgcggctctgctgatctcaggggtgccagctgcccttgcgcaggaaaatgtcacggtgtttgccgcagcgagcctgaagaatgcgctagatgacatcaacaccgcctgtgaggccgatgtcggtgaaaaggcgacgatttcctatgccggcagttccgcacttgccaagcagatagaacagggcgcacccgccgacatcttcatttcggccgatctcgactggatggaatatttgtcggaaaagaacctgacgaagaaggatacggaaaccaggctgctgggtaaccgcatcgttctggtcgcgcctgccgattcttcggtcaccgccgagatcaaggacggcttcgatcttgccgggctggtcggcgatggcaagctggcgatggcgaacacggattccgttcccgccggcaaatatggcaaggctgcgctggaaaagctcggcgcatgggccgcggtggaaggcaaggtcgctcaatccgagaatgtccgtgccgcacttgccctggtggcaacgggcgaagcgcccttcggcatcgtctatcagaccgacgcggcagccgaaccgaaggtgaagatcgtcgcccagtttcccgaagacagccatccgcccataatctatccggtcgctcaacttgccgaatccaaggacgatgatgccggtgctttcctgaagtgcctgcagtcgtcgaaggcaagggagcttttcgaggcacagggtttcacggtattgctgccgccagtgtccaattaagggtctgaacctcaggcatggagtggctgcatctcagtccggaagagtggatcgcggtccggctctccataaaggtttcgatctgggccacggtggcaagcctgccgctggggatcctgatcgcctatgtgctcgcccgcaaggagttctggggcaaggctgcgctcaacggcatcgtccatctgccgttgatcctgccgccggtggtcacaggctatctgctgctcttgaccttcgggcgccgcggtcccatcggggcgttcctcgaccagaatttcggcatcgtcttttccttccgctggaccggtgccgcactcgcctgcggcgtcatggcttttccgctgatggtgcgcgccataaggctgtcgatcgaggcggtggaccgcaagcttgaggcggcggcgggcacgctcggcgccagcccgcccttcgtttttgccaccatcacgctgccgctggtgctgcccggcatcatcgccggcatgatcctgtccttcgccaaggcgatgggcgaatttggcgccaccatcaccttcgtctccaacattccgggcgaaacccagacacttccttccgccatctacaccttcacccaggtgccgggcggcgaccttggtgcgctgcggctgacgctggtgtcgatcgtcattgcgatgattgcgctcgttgtgtcggaagtgctggcccgccgtgtcagccggcgaatggacatcgaatgacgctgctggtcgatattcgccaccgcctcggcagtttcgaactggaggcgggcttcgaaagcagcggccgattgaccgcgctgttcggcacgtccggctcgggcaagacctcgttggtcaatctgatcgccggcctgatcaggcccatgcagggccgcatcctggtcgatgggcgggtgctggtcgatacggcaaagcgcattttcgtgccgatgcatcggcgccgcatcggctatgtcttccaggatgcgcggctgtttccgcatatgacggtgagccagaacctgcgctatggccgcttttttacgccggccggcgaacgctatgccgaactggacgctgtggtcgatctgctcggcatcggccatctgctcgatcgccggccgagcctgctttcgggcggcgaaaagcagcgcgtggcgatcggccgggcgctgatcgccagtccgaagctgatcctgatggacgagccgctcgcctcgcttgacgatgcgcgcaaggccgagatcatgccctatatcgaaaggctgcgcgacgaggcccgaatcccgatcgtctatgtcagccattcggttgccgaagtggccaggctcgccaccgatatcgtgatgctcgcagggggaaaggtttcggcatccggcccggcgcaagacatattgcggcggctcgacctgttgccggcagaagagcgccatcagggcggctcgctgctggagatgatagtggccgagcacgacaccgccttcggcatgtcggtgctacgctcgccggccggcgagattcgcatcttcggccacgacgcgcttgtgggcagccgggtgcgggtgcggatccgggccaatgacgtcatggtcgcaacgcagccgccggagggcctgagcgccttgaacgtgctgtccggcaaggtcagccaggtccgcgaagggcccggcatgctcagcgacgtcacgattgattgcggcggccagcctgtcatcgcccgcatcaccagccggtcggcgcggatgcttgacctgaagcccggccagtcggcctttgccgtcatcaagacggtcagtttcgatcccgacagcacgacgcgcggcatcacgatctgagcatacgtactcattagcctcaggcaggctgtgcacacgcgccttgtttttcctgcttcgagcgaagataaggacggtagggcagtgcgtgtcgcgtcatgcgatgcgccttgagttcttgtttttcgcatgtcggtatccagaaaccggatccactttcgggcgacatgtttcagactgagaggcgacagtgccgtcactgagcttgcgggtaaatctcgaccccgatggtcgcatcggaccgggtaagattgaactccttgagcagattgccgccttcggctcgatctcggctggcgcgcgccagatgaacatgtcctacaaacatgcctgggatctggtcgaggaaatgaacaagctgttcggcaagccggtggttgcagcccagaccggcggcaagcgcggcggcggcgcccagctcacgccggtcgggcttgccatagtgagccggtttcgtgcgatcgaacgtgccgccgcctcggcggccgaacagcatctcgccgcgctccaggccgagatcgtgtcgggttgatcggcgggcccgaagtatctcactgcatataaggcaagggtcctccgggctgaggcgtggtcagcttctggcgagcggcggggatgcggccaggcccagccgatagctgcgccaggccgaatgcacgaagccggctgccgtgagcccccacacggcaagcgcaatccacaccatggcgaatgacacgctttgcagcggcgggaaatcggccgccagcgccagccggcgcgtcgccagcgcatacatgccgagcggaaacaccaggctccacagcatcggcgtgtagacgatcggcacccggtaggcgatgtgcttccatacgcccagcactaccagcagcgggatccaccacgtcgcccagccccacatcagcagggtcacgccgtcgataaaggggcgcatggaggcgaggaaaggcatgtcgctatccgtcagtatcagtgccgagccggcattggtgctgatagccgccgcacccatcaccacccagagtaacggcgtgatgtcgtcaggctccacatcgaggaagaagatgcggtgggcaaacagcacgatgaatatggcatagagtccgaggcccacgccccacagcacatggatgagcacaaagacaagcggacccgtctggccgagcgcgggcgcgaccaccgtaccgagcacgaccagcgattccgtgccgacgatggcgatcagccacccgccatggacgacattggcgccctgtgtgctgttgaggaaaatcaatacgccgaaactgaaatagatcagcgctagccaggctgcgaaggcaaacagccacaggaaaagcacggccgtctcgccgccgcgcagggcgacacctgccccgaagacatcggtgccggccacgatgctgaagaaggagaagactaggcgcggattgacgagatcggaccaaagcaatgtccggaaccgaaggaggcgcagcagggtaaagccaatcaggacgggataggcgaccagattgacgaagaaaagaatatccgacagcagccggtattgctcatgaaagagcgcgttggagatgatgccggtcgccatgaccagcgcaaagcagccgggatagagcgcggcgatctggccatccagccacccggcaaggctcgtcaatggccggctgctggtattcatttgcattgtccccatggcggttcgagcccaatggcggatgatttaccaaggcatcgggctttgcttgcgcgctccctcttgccaaagatgcacgagaatgtcagcccgctctttggcgcatgaatgaggagaagccgtcatgtcctttgccaagctcgacgaactcggccgcaagctggaagcgctggaacatgcgctggccattctgggcgcagacgaggcgacccacatggcggtgggcggcggcgagaagcgcgccgaggcgatggctgccctggccggaatgcatcatgcccgcgccaccgcacccgaaatcgccgactggatcgaggcggctgaaaacgaggcgctggacgaagagcaacaagtggcactgcgcgaattcaggcgccactacaccaatctgacctgcctgccggtggagttcgtcgagcgccagaccacgacacgcctgcgctgtgagcagctttggcgtgacctgcgcgccaagaatgactggagcggtttcctgcccgcgctcgaaggcgtggtggcgctggtgcgcgaagaggcggcgatgcgagccgaggttcttcacctcgacccctacgatgcgctgatg

SEQ ID NO: 3020 - DNA, 23291 bp, synthetic construct
  source 1..23291: mol_type = other DNA
  misc_feature 1..23291: note = Synthetic
ttgacaggttcagtttgccaatcaggtctgaacgtcttggaaagagagcgtctgccgccatgcctttgggtcggcgctcgacacctgccccgccattatagaaattcaccacaccccgcagattgggcaggatgccattatgcatatagggcgcagatttgctgacatggcgaaggcttggcgtgcgaaaccgccccagatcatcatccagaccggtcaccagatatcgccctcgatcttcaagcttgcgaccgaaaaatgtcaggccgagattgtgaaatttctcatcgttcaagagcgggccggaatggcaattcatgcagcgggccttggtgcgaaacagatgcaagccatgcacttgctggtcggagagcaatttatgcttgccttccagaaagcggtcgaaccggcttgggcgctccagttggcgttggaagtctgccaatgcctcgaccacctgatccagcttgactccctccttgccaaaagctgcctcaaacaagctcggataggtctcatgcacattcagccgcgccagcatctcgtccaaatcggctgccatctccaccgggttggtcaatgggccaatcgcctgactttccagactgtctgcgcgaccatcccaaaagagatgcacctgataagcagaagtgatcaccgctggcgcattgcggttgcccaattggcgcttgtcgccaaagggccgccgcaatccatccccccagcccaactcgcggttatggcaggactgacaggcaatttgcctgctgcctgacaggatcggatcttcgaacaagcgcttgccgagctgaacccgcttctcttccatgctgccttttggcggccttggaaggcgtttcaaaatcccaaggggcagagggttcacgccgtctgccacctctgcctttggccagtcagagacagggccttgataaagacgacgaagctcggtcagatcaagcctgccagatttggcgacagagatctccgctgccaaggatacaagaccgatcagcagacttgatagaacatgtctcgacacaaaaagcataagccagatccgatacctgtgtgagttggattgaaacgacaaagcaggccccgctcttcagaacagaacccgctgatatcgcctataaattcggcttagaagctggctttcagaccaagccaggcagttctgccctgcttgaagggatagctgttactagccgttgaattgccctgggtggagaaaagattgtccaccttgaaatccagcacggcacccaaatcaccctccttgtagagctgataagatccgccgacatccacggtcacaaccgcgcccagggtcttgtcggcatacacatcatgagagaccacggctccgaactggttggtttgcgaggtgtttttgcgggtgtcataaacgccctcataggcaagggagaaattggcgttggaccacaatttcaaccgctcatcaaagaaggagccatggaacgcaaccgatccccgcaccggaatatccagattgccggtcacagcatcaaattcatgcacggaataggagcgccccttgtaccagatgaatctatccgttggttcagcggaaaaataaccgttggtcgagcgatgctgttccgaccaggtcagtgccgtcttgatgccaaagctgttcatctggaagagattcaagtccttccattccttggcatattccacggtggcagagcgatattggctcgatgcgtcattgccaagtttataaagcttggaggtggaatcctgagttttggaatattgatccttcccctgtctttccagcaagctcaggcggaatgtcccatccagaagcggatccttgatttccaccccaccggtcaattcatcggtaaaaggcgttttcaaattcgcatccttgaactgcgtgcgggtataggtgcccgctgcagtccagcctccggccgcatgggcgttgctcactaccccaccattcacagcacgggtataggccagcacgtccgggcgctgatcagccatggcataagccagcatggaattggaatgatagcggttcacgccagcactcagggtcacccgatcatcaaacagggccagcttggctttcagacgcggatccagatcgatattcttggaataatcattgtaattgacgcgaaaaccgggggtcagggtaaagtcacccgtcttgatttcaaactcgccccaaatatcggactggaacagattgacctgggccttgtatgccctcagataggttttacggctggtgaactggtcattgtcaaagcaaagcggatcattgggatcggcgcaggtgaaattaccaccactttgatcacgagatctaaggcctgcatcgttaaatttggtgctggtgaaaaaattcacatcatcgggacgatgacgatcagcagtgatgaagcgcacagatgccccaccacgtactttgatattgcccacttcagcaccggccttgaacttggcttcggcttttttctcgctctgcagcaaatcacccatgccaccccaactacaggacaattgatcctcaccggcgacatcctgacatttgtcggacaggctcgggctcagataggaatgaccattataggtcttcttgatataggacgtgaccatggtcgacgacttctcatcgcgtcctttttcggatgtattgtaagccgcgtgcatggtcaggttaacattgttgaacagaccgatctgctcaaatgttctgtcaaaatcaaccttggatgaggtgccattgccaaccagcgtcagcccgtcatgaagcgtgcggtaggattcccaatcattgttgtagaaatcatgcatatgctggaaggtgagctgaccccaatccttttccagaaccgcctttgccagaagcgatgtatgattggtcttcagattgacctgatcgggcttatattgcggatcccgctgacgcgaggtgctggcaaaacggttggacaccgagaacatgaccgccagatcaggactgatcggaccgcttacagaagccgcagcgttatatttcttgaaatcaatcggctttcggttcagcgggttcgtaccgtctggcgtcgcaacgataaactgtgccatatcgctgttattgcccgaaaattcgacagatcccccccatttttcacgcttgggggcacgggtctggaactcaaccaccccaccttgaaaccccccatattcggcagaaacattggaatcctgcacttccattttttcgactattgcagcaggcacataaatggtctgcggatgcaggctatagaggctgtcaaaggccggatagaagcgatcagtcagcgtactggtcgactgctccgtaccagaacccaccgcattgataccgaccccatcaagcacgaaattattcgaattgacatccccgccagaaatggagaattgctgcggacgcaaatccaccacactttccggggtcatgccggccttggtgcttgtatgatcagcatattgcacattgggcagggctttcagcacagcattggcatcgcccgtcgccccgcccaaaatcttcagcgcctcctcattcagcacagtcttgcccacatccccttcatccccaaagacacgatcaaagccttctccattctcgccaatcacgataatggggcgcaagcgtgtctcatcgctgttcgcgtcttgcgccaaagcaggcattcccaagactgtagaacccaatagaagcgcggacatgcgccccaatgctgattgtttcatgcctcaaatcccgttttatcttgttatttgtacgggcgtatttaaaacatgagtctttaatggcacaatattaatatgaatatattactcatattttagaaatggatttggataaatgtgaacaaatccacgactacctccattcccaccccacccccatttgccaaaaccgcaacagatgcggcaggtgcgcgatgttagggtgatgactggttccaacagcgaacgagtcgaaatctgtgccttctccatcacccaatcaaacatcagcccaaccagcagacaaaacatcagagcaagagccacaaaacaccgccgaagaagagctgatcgagcaggcagcagtctgcgagtttgacccgcagctctgggccaactttgcctgggattggggtcttgggccgctggcggacaagcgcgtgcgcggctggcagcgcgatgtgaacctgcgcatcaaacagcatctggcagagcccaccagccgctatcaaccgctacaaatcgccattgcatcgggccatggcatcggcaaatcagcacagatgggcatgctcgccaattgggccatgtcctgctattccaatgccaaggtggtggtcacggccaataccggcgaccagctgaccaccaagaccagccctgaaatcaccaaatggttcaaatcatcgatcaccgcccactggttcgaatatgcctcgctgtccatcaaatccaaggacaagagcaacaaggacaattggcggctggatttcaacacatggtccgagaacaacaccgaggcctttgccggtctgcataacgagggcaacatcatcctgctcttgatggatgaggcctcgaacatccccgatgtcatctgggaagtggccgaaggcgcgctgaccgacgagaagaccgtcatcatctgggtggcctttggcaaccccacgcgcaatatcggccgctttcgcgaatgctttcgcaaatatcgcaaattctggcacacccgccagatcgacagccgcaatgtcgaaggcacaaacaagacgttccttaaacaactcatccagaaatatggcgaagacagcgacatcgccaaggtaagggtcagaggcatgttcccatccagcgccagccatcaatatatctcgaccgatctggtggacgccgccgccaaggtgcatctgcgatccgatcaatatgactttgcaccaaagatcatcggcgtcgacccggcctggaccggcgaggacgaattcgtcatctatttccgtcaggggctctattccaagctgctggccacctttgagaaaaacgacaatgacgtggtcatggcccagcatatcctgcgctatgagaaagagctgggggccgatgccgtcttcatcgatggcggccatggcacggggctctattccatcggccagacatggaaccgcgactggcggctgatctggttttccggcgaaagctccgaccccggctgtttgaacaagcgcatggaaatctggcaggcgggccgccaatggctgatggatggcggcgccatagacccaaaagacgagatgctctatcaggatctgatcgggccagagctgaaaccccgcaccgatggcaagctgcagctggaagcaaaggacgagatgaagaagcgcggcatcccctcacccaaccgggccgatgcgctcttcctcaccttcgcccaaccggtcatgcccaaagccaaacgcctgggcaccgacgagcaaacctgcgacgatggcaaacataatccttatggttagaagtcccgcgccaagccctctccccctcccaagccacccgtcatggtaccctagtgggcggttgggagggggagagggctggacatgctgcttaaaagtctcatcaagagacttttaaatcgagcacaaatgagtgattagaagttcaacctacagccagttttcaggcttccgcccgccatagaccacggccacaatgaacaccccataggactttggctcataaatggcgatgtagctcccctcaatgagaaggcgagcagtctggctcagctcaggccgtggggtccccatcttgggttggccggcagcaagttcgaacttgtcgaagagacgataaacaagcgcatctgctgcgggctcgttatcttgcgcaatgtcgcgccaaatgtcgcaaatgtcttgctctgcacgagggctcaggccgtagacttataaatgcggtgaatttggtagaggcaagtttttctgctcacaaggaggaagagcgaagacaatgtggttcattttcaagttcttacgacgtggtgagcagaaaaaatcgccctatccttcggacgacaaaatggtcaagacctggcgtcggcaaagagcttgaatgggtaacaatgcccatccttcactctttttctagccatatcagaccattttgacgccaaatccagctcatttatgaggctacggcctcaaatattcactcaccggcttttggcttccgccttcaagtctgccagcaaggtatcggcatcgacagtacggccttcaccgcttgccatgccatcctcataggcctgtttcagatgcgccatttcgattttgcgcagctcttgtcgttgctcccacaagcgcaatgcatcacgcaccacttcgctattggacgcgtaagagccagattcaacggcatcatgcaaccgcgccacctgctgcggagacaaggagacactaagggttttcataggttctgttttcatatctataatatggcactcctaacaagaactaacaagatctaataggatgctcttgcccgccccaccactcgccacactcaaaagctgtgctatgctgacttcattactgttacgtcattttgcttgggagggatcggacatgagaaagaacataacttggccctacactttgctgggcagcctgctggccatctttgccctcagttccttccctgcctctgccgatatggcaaaggtcgatgaggtcatccggttcgatctgccccgcgcaccgctgacgcccatgcaacaaaaacaattgccggaaggcgcgcaaaatctggatccgggcagctttgaaggccgatacagacatcccggcggcaacgacaaaaagcctgcccttgtggtgatcagaacctgccacgacgccagctattatgatgcctggctcgaccgtctgaatgactggggctttgcgacgctcaccttctcccgctgccaaccaccaagctttgagccggacgacgccaccatccccgccttcgattggaaaagagggtccctcgccgccattggcgcgctgaattttctggcagaaaagccagagatcgacgccaaaaagatcggcatcctgtcctggtcacgtctgggcatgatcccgctgtccattttgaattatgaaggcttcgcccaattcttcccgcataaattctcagccggagtggcgctctatcccttctgctcctttgcccgcggcccccatggcgggccaatcctgatcatcgctggcgccaaggatagctggatcgacaacacagtctgcaatcgtgtggagcgggtctcccgtcaggatgacttccccgtctccctcatcatgctggagaatgcgacccatggcttcgacatcccgcaattcggcccacccaaacaggtcactagatcccaaataaacccagacggcttcgccgctggcggcggcatcttaggccatgacaaagcatctgagacccgcgccatcaaagaagtcaaagccttcttggagaagcatttgcggtgatgagaggtgtggttttatgagtaaggaacacgatgatggaagcggcagagctttaaaaccaaaaacctgtcccaatcaaacaatcaagcaacacagaacctggacaaaatctcttcagctcagcctggacaccaacctaaaaataagtcattattacaaatacttgctaagtctcaatgctaatttttttttgagagttatgctcatcagatagagcctgcactgccagatcggaacaagaaataatatcttccagctcacggatcgccaaaatgaaaatattatcaatttctccggttatgtccgcaaaaagcaaaagaaaaaaccgagtcaatgaacgcgtttgtagacacgcacgccattttttcccgccaagaaatggaaaaatatctttactttccattatcttgacagaacagctattgtagcagatcagaaaacacggtccagccgcaacgacgaatgcattgcgctggtaaacccagccattgtagcagatcagaaaacacggtccagccgcaacaccaaaaatgaggtaataaatgtgcaaatcattgtagcagatcagaaaacacggtccagccgcaacaccgttccccatttaagtgttagacttcctattgtagcagatcagaaaacacggtccagccgcaacctgtaatggttgcgccggaagtacctgcttattgtagcagatcagaaaacacggtccagccgcaacaaacaaacggagtggttggtgacaagttcgaattgtagcagatcagaaaacacggtccagccgcaactgacaagtgcggcggagcatccccaatagtattgtagcagatcagaaaacacggtccagccgcaacgtattcacattcggaatgcgaacttgcgagattgtagcagatcagaaaacacggtccagccgcaacgcaggagcgccgccagagccagctccatctattgtagcagatcagaaaacacggtccagccgcaacggcaatgtgagcatcaacagatcagaccataatcgtagcagatcagaaaacacggtccagccgcaacaacttggccaatgccttttgcgccatcctgattgtagcagatcagaaaacacggtccagccgcaacaaccaaagtaccatcatctaggagattaggattgtagcagatcagaaaacacggtccagccgcaacacagaatacaatgcgtttgctcgctgctgcattgtagcagatcagaaaacacggtccagccgcaaccttacgggaaagcgcccctttttttatcaaattgtagcagatcagaaaacacggtccagccgcaacgaaggaaagcaaaagcatattcctgcgaatattgtagcagatcagaaaacacggtccagccgcaacgacggactatcatggttgatctggacccgcattgtagcagatcagaaaacacggtccagccgcaacgcccagataaccgccttggtcagatggatcattgtagcagatcagaaaacacggtccagccgcaactcaacgcgtaaaccagtcataaggatctgaattgtagcagatcagaaaacacggtccagccgcaactaaagaaccaatctactgccgatccttcccattgtagcagatcagaaaacacggtccagccgcaacaggatccattgataatcgtgcaaccttgacattgtagcagatcagaaaacacggtccagccgcaacacatcaaaatgacgggccggtataatcgcgattgtagcagatcagaaaacacggtccagccgcaacgcagagacgaaggcagaaaaaacagagggaattgtagcagatcagaaaacacggtccagccgcaacgcggtgctaccaatatggggattacccattattgtagcagatcagaaaacacggtccagccgcaactgaagggccgaagtaaccccgttgcgccttgattgtagcagatcagaaaacacggtccagccgcaaccaacctgaccctgatccagaacactcatcaattgtagcagatcagaaaacacggtccagccgcaactcaccacccccagcaccctcacctggtggcattgtagcagatcagaaaacacggtccaaccgcaacatgatgccgcccatgacattgtaatggcggattgtagcagatcagaaaacacggtccaaccgcaacacgcgatcctcaagagcctttgcagccaagattgtagcagatcagaaaacacggtccaaccgcaactcatttcctcttcaaagcttttggcctcatattgtagcagatcagaaaacagatcgtcaccacaaaacaaaaagccgttcccggaggaacggccttatttggtgcttcttagcttgttaacggccagacgcgtgttttctgatctaaaatcaaatacaagttgcattattctgttcatcccgtcaagaataaaagaaaatggcaaggcgagaaaatgcaacccaaactcttctctttcgatatcggcagcacgtctattggctggtgtgtttttggcctcaatgccaagggtgagccggacaagattctggatatgggaacccgcatcttctcagacggacgcgagccaaaatccgaggcatcactggcagaaggacggcgactggcgcgggcggcctctcgcatgcgcgacaggtataaacgccgccgcaaaacaaccctacgcacactgatcgagttcggcttgatgccagcggataaacaggcacaagaggccctgctgcgcgagaccggagacagaaaaaaagacagcggtgaggacagcgcaaacccttatgctttacgggcacaggcgctggaccggcaattgccacctgcctatattggccgggctttgtttcatctgggtcagcggcgcgggttcaaatccaaccgcaagacagaccggcgcgacaatgaccagggcaaaattgccattggcattgccgaactgattgccaccatggaccgggacggagccagaacctacggcgaatggctggcccggcgtcgccagaatgggcaagtggtccgccttcggatggattccgaaatcttcaacgacaccaattacagtttttaccccgagcgcagcctgctggaaaaagaattccacgcaatttgggacgcacaatccgcctattatccagatctgatgagtgaagaccgacgagactttctgttcaatgtgatcttttatcagcgcccgctgaagaaaccgctcgttggcaaatgtgctttcaacccggcagaaacacgcattgcaaaagcacatccactgtttcaagaattccggctctataaagaggtcaacgagctggagctggtacaaccggatctaagtcataaaaagctgacgctagaccagcgcaatgcgcttattcgtcatttacgcagcaagcgcgaggtcagctttagcagtctgcgccgcacgctcaagctgccgccaaatattcatttcaacaaggaaagtgaaagccgcaagaagctgaagggcgatgagatctatgcggccatgactgacaaaaaacactttggcaccaaatgggcaaacatgacgcaagatgagcaatggcagattgtccaaaagctaaaggatgagcaagatccgcttgcactgtatgactggctggacaagacccacaatttacaaggagaacaggccgaagccattgccactcatccgcttccagatggctatggccggttgggcgaaaccgccttgtccagcatgctcgatgaactgaaaagcacggttatcccggaagcggaagctgctaaaaattgcggctatgaccatgcccttgccggggcaggtagcgacgaaggcgaggaaaccttaccgccctatcaggaaatattggagcgccatattccccccggctctggcaatccggaagatctctatgacatttataaaggccgcatcaccaacccgaccgtgcatatcgggctgaaccagctaagacggctggccaatcggctgatcaggcaccacggcaagccacgcttcatggcggtggagctggcccgtgagctacaattgtctgacaaacaaaaagacacgattagaaaaaccatcacccaaaatacgcgtgcagcagaaaagcgctcacaaaaaatccaggacttgcgcgaaggcaattcccatttcaaggccctcgtcgacaatggctataaccgactgttactcaaattgtgggaagaacttaaccccgacaatcccgaagacagatgctgcatctataccggcaagccaatcagcccttccatgctgttttccggcgcagtagatatcgaccatatcctgccatggtcaaaaacccttgatgacagccaagccaacaagattgtctgcatcagacatgccaatagcgaaaagcgcaatcaggctccggcagacgtggttcaatggcaggaccattatgaccaaattctggcccgcgttgcccgcttacccaaaaacaagcaatggcgctttgctaccaatgccatggaaaaggtcgagcaaagtgatggcattccagcccgccatcttggcgacacccaatatctatcacgcatggcacgtgaatatatggaatgcctatatccgattgaggagccggatgagcacggagagctaaaaaaacgtcagcatatacgcacctcccccggacgcctgaccgagatgctgcgccgcaattgggggctgaacggtctgctgcctgacagcaaccttggcggcatggcgcaggagaaaaaccgtaaggaccaccggcatcacgccattgatgccgcagtggtgggcgttaccacaccacgcttgctaaaacgcatatccgatgcagcaggccgtatggaagcgcaacagctggaaaatctggtcgccaaaatcgtgtcagaaaccttgccatgggacggcttccgcgacgatctgcaaaaagcagtcaatgccatcattgtcagccacaagccagaccatggcacagtctcgcgctccggggtggcgcaagggcgaggccaaaccgcagggaaactgcataatgaaacagcctatggccctggcaccagctccgacggcaagcccatagcggtgcatcgcaaacccttcatgtccatacagtcaaaagacatcccctctattcgtgacgaactgctgcgtgaaaggctgttttccgtcctggacggcaagactgacaaaaaggcccgcgagcaggccttgctggatttcagacagaatgacccacaattcaaaggcattcgccgggtgcgcattgccgaaacgctctctctcatccctgttcgggataaaaacggcaaaatctacaagggctttaagggcaattccaactatcgctatgacgtctgggaaacgctggacaacaaatggcactgcgaagtgatatctatgtttgatattcaccagcaaggctggcaatcagagtttcataaaaaacatcccactgcccgccgtgtgctgagcctgaaaaaagacgacatggtggcctatgaacacccgatcgatggatatgtcattggcagggttgttaaatttgttgcagacgggcgcatctattttgcaaatcacaaagagagcggcagcctgaaatctcgagatacagacaaaaatgatccgttcaaatatctcgaaagaagagcatctggcctgcaaaaaataaagtgccgccaggtacgaatagatgaaaccggccgcatttcagaccccggcccccgcgaccgtctatcccgtcaaaagcagggttagctcaatccgaaagcaagtgcagcattaaccagaatatatagttatagttgcaaaaatccgactcatgatagaaaaattgcatcatgaaccggattgtagacatctcgacagatggtctctacctgtctgtccatcgcggctttctcaccatttccaaatctggcgaggaaataggccgcgttgcctttgatgatattggtggtgtcatcattcacgcccatggcaccagttggaccaatcaggttttccttcgcctttccgaacgcaatattccagcagtattatgcggccccaatcatgcgcctgtctcagttgtctggccactgtccggccaccacgcgcaaggagcgcggcttcgctcacagataggcgcccctaaaccgctacaaaaacagatgtggcaaaaaattgtcgccgccaaaattcgcatgcaaggcaaagtgcttgaagcaaatggcaaagagtcgggcgcatttgaaaccttggcgcgcaaggtacgctctggcgatccgcaaaatatcgaggcgcaagctgctcggcgctattggaaagctctgcttgggccagacttctcccgcgatcaagatgcatcaggggccaatgccctgctcaattacggctatacggtgctgcgtgccattgtctcgcgctccatatgtgccgctggtctgcacccggggctgggcattttccactccaatcgtgccaatgcctttgctctggctgatgatctgatggaaccctatcgaccattggtcgatcagatcgtggtcaatcttcaagccagcgggcaaaatgagattaccccagtgacaaaactggccctcacctccatttccaccttcgatctgcaaagcggcccgggcatatctcctttgtctgtacaagtgacccgttttctgcattccgtggccaatggttttgaaacagggtcagccgagctggaattccccacaccgccatcagctttagagcttgccagcttggggcgggaattgagtgaggagccgtcatgacagccttcgaaaagaaagcaaataatggtgcaacccatttaagcggatatcaaatcatgtggatgcttgtcacgtttgacctgccggtagaaaccaaaaaacagcgcacggccgcgacaaaatttcgagaattcctgctggacatcggcttcgaaatgagtcaactttccaattacttacgcttttgcagcggcaaggaacaatttgaaagttatgtccgccaaatagagcgtgcattgcccgaatggggcaacatttacatcttccagtttacggaccgccaatatgaaaatattgtacgtttttccgatcaggcccgaagaaaacaaaagaaaagtccgaatcaactggcgcttttctagctccgcacgccattttttccggcaagaagtggaaaattctcattattttccagcaacttgacagagaagctattttagcagatcagaaaacacggtccagccgcaacataccattcgcggtatctgaccattgctccattttagcagatcagaaaacacggtccagccgcaacgggatcttgcccagctcaagcgcggtgccaattttagcagatcagaaaacacggtccagccgcaacgagcttcttatgaacgacgtcaatttgacaattttagcagatcagaaaacacggtccagccgcaacaagggcgcgaactgatagctaaagatacacattttagcagatcagaaaacacggtccagccgcaaccgaagatcaactagggatatatcgccatcaattttagcagatcagaaaacacggtccagccgcaacgagcattgtttacgaaacagattcctctatattttagcagatcagaaaacacggtccagccgcaacgtcagcattccgacattgcgcattgccacgattttagcagatcagaaaacacggtccagccgcaacggtgcttagtccgcagccagttttctgcggattttagcagatcagaaaacacggtccagccgcaactcacacgtcctcgcgctgctgcacgctctgattttagcagatcagaaaacacggtccagccgcaacggaaccgtatccgcgttcaccgcatacccaattttagcagatcagaaaacacggtccagccgcaaccagatcatcactgctggcggtggtgcattgattttagcagatcagaaaacacggtccagccgcaacaccaaacagatccgaaacacaatcccgcatattttagcagatcagaaaacacggcccagccgcaaccccggccgggcatcggtgagatttatataaagtgtagcaggtccaatccctccccactattaaccagtcccatttacgttaatcgcaatatttataggaaatgactacggcatttgggatggttgggaagagcagaaccccatcaagactatgctgatcagcccctacccaaacaccaccagacagagaatgctggtggtgatcagggctatgccggtgatctcctttcgggtgatgacctcgcgaaagaacagcgccgaagctacgagtgagaagatcacctcgatctggccgacggcaaagacataggcggcattttgcagcgtgaaggccgtgaaccagcagagcgagcccgccataccggtgatgcccatccagacggccgtctttcgcgccgcaaccacccgcaagatctcgcccggctcgcgcagcttcagccacaccatcatgcccagcgtctggccgatggtcaccagcatcagggacatgctggagcgatagagcggatcggcattgaggatttccagcgtcgccccgcgataaccaacggcggaaaaagcaaagaagatgccggacagaatgcccagaccactgcccgcattgacaatgccagacaggaaagagccattcacatcgcccggcttttgcgacagaaccaagaccccaagcaggccaagaaagatggcaatgaaaccggtcagcgagatggtgtcacccagaatgatcaacccgacaaaagcggtcagcagaacctctgtcttcttgaaggtgatgcccacggcaaaattgcgctgctgaaacaaagccacgacgcaccatgtcgccaaaatctgcgacagcccaccgataatggcatagagccagaacataccgctcaagtccggcacgccatggcccttgatcagcgcatagccaatggccagcacagagatgaaaggcaccgaatagaagaagcgcgaaaaggtcgaaccgccggtcgacagcgtccccatgctcaactgcttttgcaacatgaagcgaagcgtctgaaacgccgccgccgcaacggcaatgaagacccaactttccatcaggaacacccaatctcaattcttgaaggcagatggcaagacccgccacccaaagacatgcaatcatagtcattgcgatgcgaaagcaaagggcaaaagaaagtttgtacggcagctgacatcttctgataaactgcgtgtatcacgaagaatttcaacatttgattgaataggagtgatcatgccattttatccatccattcgaaaaatgcctttggacatgaaaacacgcacgcttggcggactggcccggctgcgtgagcaacttgatgaagaaattccaaaccgcaaagtcaccgagactctcttgcttggcacctggaatatccgaaattttgacgatgaccgtttcaacaatggtcaccgcaccacagaagacttcttttatattgccgaaatcatatcccgttttgacatcatcgcagtgcaggagctttgcgaagatattgcaccactcgataaagtgatgaaactgctgggccggaactatcgctatattgtttccgatgtcacggagggtcgcccgggcaacaaggagcgcctggccttcatctatgatgaagacaaggtcagctttcgaggaatgaccggtgagctggtccttccggacaagatgcaaatcattgatggcgaaggggacaaggaaaagcgccgccaattctctcgcacgcccttcatggccgccttccaaagcggttggttcaagttcattctcacgaccgtgcatatctatttcggggaaaattcgggcccgaaatacgaacgccgcgtgaaggaaatccgaactgttgcgaaattcctgtccaagcgggcagatcgggacgtgaacaaaaaagagctcggcagtcatatccttgtgggggatttcaatatcaaacgcgagggaagccccggcgacgaagccctggaagaagaaggcttcacgatctttcgaaatcgagaggggaccaataaggatcagaacagattttatgatcagatttccttcaaatcaaaggaaaatcaggtccagctcgccaccgatggcagccacggggtcttgcagttttttgacagcatttaccgggcaactgattttgacagctaccgcatcgaattgctgaaatcggtacgcgtaaaaataaaggatttcaaacgcgaaaagaaatctgccgaggagcgaaaagcccgtgcaagaactgaagaaaccaagtcaaaagcagaagagaaaattcaaaagaaactcgatgagattgcagaatggacacagcttctaaccaatgatgacaaactcaagaaatactatctgtcaacatggcgcacattccgggcaagcgatcatctgccactttgggtcgagctgaaaattgatttctccgacgaatatctcaaaaatctgacggattagaacatggactcataaagcacttctcacaattgttgaatcgcgagaggttcttcaactctatgatttgaaacgtgttcccgagaaatgcttcaatttttcgggaacacgctgtagcaaagatctcttcccaagtgcccgcttcgatgcatcgcccttacaaacccgcctcaccgcccggacgatccatcatgagaccagacagatgcgattgccgcttcaaaaggaaagcccaaagaagctctggatagttggcagcaacagcagactgaacggagggtcgtgccgtcagcgcagcgcgccaggactgcaccttcggcttgtctgtcaaaattccaaaatcaccaatctggtcgaacacatcgaaatatcgaaagaccggcccaaagaccgcatcaaccaggctgaatgcacttccctcaaaatatggcccctcccccaattgcgtctcaagttgagagaacttcgcccgtaaggactggatcttggcctcgaacacatccttgtccttggtgccataaaagccagctatgtcattgaggacggatgagccaaactcgatccatccccgatgctgcgcacgcaatagcggatctgatgggtgcagcggatggggctgcgtctcttcaagatattccaggattgccgatgattcaaagatcgattggtcattgtcagtcaaaaccggtgtcttgcccaagggagagatggcaagaaaccaatcaggcttgttcgccagatcgatatctgtgcgctcaaaggccacccctttctcggtcatggagatggaagcccgttgaacataggggcaaagcgcgtggcttgtaagatgaagggtcattttgaattccttatgtcgatgcaactgcatctacattaatcaattttctctccttgtcaaggttgatgcagctgcatcgatatgcataatgtgagcgatgacctatccaaaacctgaaacaatcgctgtctggacctccctggtatctgccaacaagatattgctggacgacatcgaagatgccctgaaaagtgagggactcccgacgcttcactggtatgatctgcttctggaaatcgaaaaggcgggcgaagatggcatccgcccgttcgagctgcgaaagcgccttctgctgccgcaatatggcgtgtcgagacttttggaaagaatggcaaaggcaggcctgatcaaccgacaggatgtcgaagatgacggtcgcggacatatcatcacgctcacgcaaaaaggacaggaaacgagaaaggccatgtggcctgtctatgccggtgtgctggcccaatccatcgagcagcgctttacagaatcggagactgccgaatttgcacaccttctgaaaaagctcacccctcttggaaatatatgagccccacgcaagaaaacgggaaagctctcaaaccggatcatggagagatcaagatggctggatatgtcttgcatcattataacattctggatgtcaccagaattgacgaactgggcccattgaccttgcccatcgcaaaaaaatacggtgcggaaatcatgattgccagcccggccaaggcactgaaaggaaagacggaccattcgcacatggtcgtctataaactcaaaagctttgatgccgccctggccttctaccattcccccgaattggctgagctggccgagtttcgagaccaggtcatcgagggcttttcaatggtcctgcccggccatgaagaaaccgaggcagttgtcacatcaggatatttcctaccctcccaaacaaatgaggaaaaacaagaaattacgtatcgaaaatagatctttatcacagaatattatcgtaaagcatcatatttgaatcactattttgaatttactttaagtttcaaaattgatacattaaataagatttacaatttaatgcattgaaaatgaggcattaaatgccatcaaaaaaaccaatcagcctattggccgaggagctgggcgagcgcctttccagctatcgcctctctcgaaatcttcgccagaaagatgtggccgaccgcagtggcatctctcgcggggcaattgcccgcattgaagcgggcaaaggcggcacaatcgacagtctcctgaggatcatgcaggcactcgatgtcgaggatcgcatcgagatgctgctaccggacgccagtctcagcccactggacccacgaagcgaaattggcccgcgtcagcgcgccagaactggctcgaccgaaaagcccgcaaaggaaccatggagctggggtgagtaatggcaacacgcgcagatatatatctttggggtcgccgggtcggggcggtcctgtgggacgagcgccgctcgattggcacattcgaatatgaaccatctttcctgaattcacatatcgagatcgcccccttgacgctccccttgcgttctggtccgttcgattttccatcccttccctttggcaccttccatggtttaccgggattgctggcagacagtcttcctgaccgcttcggaaacacattgatcaaccgttggcttgccgagctggggcgcccggcaaacagcatggatccggtcgagcgccttctctataccgggcgccgtggcatgggtgcactggaattcgaacccgcgacaggactgcgccgcgaggaaggtgcaccagtagacattgccccattggtggaactggcaaaccgtgtgctgaatgagcgcaaggaactgtcaggcgtcatgaccggcaagaaccagcaagaggcccttgccgagattcttcgggtcggaacgtctgccggtggcgcgcgcgccaaggcagtcctcgcctggaacgaagagaccggggacttccattccggccagctcaaggctggcccgggatatacccaatggcttttcaagtttgacggcgtcgcgaaaagcggcgaccatggccttgcggaccctcaaggcttcggacggctcgaatttgcctgttatcgcctcgccaccgaggccggcgtcaagatgatgcgctctcgcctccatcatgaaggtggccgcgcgcatttcatgacccagcgatttgatcgggaaggctctaaagacacgggacagagtgagaaactgcacatgctttcgcttggagcactgcgccatttcgacttcaatctgccaagaggctattcctatgaacaagcgctggaaacaatccggcagctcggactgggacgagacacgctggaagaaatggtgcgccgcgctttcaccaacgtggtcatccgcaatcaggatgaccatgtcaagaatatcgccttcctgatggacaaggccgggacatggaggctcgcaccagcttatgacgtcgtctatgcccacaatccggcaggagattggacaaatgctcaccagatgacaatcaacggaaaatccgacgatttcacactcgacgatttgctccagctcggcaaaatggcggatttgaaacctcgccaaaccgaagagatcttgagagacgttgaagccgctgcaagccgatggaatgaattctcggaagaggcagatattcccgccagcctcgcaaagggtgcccgggctggtttccggttcttcctgagtgcctgatttccaaataagcatcgaagatgtgctggagcatcatgttgaaggccatcaccgccacaatttctgcgacgccatgcatggctcggcttttaccgagtaggtcagggcctaaaacaaaaaacgccccgccggctgcatggcggggcgtcgtcctggtcgtctacccatcctgctattcattcgcctcgggcggcaggaaatcgacgtcatgctcggcagaaattctcaccacggcctcaacgtcggtcagctcatgcagctcgtcgaacagctctttcagcttccccgctggcgagacccagaagagcgcttttgccggtttgtcagatttgttgaaatagccatgggggacgcccttgggcatgcgcacaagatcgcccgccttggccttggtccagacgccatccagtttcagatccagcacaccttcctgcacaaggatgaactcgtcctgggttggatgaatgtgcaccggcacaaactggcccggctcggaattggtttcaaaggcaaaggtcgtttcgcaccatgccttggtgtagtaagtctggccaaggatattcagctttgttccttcgccctctttggtgatgccaccttctaattctggcattgtctttcctcccttaaaaattatcttaccctgcctgatattgcggacaggacgccaaaaagtccccataggccttatggtctggatatccgaattgctcggccagtggattggatcgcttcgttttgccagcgcccatatctgtaagcagctcatcgaaatgcttgaaatggaaaggcgcagaacacaggccgccataaatctgcgcggcggggcgctcatggcgtttccagtgcaacatcatctcgatattgtcattcatcgcagctgcatcgggctgattggccaattgcccatccgcatagcgcaccagccagtttgcaattagttcggcagacagcacggtgcagaaggaggaattgaagccaacaaaacccatgtccggcagatcaggattgaccgacagtcggtaggcgcgatattgcccatcggcctcgatcagcttgtccttgaattcctgcggcagataaggcacgccaagcttccacccaaccgcaaggatcgagacatccgcctccaccttttctccgcccgtcatatggatggtcttgccatcatagtgatcataggtgccttcgatattcttgatcgtgcctgccttcagcccctcataaagcccaggggtgacaatcggaacggaacaggacacatctctctcaatgggaattttcggcaccatcccaaatttcttcatgccgagctgaaccttcagcaaggtctccagaccccgaaaattcaaccagacaagcggcttgaagatcgcccccagaagcttctgaaaagctgttcgcccccacgcattgaactgctgttcctgcgcgcggatatagagcagatgcttgaagttgatcccgccgatgaaatagggcacccgccagaccggctccagatagacccaatgcaccgatttggccccttcattgacggcattcacggcaatatccgttgcggattttgagccgcccagcaccacaactctctttccttctactgcggacggatcgacatattcggacgaatgcatcacctcgccacccgccgcttcaaagccgtcctgaccgggatg

SEQ ID NO: 3021 - DNA, 23279 bp, synthetic construct
  source 1..23279: mol_type = other DNA
  misc_feature 1..23279: note = Synthetic
cctctaacagtcatcatctgttaaaggtgttttcgtggcattccggtgattgcgctacgcgttcatcgccggtcaaataacaagccgcctgctttgcctgaaccattcttgcaagcagcagctttatttgccgtttgaacccgcgcagcaaaatcggccggttcaacactcacgcgtatttcattgaaagcgtgggttgacgtgaagcatcgggggcgtgaacccaattccggaagctccaaatgtgccaaaacaagaaaacccgtgccttatttccccatgccttattttattgagtggtcgtgcgggctttcaaagttgaaccgcgaacaatcaatttgcttttcaaaacggtttgccgcaccggttttagcgggttttccagcctttccatcaaacagtgataggcttcgcgggcaatgtcgccaaccggctgggcaatggtggtaatgccgttaaagacgagttccatccacgcttcgtcgtcaaaggctgccaaagccagttgatcgggcacaacaataccggctttgtttaaaaatgccgccgctttcaaagcgagaaccccgttggtgacaataagcgcatcaatctctggattatttgcaagcgcattttttaaagatttcgccacattatcttttccgtgttttacggctacactttcaccggaaaggtgaagtgccccgattgcttcgtcaaagcctttttgccgttcaaaaccggttcggctatccgctccgtaaaggcaaagaatgtgctttctgccattttcgtaaaggtggtgcacaagctttttggcggcagcaagattgtcgatcagcacggaatcataaatcatttcatcgggcttgcgatcaacaagaacaagcgggcgttgcagttttgccggtctcgttttgcgccttgttatgtgtttgcggcttgttaaaagcgtgggagcaagaataataccggcaacgttttcttcttccatcaggtcgagataggccttttcctgctcgggattttcatccgtgttgcataagatcacatgctggttgcgagtttttgcaatgtcgtcgattgcgcgggcaaagcgggtaaaaaacgggtttctgatgtcggcaatgataaggcctatcatatcattgctatgcccgcgcaaacggcgggcggcaaggttcggccggtaacccgaggcaaggattgcctcttccactttgcttttcaattcatggctcacaactttgccggaaatcgcacgcgaaacggtggcaaccgaaacaccggcaagttttgcaacatccttgattgtggcagccattcgatttttctttctttctcagtgcccccgcacatgaacgagacgttttttccttgaaaacgtttccagaatttgctgtagaattatatgacagaattaaacagttgcttgatatatttcaagaaaacgttttcaattcattttgaaaagcccaagggaggaaacccgtggcagcagcatctgaaaagacagcaattctttccgaaaatgcaattttgttgaatgcggatttttccgacaaggagtcggccattcttgccgccgctcaactccttgttgatgaaggcgcaattgaaccggcttacggaaaaagcatgttggcgcgtgaaaaggttgccaatacctggcttggttcaggcgttgtcattccccatggcatggtggaagaccgcaaccttgtcaaccgtgatgcgatttcggttattcaggttccaaacggggtggactggcaaaatggcgaaaaggccaaactgatttttgcaatcgccgccaattccgacggccatatcgaaattttaaagcggctcacccgcctacttagccatcccgatgcgctgcaaaagcttgaaacgaccaccgacaaatcggccattatggcagcccttgtcgaaaatgacgaagcaccgcaaagtgcggctaccgatcttcgagcgaccaaagaatgggttcttgattatccgtcgggtcttcatgcgcgtccggcgtcgatctgggtggaatttgccaaaaaaagcgggcaaaaaattctcgtccgcaatggcaatagtcaggccgatatgacaagccttgccggcctcttgcaactgggcgggaaaaatggtgacacgcttgttttttcaaccgacgcggaaaatggtgaacagcttctgggggaagcggttttaatggctcgaaaaatcaccttgagcgagcgggaagcagccgaaaaagcggaagtgaaaccgaagaaaatctatggcttccggccaccttcaggaaaagcgggaattgacggcttgtcggcaagccccggtctttcggttggtacaattttcattctggaaaacggggcaggtgaagtcgaagataagcccggcaaactttctgaagatgccgcacggcttgaaaacgctttggggcgcaccaaagacaagatgaaagcgattgtggatgatgtgacccgtcgtatcggtgcgtcggacgctgccattttcaaggcacaggcgacccttcttgatgatgataatcttatctcttctgcctgccatttgatggcggaaggccatggcgtggcatggagctggaacaaggcggttgaagaggcggccagtgcccttcagcatatggataatcctttgcttgccgcccgcgcggtagatttgcgcgatgtcggcgggcgtgtccttgccgagatcgacccgctttatgccaaaggctcgttcgagaatatcggtaacggggcaattattgttgcggaagatttaaccccctccgacaccgccaatcttgaccccgaaaaagtctatggtctcatcaccgcatcgggcgggccaacctcgcatacagccattcttgcgcgcactttgggaattcctgcgctggttgcagcgggaaacaaggtttttgaagcaaagaacggcgaaagcgcgattgtcgacggctttaacggcattttatatctttcgcccacgaaagaagacatcgaggccgcacaaaagcaaattgtcaaattggccgaagagcgtgaaaaagaagttgccgaacgcgccaagcccgcaaaaaccaccgacggccatgtgatcgacattgccgccaatatcaaccgccccgatcaggttgcctttgcattggatgagggcggtgaaggtgtcgggctgatgcgtacggaatttttgtttctggaaagcacagaaacgcccgacgaggagacgcaatataaagtttatcgcgatatgctttcggcattgggcggcaaatcgcttattatcagggcgctcgacattggtggcgataaacaggttgcccatcttgatttaccgaaagaagataatccgtttttgggcgtgagaggcgcaaggctcctgttgcgcagaaaagacctgctggtgccgcaattgcgcgcaatttatcgcgctgccaaagaaggcggggatccgtggattatgtttccgatgattatgtcggtcaccgagatcagggaattaaaagctcttgccgaagaaatccgcaaagatcttgccgcgccggttttaaaaatcggcattatgatcgaagtaccggcggctgccattatggccgatatttttgctccccatgtcgatttcttttcaatcggcaccaatgatttgacccaatataccatggcggttgaccgacaaaatcccgatcttgcagccgaagccgacagccttgatccggcggttttgcggatggtggaaagaacggttgcaggggcagaaaaagcgggcaaatgggtaggcgtttgcggcggcattgccggtgacccgttcggggcaatgttgctttccggccttggtgtcaacgaattgtcgatgactccgcgcgatattgcaacggtcaaggcaaggctcagggcaaaaagccttgccgatatgcgcaaacttgccaacaaggctttgcaatgtgaaaccgccgaagaggttcgtgcccttgacgaggccaagtcatgaaaattgcaacactcaccgtcaatccggcaattgatgaaacaatccatttgaaaaagcttgaacgcgggcatgtccaccgtgccgaagaggcgcgctttaatgcgggcggcaagggtatcaatgtggcggcctgccttgccgatttttctgttaaaacggcggtcaccggttttctcggaaatgcgaatagccgactttttgaagagctttttcaaagccaccatatcgaagaccgctttatccgctatgagggggaaacgcgcaccaatatcaaaatcgttgacgagagtgaaaccaccgacatcaatttgcaaggggtaagcccgacagtggaagaaatcgcaaaattgcaaaatattgtcgatgattttatcgccgaagatgcgctgattgtcatgagcggcagccttcccccgaaaatggatccgcgtttttatagaaacgaggttgaaagggcagaaaaaggcgcaaaaatcattgtcgattgcagcggaaaagcgcttcaggaattgttgaaagcggaaaaacttccccttgctatcaaacccaatattgacgagctttcggccttttgcggccaacagcttgaaaatgaaggagaggttttaaacattgcccgctcgttgattgaccgtggaatggcacttgttgccgtctctatgggcgaaaaaggcgggctttttgtttcccgtgaaggggcaatccacgcgcaatatttgctttcgggcgtcaaaagcacagtcggggcgggtgatgccatggttgcaggcattgcaaaaagcatttccgacaatgcaaaacttgaagatattgcacgcctcggcacagcctttgcggttggcaaacttcaaaaattcggaccggctttgccggaaaagacgataatcgaaaatttggctcaaaaggtaaaatgtcggcgggtcggttgatcgccgcatttgaacgaggagaacaacatgactttgatagccttgatagatggtgcgggcggtggtgtgcatagtttgcttgcccgcgaagttcttcaaaaagccgcaagcgaaaggggcacatctttaagccttgaaatcgtcgagacaggaaccttgccgcgcattcccaaagatgccggttccgatacattgctgcttgtgagcaacaatcatgattggcaaagcgatcatatcaaaagcttcaaagggcaattgcaaagactgacatttgaagaactcttcaaaaaaccttctgccattattttcggggatccgagcgaaaatccttcggtagaaaacccgacagaaaaaacggcaggcaatgatgaattgcatcaggatttgaatggcgccaatcgcaaccttaaaattgtcggtgttacatcctgcccgaccggtattgcccatacattcatggcagccgaggggcttacagaagcggccaaagctttaggccatgaaatcagggttgaaacgcaagggtcggttggtgccggtacacctttgacggcggccgaaattgccgcggccgatcttgttattattgccgccgaccgcgaggttgaccgcacccgttttgcgggaaaacgcgtttattcctgcccgacaaaaccggccatcaataatggcgaagctttaataaaaaaagccattgaaagcgccgaagtgcaaaagcagaaagcggttcaggacggggaaagttctgaaagcagcgaaactgctggcggtgtctacaagcatttgatgaccggtgtgtccttcatgcttccttttgttgttgccggcgggcttttgattgcgttgtcctttgccattggcggcgttggtgtcaccagtcaggaaggcacatttgccaatgcactttttgttatcggttccaaaggcggttttgctttaatggtgccggcacttgcgggctttatcgcctattcgattgccgaccggccgggcattgcaccgggaatgatcggcgggttactgtcgcaaaatatcggcgccggtttcattggcggcatttttgccggtttcattgccggttattcggttcgccttgcaatcaagtggataaaattgccgaaaagcttgcaaggcttgatgccggttctggttttgccactcattgccacattgataaccggcctgttgatgatgtttgccatcggaacgccggtcgcagcgcttcttaatttcctcaccgaatggctcaaaggcctgcaaggaaccaatgcctatctccttggcgccattatcggcggcatgatggcggttgatatgggcgggccggtcaacaaggcagcctatgcaacttcggttgcactcatttcatctggcgtttacgggccgattgccgcaaccatgattgccggtatgactccgcccatggctttggcacttgccgcatggattttccccaaccgctttacaaccgacgaacgctcctcgaaagtatcaaccttcattctggggcttgctttcatcagcgaaggatccattccttttgccgcacgcgacccgttccgtgtcattcccgcgcttgttgtgggctctgctgttgccggtgcggtcgcgttggggctcggcacgggcttgcgtgcaccccacggcggcatatttcttgcctttattccaggtgtcgtcatcaattatgtcggctattttgcagcacttattattgggacaattgtcaccacgattgtgctcgggcttttgaaacaaccgatggttgcggcagaaaaaaaggcctgaacactgtactttcctttccgccatatggtttatggcggaaagcgggttaattctgaaagcagttttaggaaacgagctttgcaaaattttgcttggagcgcgaggccacaaaacgggcttgacgccacaaaaccggaacagcttttttgaaaaaacgcttgccggtgaaatgctcacagccattctcccgtcagacttgctttaaaaaacaaacaacgcttatttgcaactgatgcattttgttttttaaattgggacgcgaaagtttacgactgacattaaaaatattcattttaaaatcttaagttgtggaaacactgttcgctaaagacatgcaataaatacattgcctttacttgctttttctccggtgagagattttattaatcggtgcacaccgtggcgggcttttgaaaaagcttctcgaaacgcaagccagaaaggcaatctgaaaggcaaggttgatgacaaatagcaaaccggaaatggcaatcgcctatgactttgatggcacattggccgacggtaacatgcaggaagcgcagtttttgcccaatatcggtatgaaaccgaaagacttctggaaagaggtcaatcaactggccaaggaaaatcagggcgataatgtgctcatctatatgagccggatgctccgcaaagccgatgccgccgaagttccggtgcggcgtgaagatttcaagaaactgggccaaacggtcaaattgttcaaaggtgtcgaaagctggtttcaacgcatcaacatttacggaaaatcaaaaggtgtggatgtcaaacattacctgctttcttcaggaaattatgaaattattgccggaacagcgatcgcaaaagagtttactgaaatttacgcatccaaattcttgttcgacgcaaatggtgttgctttttctccagccttggccgttaattacacaaccaaaacacaatatctttttcgcatcaataaaggcgcgttcgatctgagcgacgatgtcaaagtcaatcaatatgtgaataaggcagaccgtcccgttccctttgaaaatatggtctatattggcgacgggacaacagatgttccctgttttcgtcttgtcaaagatcagggcgggctttctattgcggtttataaagccaataaaaatggcgcacacgaaacggcatcgaaatatattgatgatggccgtgtccaatgcgttttaccggcaaattattcggaaggcagcaagcttgaagaggtcatcaaggccaatattgatgttgttgccgcacgctctgcccttaaaaatctgctctatcataaaaaacagccgcgaaaagcccgtgcaaaaaagaccgatcaataactagcaatttgcaagaacccgcaataaaatgactgtgagcaaaatccgctcctctttgccaaacgtgcaacgcctcttcaaactgataaagcctcatttgaacagcggaaggtcatcgggaatcttgtctagtttatcgcgatagaggcttacaaaagtttcaagatcacaaagacttccaagttcagaagaggcatttttcgcgctttcaccttttccggataaactgcattccggattggtataaatttcgcgggcaatcgggtttttctctgaaagcggcgttaaaaatcgccattcgtcaagtgttcgtgcggcaaatgacaattgcacggctaagcggccggttttgttatttttataacgcttgaatatcagcatgccaccggggggaatatcatctgccggataggaagcaagtttccaatgaaaatccaatatggttttgatttgtgaaatattggtgtcgtggccgacaaatataacaaggggtgcgcccaattccggaaagctcggttcgcctcccgacgttctattagcaaggaggctctcggttatttcatgcattaaaatattgccgccggttcttgcaatttccattgtattgtcgagaagatcatattttgccgcatgaagactcataagcttcaacacatcgcccgcattttttacgtgcccgaaagccacatcttgaaggggtaatccttcactatattgcaagcggattgtttccgaaattgcactggcagacgagacggggccggtcaatttgtattttccggattttgtttttttgaggccccatttttcatccagaaatttgcagtctggcacgccggttccacacacggtttggcgcaaccactccacatcatcggcatatttttgtgccgctttttccggcgagccgcccatcgcttccagcacttcatcttcaacctttttcgggtcgggttgtgccagccccatttccacagcctgaaaaagcgggtcttttttttgaagcggcaaatgaccagccgcgacaccgcatccgggaaacataccgtcggttaaagcttgagctgttgcgatagtccgctcgatcgggcttgcccggataaagacttctcttgtcgtcggacaaggggaggagagtgcaaggccttcgcttttccagttttcaaacatatagcgggattggtcgacaattcccgcatagccatggccgctcaaattgccgtcggggacactccatcttggccaattcttgccggttgcttcatcaagttttgcggtgtcgttttgcgggcgcacgccatggcgcatcaaaaccaccaccttgtccaatgtgtaatcggaaaaatcatcaccggctattgcttccggttttgatatagacaaacccaacagcaaaacgacaataaaaaccgccatcaagcggcatattttaggccacaaaaaacggattgtcgtaatagacatttcggttgattttttcattgtgtgatcgcctgctggttccggctttaaaaaattgtcgttttactcaaaaaattcgttatctatcgaaaatagtcattacgcgcttttttgacaggaaaaacgcaaaaaaagtaaaacatttcccgccgctattttctaaaaaacgcattatgcttttaaaagatcgcgtccttttttcttttccaccaagcacaaaatcgccggaatgatgacaagtcttctaaataaataatacgtcgataagcacgatgcccgtgcgaggataaatccgggaaaataaataaaactcaataaaaaacagcccccggaggagctgtcttatttggtgcatatctagcttgttaacagccagaccgcattttctaatctgtaaacgtgaaaatatatgaaaataaccagctgtcaatagttttttattcttgcttattttttcctcttgtttaaatttttcaacgattttgcgtgaggggagcggttatgactgcagaaaattattccaatgttcgtttttcttttgatattggcaccaattccattggttgggcggtttttcaattaaacgacaagcaggaagcgacaagcattctgaatgccggtgcacgtatttttagtgatggtcgggatccgcaaagtggcgacccgttggcggtcaggcggcgtaccgttcgttcggcttcccgcatgcgcgaccgttatctccgtcgtaggaaaagaacattggataaattgataggctatggccttctacctgaagataaaggcgagcgcgataaaatacttcttgaaacaaatgacaaaccctccggttctacagataaaaagaccgacccctattcgttaagagcgcgggcacttgaagaaaaattgcccttggcctatgtggcgcgcgcacttttccatatcgggcaaaggcgcggcttcaaatccaaccgtaaagccgatcgtaaaagcaatgaaaaaggcaaaatcgctgtcggtatagaagaattgtcaggcttgatgcaccaaagccacgcgccgactttgggcgcttatcttgccaaacggcgggaagaggggcatgtcgtgcgccttcgcgccaattccgaagcgttgacagatcaggcttatgctttttatcccgaacgcgccatgcttgaagacgagttccgcaaaatctggcaagcacaggcagaatattatcccgatgttttaacaaaagagcgggaggaagaactgttccatgtcatgttctttcaacgcccgcttaaagaacaaaaggtgggcttctgcaccttggttgaaggcgaaacaaggcttgcaaaatccgacccgctttttcagcaattccgcctttataaagaaatcaatgaattggcgattgtcctacccgatttgtcacaacgcaaattgaccatggaagagcgcgatacgctcatcacattgatgcgcccggccaaaacaaaaacatttgcggcacttcgcaaagcattaaaaattcccgctggcgggcgcttcaataaagaaaccgaaaatcgcaagcagttaacgggcgacgaagtctattcggtcttttcaaaaccggaacttttcgggggtgattggggaaaatttttaatagagcaacagcgcgaaattattgaccaactggagaatgaagaaaatcccgataaactcgaagaatggctgaagggaaaattcccgaaattgtcggatgaacagcggtctgaaatcatcaatgccaatttgcctgacggttatgggcgttttgggattacagcaacatccagaattctggaacaattgaagaaggatgtaattagcgaagccgaagccgcccatcgttgcggtttcgatcattcattggcaaatcgtaactggaagggattggacgagttgccacgctatcaggaggttctggaacgccatatcgttccgggaaccggcgacaagaatgatatttatgacatttataagggtaggctcaccaatcccaccgttcatatcgggcttaatcaggttcgtcgcctcaccaacaggctcatcaaggcttatggcaaaccgcagcaaatcgtggtggagcttgcccgcgatctgccattgtcgcaagagcaaaaacgcaaatataataaaaccaataaagataacactgatgcggccaaaagacgttccgaaaaacttggtgaaatcggcaaaagagacaatggttataaccgtcaattgctgaaactttgggaagaactcggggatgacccgaacgatagaaagtccatctattcaggaacacggataaccgagccgatgctgttttccggcgaagtggaaatcgatcatatattgcctttttcacgcacccttgatgatagtaacgccaataaaattctctgtttgcgcgaagaaaacagagtgaaacgcaatcgcgcgccggatgaagtttcagaatggcaaggccgttatgacgaacttatcgagcgggcaaaaaaattgccaaaaaacaagcaatggcgttttacacgcggtgcaatgaaaaaagctgaagaaaatcgggactttcttgcccgtcaattgacggatacccaatatttggcaaagcttgcccgcgaatattttgatagcctttatccgggggaagaggcgaacgcggatggcgagttcaaaaaagttcaacatgtatgggcaattcctggcaaattaacagaattgcttcgtcgcaattgggggttaaattctctgcttgctgctgaaggtgatgaaagcgcaaatcatcccaaaaaccgtaaggatcaccgccatcatgccattgatgccatggtgatcggtgtcacaacgcgctcgcttttaaaacgtattgcaacggctgccggaaggttcgagggcgaagatttcgagaattttgtcaaaaaggcagtttccgaaattttgccgtgggagaatttcaggaaagacgccaaagacgttgtcgataaaatcatcatcagccataagcaggaccatggcacaataagccgtgccggttacgctcagggcaagggtaaaaccgccggacagttgcacaatgaaacagcctacggtctaaccggtggaacggatgaaaagggcaataaagttgttgtcacgagagagaatttcttgtcgctcgagagtaaagatattccaacaattcgtgacccgaatttgcaagccgaactttatagtgcaacgcaaggtttggacaaaaaagaatatcaggaagctttggtccgttttgcacgtgaccatcagctttataaaggtattcgccatgtcagggtgctcctgcctcgtaatgtcattgaaataaaagacaaaaatggtgaaccttataaaggctatatgggaaattcaaattatcgctatgatgtttgggaaactttggaaggcaaatggaatagcgaagttgtttcaatgtttgatgcgcaccaaccaaaatggcgttcggaatttcataaaaataacccgacagcgcgcaaagtgttgagcctgcaacaaaatgatatggtcgcttataatgatccggaaaaggggcgtgtgattgcacgcattgtcaaattcggtcaaaacggtcagatatttttcgctccccataatgaagcggatgtatcggcgagggattcgaataaaaacgacccctttaaattgactgttaaaacagcaacggggttgaaaaaaatgcaattccggcaaattcgtgtggatgaaatggggcgcgtttttgaccccggtgcgcaggacagagagtcaaaacaggcaaggtcataggaaatgaaccctgtttataaaaaactgttgagaacatgccgttttgcggcatgctctttttatggaaagaatagttgacatacctgctgaaggcttacaccttgccataaaaagaggttttttaaccatttcccgtcgagaagcggaagtggggcgggttgcgcttgatgggagccttaatgactcattcttatggtttgagttggacaaatcacgtttttatcgaattgtccgaacgctctattccaatcgtgttatgtggaaataaccaccgtccggttgctatcgtttggccggtagaaggccattctgttcaagctgtgcggatgaaagcgcaggcgtcggcaccaaagccgatacaaaaacagatttgggcagaaatcgttcgttgtaaaatcaggctacaaggcgcagtgctcaaagcttgtggcaaagagggggcggcttttgtctccattgcccgtcaggtgcgtagcggtgacccggaaaataaggaagcacaggccgcccgcaaatattggaaatcattattcggaaccgcgttcaaacgtgacatagcacatgaaggcatcaacagccttttaaattatggttacattgttctgcgtgcacttgtttcacgcgccatttgtgctggcggcctctatccaacattgggcatttttcattcacatcgtgccaatgccttcgcgcttgctgatgatttgatggaaccttatcgtccttttggtgatcgcatggtcttccacctgcttactcaaggaaaaacaaaagttgatgccggggtaaaagcttatcttgcttcactttcaacacttgatttgaaaagtcatgttggaacgtcgcctgtcagccagcaagtgcaatactttgtacattcggttgcggaaagttttgaaaagggcaaggtcaagttggctttacccgatgaacgttcaattttttctttggaaaacagttcggtccaaattgatgaggcatggggagaagatgacaattatgacagcctatcttgagcgtgcaacatcgggtcctaaacatttaagcgggtatcgattaatgtggatatgagttactttcgacttaccggtagacacaagaaaacagcgccacgacgcaacgaaattcagacaatttttgttggatattggcttcgagatgagcgagttctcgaattatctgcgtttctgtaacggaaaagaacaatttgaatcttatgtcaggaagatcgaatgctccttgcctgaacgaggaaacgtctatatttttcaatttaccgacaagcaatatgaaaatatcgtaagattttccgatcaggcacgtaggaaacgtcaaaaaaatccagctcaactggtgttattttaatgaaaaacagcatttttttaaaaaaaatgtcctcttaaaccttataaaacaaagagttaagtggacatcggttgtaacagattagaaaatgcggtcaagccgcaacatgatcctaatgcacaaccgcttatggcgggttgtaacagattagaaaatgcggtcaagccgcaactgtctcttttggcagcccgtctcatttttcgttgtaacagattagaaaatgcggtcaagccgcaacagaattcatccgtgatgcggttgaagcaaaacttaatcctcccaaaaataaacagccgacaataccggtgatggcatatttaactcaaaaacacttggatggtattaaagctttagtcggcaatcatggtcgtgcaaaattcatccgtgacgctattgatgcaaggatcatgcaagaaaagaacaagcaggcaaaaagctgaaaaaagctcttgttagctcataacgttccgtcttgatttctttcacaacgcatatattcaataccatctattagaaccgtatgtggcaggatttttagctccattgattggttgtatctttccccgacatcatcacattgccatgttatgtgatatttcttatcgggcgtcaaaaatatttttttggctttgcagatgctctctaattctcccattgtgccatcatcggcatcaaacatgagcacatgattgttgaatgaaaattcttggtccggtaatttgcaaacttccggcgacgtttgctctacataataaccggaaacgacaggcagctttatcttccctgcctgccccgtttgagctaacagcaaaacaaacgatataaaagcaatcattctcttaacaagcattttgtagctccaatgtcttgttgtaacagattagaaaatgcggttaagccgcaacactacaggagaagatgaatgacatgagttttttgtaacagattagaaaaagcggtcaagccgcaacggcggcgaagattttataattgaaccactcgttgtaacggattagaaaatgcggtcaagccgcaacaaacgatttcagagatcagaacttggccaattatatcagcctataaaacgcgatcaggctgcaagcttggtcaataaagccaatattgcagcctgaacacaacagattaaaaaatgcggtcaagccgcaaccaaaagtgtcaatcactagtttataggttacagtctatcagattagaaaatgcggtcaagccgcaacccttttattgtcgtttcggcatattccagcgttgtatcagattagaaaatgcggtcaagcgaggccattccgaacgggcgcataactaaagaagtcgtttcaaagaaaaggaaaatcatggcggagagggagggatttgaacccccgatagagttgcccctatgccgcatttcgagtgcggtgctttcaaccactcagccacctctccataaaggcgaactttatttgttaaacaaatatccgagcgctttagcggctaaatagctggcaattggctttgacacaagcccctttttttaatttttggaaaattccgttcaccctttcaactttgtttttttcatttttgagcgcggggccacgggcgcgattttttaaaaagcatcagagtttttctggcctattgctctttgcccgacaaaaaatgtttgtttgtcaaatgcatccggtttttcgccatgattgccggttaattcacaaaaagctttccggttttttaaagctggtcgattgacaagtgaagaaaacttctgcataaatcagccaaaggcgtagtgtgtctacatttgtgtaaaaaagtgtatctgcacttgtctaaaattatgccggtcggttttttagggctggcaaattttaaaaggctgataattttaacgactgataaaaagacgggctgtctcatcgctttgaagtgttggacaagatccggatggaacgaaagggtaaaaaatgttcgcagtcatcaagacgggtggtaaacaataccgtgtttcccccagccaacttgtgaaagttgaaaaggtcgctggcaatgccggtgatattgtggagttcaatcaggttctcgttgttggcgaaggtgaaacagcaacaatcggaactcctgttgttgccgatgcgttggtaacagcagaggttgttgaacaggcacgtgcacgcaaagttattgctttcaaaaagcgccgccgccagaattcgaagcgcattcgtggtcatcgtcaggaattcaccacaattcgcatttccgaaattcttacaggtggtgcaaagccttccaaggctgcaacaaagccggctgaaaaagcagcaaaaccggtagccgccaaagaggcagcaccaaaggctgaaaaaccggctgcaaagaaagccaaaacagaaacaaccgaaaaaaaagcagcgccgaaaaaggcagccgctaaaaagtcggaaaagtaagagagattaaaggagaacaaccatggcacacaaaaaagctggtggttcctcgcgtaacggtcgcgattcagaatcaaaacgcctaggcgttaaaaaatttggtggtgaagcagttattccgggtaacatcattatccgacaacgcggcacacaatggcaccctggcgaaaatgtcggcatgggtaaagaccatacattatttgcccttaaagcgggcaaagtatctttctgcgtcaaagcgaatgaccgctcctatgtgtcggtgattccgatggcggaggcagcagagtaagccggagctcttaaataaaaccggcgtcccattggaccccggttagcttccaaagcaaattaaagggaaagatgggacaccatccttccctttttctattgctccaggaggtaactatgagcactgaattattagaagaaataagaaagaggccgcccagaaccttggattgcccggttctggtaactgaaaggcttgttttacgcgcacccaatgtagaagacatggacgccattgccgatctcgccaacaaccggaatgtatctgccatgcttcaatctgtgccttttccattcacacgaaaacatgcagcagaatacattcttcgttcggtggcgggcgagatgggctattgcgcctatgccattacaaaagccgaggatggcgcatttatcggcgcctgtcatatcaaggaccgcgaagagggcgaaggcctgagcctgcgttactggattggcaaaccctattggaatatgggctatgcaacagaagcggttggcagcctgattgatgccgctttccgtgcaaccgatattgatgcgctctatgtctcgaatttcgcggccaataaagcttcccgccgcgttatcgaaaaacagggctttgaatatatcggaacatccgaacaaaactcgctggtttccggtctggttatcgccgacaattatgtcctcgaacgcgaaaaatggatcggccagttgagcaaatgcgcctgaacacgcccgcttcaatgaagaggcctgaaaagcttggctgaacaagcaggccttaaaagcttgatcgaacaatcaggccttttataaaaaaggcctgataaggccgttttaatcgagccgattggggtagccttgccgagtggggcaggctcgttcagttttagccacgcttaaaaattggcaaaagcaaaccggatgtgacaaaccggtttatcacgctgtcttacggtttatcacgctgtcttaagcccactttatcaaagcgggctgcttattatgcagaacggcgcattcacaagcgttttaacaacggaaagctatcttaaaaaatcgaaacagcggttcacaaaattgcttgaggtctttctaaaaaaaagcccgaacatgccggctgatcctgtattggtaagatcgcttctaccttgcccgaacgatgaaatgtcgatattttttcaagggtgggtcaagcaaattgatcgtgtgcttatgtgaaaatattgttagattttcaggtaaaacatggacgacaagtcaaaaaaatcgaaaattaccggtgttattttaatgaaaaacagcatttttttacaaaaaaatatccacttaaaccttataaaacaaagggttaagtggacatcagttgtaacagattagaaaatgcggtcaagccacaactatgttgatcttcagaaatggcttgattgggttgtaacagattagaaaatgcggtcaagccacaactttcgatatggttgttacagtgtataatatgttgtaacagattagaaaatgcggtcaagccgcaacgggaacgcgcaatcaaacggcgctgtagtggttgtaacagattagaaaatgcggtcaagccgcaaccaaaccagttcgacactttcatatctttgagttgtaagagattagaaaatgcggtcaagccgcaacgatatatccgataaacaaacaaacgaaaaagttgtaacagattagaaaatgcggtcaagccgcaacttttaataaataccctgaaaatctgtcgcggttgtaacagattagaaaatgcggtcaagccgcaacgatatatccgataaacaaacaaacgaaaaagttgtaacagattagaaaatgcggtcaagccgcaacaatcgtcgatccttattctcgcgcagcgcttgttgtaacagattagaaaatgcggtcaagccgcaacgtgccggttcgcacaacctgcaaagccgacgttgtaacagattagaaaatgcggtcaagccgcaacaagttggcgcgtcataacgcgcatcaatatgttgtaacagattagaaaatgcggtcaagccgcaacataatagacatcttccagttgtccttcggcgttgtaacagattagaaaatgcggtcaagccgcaacgaaaaaagctgcaacttttcgccaatcttcgttgtaacagattagaaaatgcggtcaagccgcaacatggcatgattgcctcttggttactcgttggttgtaacagattagaaaatgcggtcaagccgcaaccaaatgctccgtcgcagccaaaatgaggcttgttgtaacagattagaaaatgcggtcaagccgcaactctggacgagtgttggttggttgtgatgctggttgtaacagattagaaaatgcggtcaagccgcaacggtataatagcggccatgtcgcccgcgacggttgtaacagattagaaaatgcggtcaagccgcaaccataagctccctgaacaaccgttccttatcgttgtaacagattagaaaatgcggtcaagccgcaacaaaaaacaccagcaagacaacaaccccgtggttgtaacagattagaaaatgcggtcaagccgcaacacggtcggagatgaaaacgacgacggcaatgttgtaacagattagaaaatgcggtcaagccgcaacactcttgcaaagctataaaacaaagcagcggttgtaacagattagaaaatgcggtcaagccgcaacagatgctgctcaacattaggaatagtagctgttgtaacagattagaaaatgcggtcaagccgcaactatacagcagttgttggcaatgggctcaaagttgtaacagattagaaaatgcggtcaagccgcaacagggagcagataattgattaatcgttttacgttgtaacagattagaaaatgcggtcaagccgcaacaaacgacttcagagatcagaacttggccacatgtatcagcctatataaaacgcgatcaggctgcaagcatggtcaaaaaagccaatattgcagcctgaacacaacagattagaaaatgcggtcaagccgcaacctattgcggtatttgcttatttggttatgtgttgtaacagattagaaaatgcggtcaagccgcaaccatttggcggaaaactcacggcgcaatcgaggttgtaacagattagaaaatgcggtcaagccgcaactcattgatgcgctgatcgaactgcgtcggcagttgtaacagattagaaaatgcggtcaagccgcaacggatagcaaggacggcatcaccgggacgtcagttgtaacagattagaaaatgcggtcaagccgcaactgcagaaggtgaagggcgaacctttaagaagttgtaacagattagaaaatgcggtcaagccgctagcgaatatgttttggtttcatcagtgttgtgccgcggattgtttgcttttttcgttcaaagcatgtcccgcatcgcggggcaatgtgcggaagatgaagaaagcaagtgccgagatgaagccgacgacgaaaaagcccgtatgaaaatcgccaagtttcaatatattgctgtgaaaggagcttgcaatttccagaaccgcgccggcaattgcaatgccgagcgccattgaagcctgttgggcaacagcggcaatcggcgttgcctgactgatgtcttctttggcaatatcggaaaaggcaagcgcattgacaccggagaagaaaagcgagcgcaaaaagccgccgaacaggagcacgacaatcatcaacaaatagggtgtggtggggtaaaacaggccattggaagcagtaaacattgccgagacgagagaccccgccatcagcaccttccgaaagccgaaacgggcataaacttcttttgccccgaacttcatgccgagcgagccgatggccgcagcaagaaccataaggccggattcaatcggcgaaaggccgaaggcaagttgcagcatcatgggaagcaggaaaggcacggcgccaatgccgagccggaaaacgctgccgccgataatggcgcgtgcaaaaaccggatcggaaaaaagcctgaggtcaagaagcggtgcagtgcggttttttgcgtgtttgatgtagatgacgccgaaaattacgcccaaaatggtgacactgacgccgacactttgcggcaaggccggaagacttacaatcgaaaggccgaaaatgaagccggaaaggctgattgcggaaaggaaaaagcctgtccagtcaagcgggcggatatatctcttttcattttttggcagatagattgatgaaagcacaaggccgataaaaccgatcgggatgttgatgagaaaaatccagtgccaggtaaaaaaggtggtgatgaagccgccaagcggcgggccgacaagcgggccgacaagggctggaatggaaaaccattggaaggcaatgacaagctggtttttcggggtggatttaacaagaagtagccggccgacaggtgtcatcattgcgccgcctatgccttgcaaaaagcgcgacaaaacaaaggaatggagcgaaaaggaaaaagcgcagcaaacagatccggcaagaaaaaccacgatggcaacacggaagatgatgcgtgcggtgaaacggtcggagatccacccgcttataggaatgaaaaccgaaagtgccacgagataggatgtcatggcgagtttgagcgcgatggggcttgtgttcaaatcggcggcaatggcgggaagggacgtggaaatcacattggaatccacatgttccataaacaaagcgacagccagaaccataggaagaatctgcattaaataccccgaacccgacttttttaaaacgatggaacctttaaaaccagtgtgcctatattgggcgaagaacctttatgactctaaaaccttatacatgaaaaacagatatggcctaaaccgataaaacttgaaaggtgtttgtgacagaaaatcgcgatgcgcctcataccatcatttaagcctacactatcctgaccggtttcaattgtgaagaacagtgagagcgacaaaaaccggcttcactttatcgtggtttttcatttcattcttgaccttgagagaaaaataaattcttcatcgttaatgttcatggaacgtccggaagggctacacataacatttacgacacctatatgttttatatcattctttaaaaataacgttttgcccgcttcggggcgatcaataaaatgcgctgatggagcgttcacttgccgcataaaaaaacaattgttctcaataatctgactgaaggcccgatcaccagaacgttgcttctctttgccattccgacattgctttccaatgttttgcaatcgctcaacggttcgatcaacacaatctgggtagggcggtttttaggtgaaagtgcacttgcggcaacggccaatgccaatatcatcacctttcttttgtttgcccttgttttcggtttcggtatggcggcaaccattatggttggccaatccatcgggcgcaaagatttgcaccgtgcgcgacaggctttcggcgcttctatcggcttttgtctgtttctctcggtggttctggcggtcttgggttggtttttttcgcccgaaatcctgcgctttcttgaaacaccggctgatgcttttacgctggcggaagattatttgcgggttatcttccttgctgcaccggccgatcttttgatggtcatgattatgatggggcttcgcggggcgggcgattccatgacgccgctcattttcatgtgcgtcaatgttgtgctcgatattattttcaaccccgtactgatcctgggcttgtggatttttccggaaatgggcattgcgggggctgccgcctcgacctctgtttcgggctatctcgctctttttgctatgattatctatatctatg

SEQ ID NO: 3022 - DNA, 23276 bp, synthetic construct
  misc_feature 1..23276: note = Synthetic
  source 1..23276: mol_type = other DNA
gccggtttttccacaaaagcccggcccgtcgaattttcttaccagcttgatcgccttgccgtatgctctacgtatggttaagggacagccaaccgatcaggaatgatgatgagcgattctcttgcacgaagccgcgagggttcgaaggctgggcgtcagccgcgcccgcgcgtgagcatggatatagcggatatcccgacttacgccatcggcgatgtgcatgggcgtctcgatctgctgcagaaagcggaggaggcgatcgtacgcgatgccgagcacctgccgggcaagaaactcatcgtcatgctcggcgattacatcgatcgcggcccgcaatcggcgcatgtcctcagccacctcatggacccggcgcccgaaggtttcgagcgcatctgccttgccggcaatcatgagatcgtcatgctcgactatatcgacggctgggcctcctacgacgactggatgaccatgggggccgccgagcttctgcgatcctatggtctcgatcccgatcacctgccgctcgtcttccgctccggtgcgcagctcgacgccttcatccgccagtcgctgccgcatacccatatcgatttcatccgctccttgccgatcatgctcgacacgcccaatgtcgtcttcgtgcatgccggcatcgacccgcgtgtgccgctcgaagagcaggccgacgacgacctggccttcatccgccagcggtttctggaaagcccgctgccgctgccgaagctcatcgtgcatggccatacgcccggcgaccagccggacgtgcagccgatgcggctcaatctcgatacccgcgccttcaggagcggtaggctctccgtcgcccgcttctggcagggacaggtctaccttttctccacctgatgcctgctcaggcagcgttctcctccgcatcgacctgagccggcacttccgccggctttttgcgccagcgtcgcaacacgacgtagaagaccggcgtcaggaacaggccgaagatcgtcacgcccagcatgcccgagaatacggccgtgccgagtgactggcgcatttcggcaccggggccggtggcgatggccagcggcaggacgccgaaaatgaaggcgaaggccgtcatcaggatcgggcgcaggcgcagatggctggcctcgatggcggcatcgacgacgcttttgccttcttcctccgcctgccttgcaaactcgacgatcagaatggcgttcttggccgcaaggccgatcagcacgatcaggccgatctgcgtgaggacgttgttatccattcccctcagcgatacgccgatcagcgcggccaggacggcgagcggaacgatgaggatgatcgccagcggcaggacccagctttcatattgcgccgcaagcgcaaggaagacgaagatcaccgacagggcgaagatatagatggcggtattgccggtgtgggtttcctgataggcaagttccgtccactcgaaggtcgttcccggcggcaggatctgcgccgcaaggtcctccatcttcttgatggcgtcgccggtcgaggtgccgggcgtcgggttgccctgaagcggtaccgagacatacatgttgtagcgctggacgagcgccgggccgcttgcatccctgatgtccatcagtgtgccgaggggcaccagcgcgccggttgccgatcttaccttcagggcaaggatgtcgtccctgtccatgcggtattgccggtcggcctgggcgcggacctggtagacgcggccgaacgcgttgaaatcgttcacataggcgacacccaggttgatggagagcgcgttgaagatgttggggatcggcacgttcaggaaacgcgccttgtcgcgatcgatcgccaggaaatattgcgggctggcgtccgagaatgtcgtgaagacgccggtgaggcccggcgtcgtggccgcggcacccatcatctggcgggcaaggcccaggacacgcgtcatatcggcgttttcaagatcggaaatctgcatcttgaaaccgccggaattgccgacgccgcgaacggacggcggcgggatggcaatgatgaaggcttcctggatgctttgcagcttgccgtaaagctcgccgatgatcttgtttgccgtctcgccgccctcttcacgttcggcgaaggatttgaacggcacgaagacaacgccggcattcgaagcgttggtgaaggtcgcgccgctgaagccggcaaattgcacggcattgccgacgcccggtacggtacgggcgatgtcgccgacctgtttgacgacggcatcggtgcgcgcaagcgaggcaccgtccggcagctggatgacgatgatcgcgtagccctggtccatggtggggatgaagccggaggggactttctggcccatgtaccaggtcgccccgagcaggccggcaaaagcgagcagcgagcaggtcaatccgatccagctgctgaccagatgccggacgatccacgaatagccagagctcatccggtcgaagccgcggttgaagccgttcgcaaggccgcttcccaactgcgagaagatgttcctgggcttgctctcgtgatcgtgcgttttcaagagaataccggcgagagcgggcgaaagcgtcagcgaattcaacgccgaaattgcggtggtgactgagatcgtcaccgcaaactgtctgtagaactggccggaaatgccgggaatgaaggccgtcggcacgaataccgcaatcagcaccagcgagatggcgacgactgcggttccgacttcgtccatcgtgacatgcgaggcttccttgggcgacatgccgcgcgccaggtttcgctcgacattctcgacaaccacgatggcgtcgtcgacgacgataccgatcgcaaggacgaggccgaaaagggtcagcatattgagcgagaagccgaaggccagcaggaccgcaaaggtgccgatcagcgataccggaatggcgacgatcggaatgattgccgttcgccacgattgcaggaagacgagcacgacgatggccaccaggatcgccgcttcggcgatcgtcctgtagacctcgctgatcgaatccgagatgaattcggtcgtatcgtagacgatgcggtattcgagaccctgggggaagttctgggagagatccttcatgatcgcctggacctgatgggcggtatccagcgcgttggttcccggtcgggcgaagatgccgagggcaaccgccgggtcgttgttgagatagctgttggtgacgtagtcctgagcgccaagctcgatacgggcgacatcctgcagggacacaagccggccgctggccgtcgatttgacgatgacatagcggaactggcgcacgtccgagaagcgtccgtccgtccgcaccgtatattcgaaggcgttcggtccggtcacgggcggggcgccgatcttgcccccggacacctgaacgttctggtccctcagcgcggccacgacgtcatcggacgtcattccgtaggcggaaagcttttccggatccagccagatacgcatcgaatactggcgttcgccgaaaagctggacgtcgccgacgccgtcaaggcgcacgagcacgtcgcggatgcggttgcgcgcatagttcgagacgtagagctgatcgtaacggtgcgacggcgagagcagatgcacgaccatcatcaggtcgggcgaactcttgtcggtggtcacgccaaggcgctggacctcttcgggaaggcggggaagggcgatggacacgcggttctggacaagaacctggaccttgtcgagatcggtaccgagcttgaaggtgatcgtcagcgacatggcgccgtcggcgctcgaataggaagacatgtaaagcatgtcttcgacgccgttgatctgctgttcgagcggggtcgaaaccgtatcggcgatcgtctgcgggtcggcgccgggataggaggtgcgcacgacgatggtcggcggggcgatctcgggatattgcgataccggcaattgcgtataggcaatgctgccgacgacgaggagaaggatcgagatgacggccgcaaagatcggccggtctacgaagaaatgggcaaatctcattggctgctctccgcaccggcggtttcgggcggggcgtcggtacgctgctgcggcagctcgctcatctgcggcgtgacctttgagccgggccgggcgcggatcaggccgttgacgacgatcgtctcggtgccgtccagaccttcgcggatgacgcggtagccgtagagccgcggaccgggccggaccggcttggtcgataccgtgccgtcagcgccgacgacgtaaacgacgcgttcattctggtccgagccgattgcctcgtcgggaacaaggatggcctggtaggtattggaggcctcgatctgaatgcggccgaaaagaccgggctggaggacgagatcggggttggggaaacgtgcgcgcaggcggatggtgccgctttcgttgtcgatccggttttcggcgaagtcgagtttgcccttgaacggcttggcattgggatcggagatcgtgaccacgacatccagtccgccgccgccctgctgcaggtccttgccgagcttgcgcgccgtctcggcgaaattcagcagccggcgctcgtcgacgtcgaaataaaagtcgatcgggtcgagcgaaacgatcgtggtcagcacggtctggtcggtctgtaccagattgccggcggagatcaggcggcggtcgatgcggccgctgaggggggcggtgatctccgtatattccatgtcgagggccgcgcggtcggcggcggcctgtgcgccgcggacattggcctgggccgaatcgaattcgcggcggcggtcgtccagcgtctgcgccgactggctgccgctcgaagcgagcgactgcgcgcgtttatactgcgcatcggcaaagaccagtgccgacttcgctgcttcaagcgcggcattggcctgattgagcgcggtgatgaacggcctttgatcgataacgaagaggcggtcgcctttcttcaccagcgcgccgtcagtgaagtcgatttcctgcagatagccgccgacccgcgatcgtaccgaaacctcgtcgacgggttcgaagcggccgatgaactcgtcgctgtcgaccacgtcgcgcacgacgggtttggcgacagtgacgggcgggggagcaggcgcctgctgcgcctcagcgataagcggcaggaaagcggccaagcagccgagcgtcaatgcttgtcgaagcgaataagccattccggtcccccttgcgggcggccgaatgcagccgcctgaacctatgcctgagaaaagctgtccatgcctgctggaacgaaagcatgagccttcgtcctaagtccgaattctacccatgcgtggctgccgggagatgacaggtgcaagccggcacctcgaaatcaaccggagggagaaaatcgcgatctccctaaccctatgaaggcagactataaacgggagaatccgaaaattgcaaatgccaattggccgccccgatttgcagttccgcaaaccccggcatttccgccgatatcgccctatcacgttgccgagagcggtttctgccgctgcccggacgttcggcggaagccggatcgaaagctccgcctaaccgcggactgcggcattttggtcgcaggtgcggaatcttgcggttgcatccttgtgcattgcacatgctcaatatatctaccaacatcataaggatgcttattactagccggcgaaggtatatgaccaacactccaacactcggttttcttctgcacgacgtcgcccgcctgctgcgcaagcggttcgagcagcgggcaaaggaccttgggctgacacggtctcagtggcagacgctcgcctatctcgccaataatgagggcatccatcagagcgggcttgccgaaatcctggaaatcgagccgatcacgctggtgcgcattctcgacaagcttgcagagcgcggcctgatcgagcgccgccagcaccccaccgaccggcgcatctggctgctctacatgcgtgaggccgcccatccgatcctcgccgaaatgcgcgagctcggcgacgtgacgcgcggcgaggcattggaaggcgtaacccccgaagagcgcgaccggcttttccacaccctatccgtaatgaagacgaacctggtgcaggcgtgccggaccccggtcgccgagaatgagacgaaacatggctgacaaatcccccttgcgcgtcgtgtccgacgcgaatgccaagaatcctgccgacgaaaaagagatcccgcaacaaccggaaacggtggctgaggcgccttcatccaattcagcgcccgcggctgccgcggtggctgcgcctggcggcaacaaggtccgccgccggcgcagcttcacccgccctctcctctttgccctgctgcccgtggcgctcgtcgtcggcggctattattacgtcaatggcggccaggtcatgtcgaccgacaacgcctatatccaggcggatatggtgggcatcacgaccgacgtttcgggcatcgtcgcgcagatcaacgtgcatgagaacgagcaggtcaaggcggggcaggtgcttttcagcctgcagtccgacgccttcaggatcgcgcttgacggcgccagggcccagctcggcgcgcagcgcaaccagatcatgaacctcaaggccagctaccagcagtcgcttgccgagatcacccaggccgaagccgatctgccctattaccaggatcagttcgatcggcagcagagcctcgtcaacaacggcagcgcgacgcaatcggcctatgacgaagccaagcataatctcgaagccgcgcagcagaaggtttcggtcgccaaggcggaagccgcaacgacgctcgcccagctcggcggcagcgccgaccagccggtcgaggaaaacccgctctacctgcaggccaagtcgcaggtcgacaacgctgagcgcgagctcgaccacagcgtcgtcaaggcgcctttcgacggtatcgtcaccaatgtaaacgccttgcaggtcggctcctacctgcaggcttcgcagcaggccttctcgctggtttcgacctcgcatctttggattgccgcaagcccgaaggaaaccgagcttacctacgtcaagcccggccaaccggtcgacatttacgtcgatacctatccgggcgtgatgtggaagggcaaggtcgagagcatcagcccggcttccggctcctccttctcgctgctgccggcgcaaaatacgaccggcaactgggtgaaggtcgtgcagcgcataccgatgcgcgtcagcatcgatgatgccgaaggcaagccgccgcttcgcgtcggcatgagcacggtcgtcgaggtcgataccggccatgcgcgcggcctgcccgatttcgtcaacaaccttctcggccagggcaagagccacgagtaacggccatgagcaatgctcctgcatcaccggcaacaccggttgccaatcgcggcgcgatcacggcctgcgtcatcctggccgtcatcatgcaggcgctggatacgacgatcgccaacgtggcgctgccctatatccagggcagcgtttcggcgtcggccgaccagatcaactgggtcttgacctcctatatcgtcgcggctgccatcatgacgccgccgtcgggcttccttgccgccaagttcggccgcaagcgcgtgctcctgacggcgatcgtcggcttcgtcgtcgcctccgttctttgcggtctcgcgcaatcgctgccgcagatcgttgccttccgcctgctgcagggcctgttcggcgcttcgctggttccgctctcccagggcattctcctcgacatctatacggtcgaggagcgcggctcggccatggccttattcggcgtctcggtcatggtcgggccggttctggggcctgtcatcggcggctggctgacggacaatatcagctggcgctgggtcttctacatcaacgtgccgatcggcgcgctcgcctttgccggcatcgtcatcttcgtttcggagacgaagagggatgcgctcgccaaactggactggttcggcttcgggatgatgagcctgttcatcgccgcgctgcagcttttcctcgaccgcggcgagcagctcgactggttctcgtcaggcgaaatcgtcatcgaagcgatcatctgcgcggccgccttctacctgcttctggtgcatacgctgacggcggaaaaatccttcgtcaatccgcggctcttcctcgaccagaatttcaccgtcagcatgatcttcatcttcgtgatcggcattacctatctcgcctcgctggcgctgatgacgccctatctgcagacgctgatgggctatccggtcatcacggcgggcatcgtcatggggccgcgcggccttggcaccatgctctgcatgttcatcgtcggccggctgatcggcaaggtggatacgcgctggctgctgctgctcggtctcggcctgactgcctgggcgatgtatgacatgaccggctggacgcccgacgtgtcgcaatggaccatcgtgtcggtcggcttcatccagggggcgggcctcggcttcctcttcgtgccgctgacgacgattgcctttgcgacattgccggcgcagatgcgcggcgacggaaccggcctctacaatctgtcgcgcaacatcggctcctcggtcggcatctcgatcgtttcggcgctgatcgtcgagaacacgcagagcaatcacgagtcgatcgccgcctatgtgacgccgttcaaccgggccttcgatgcgacggcggcgcagggcctcagcccgctgaccgccgttggccgggcggcgctcaacgacgtcatcacgctgcagtcgacgatcatcgcctatatggacgatttcaagctgctgatgctgatgtcgcttgcggtgatgccgctggtcctgctgctgcgcaagccgaaggccgcgccggccatggaccacagcgccgtcatggagtgatggcgcatacccggcctatcggaacggcttgctcagatagcgcgatccctgaatgccgaagcgccatggcgcttcggcatttttcgtaatgcctatccgcttgccagagacgacaggcaggggcgaggaaggcgagagcgcgtagggcggctggtcgagagtgcggtcgttgacggaaatgtcgatgccgagcgcctggcagagcttgccggggccgctgcaaagctgcgtcagcacatcggtgccgcgccgttccatcatcgcctgcaggccgatttccggctccagcgcacggatcagcacggccgagcccggcgtgcagacgaagttcaggcaccaatacatgccgtagatgcggtagatatagacattcccggggcggccatacatggcgccgttgcgctttgtcgggccgcggaaactgtgggaagcctcgtcgtcgggataataggcttccgtctcggtgatccgcccgcccgacccgccgaccgtaaggtggcagccgagcaggtcgcgggcgacctcgatcgcatcgcgttcgaagaaatggcgcaggcgttccccggcaagcgggtcggcgccaacagcgccattgatcatatcgctcgtcatggagattgccgatagcatcctctcgggcgatccgccactcaaagggatctgtgttcgcaacgcgtatttttacagcattgacgagggggcgtgagcgttgaaacgcttcgttgtcaggagcccgtcatttgtatcgatcccagcaatgcaggggtgtaagatttcccgagacggcagatcgtttgcggttgtttgcctcacggttcgcgtgagggggcggccggcttccaaacccccacaaggtgaccacacaacccatagaaaaagccgctcccgaaggaacggccttatttggtgcttctagcttgttaacggccagaccgcgttttctgatctgttagcaacttagaattgccaaaacctgataagcgtgtcaagagtctgaccgcaaccgtttgaactaataatggcatcagttgcatatggacatagagacgcttttcgcattcgacattggcaccaattcgatcggcttttgcgttttcgcgctcgatgagaacggcgagccgtatcgtatcatcgatatcggtacccgcatctatgcggatggccgggacccgcaatccaaggcgtcgctggccgtcgcgcgacgcgaggcgcgtgccatgtcccgccggcgggatcgatacgtgaatcgtcgtaaggccgtgctgcgaacgttgaccgaatacgggttgatgccggcagaggcgtcggcgcggcaggcgttaattgccgagaccagcgatcgcaatggggcggctggcgaagcgagcgccaatccatatgcgttgcgggcgatggcgctggacgaaaagctgccactctactggatcggtagggttctttttcatttgaaccagcgccgcgggttcaagtcgaaccggaaaaccgatcgcaaggataacgaaaaaggtgtgatcgcgctcgggatcggtgaattgcgtgcggcgatgcataagaccaaagcgcgaacctacggcgaatggctagctgcgcgccgcgaggacgggcatgtcacccggttgcgcgctggctcggatgctttcgaaggcgacggttacgcgttttatccggaacgctccttgctggaggccgaatttcgggaaatctgggcaaggcaatccagcttctatccggatgtattaacagaggctcgcggcgatcatctgttccaggtgatgttctatcagcgtcccctgaagaagccccgcgtcggcaaatgcgccttcaatccgcttgaggagcggcttgccaaggcgcatccgcttttccaggaattcaggctctacaaggaggtcaacgaactggaactggtcttgccggaccatagtcacaagaagctcgatatcgagcagcgcaatgcgcttgtgatcctgctgcgcgccaatcgcgaagtgaccttcaagaagctgcgcacggcgttgaaacttgcccccgatattgtcttcaacaaggaaagcgaaagccgcgaaaagttgcggggcgacgaagtgcattcggtgctggcagacaagaagcgcttcggcccgcaatggggcgctctttcccgcgagcgccaatggcaaattatccagacgctcaaggatgaggaaaacccggaaaagctattcggctggctgaaggaagaattcggtttcgaaggcgaaaaggcagatgcgatcgcgaatgcccctttgccggaaggctatggccggctcggggagaccgctctgtcatccatgctggacgaaatgaaagctgccgttattccggaggcggaagcggcgaagaactgcggctacgatcattcaaagctcggtgaggaccgtgaggaaggcgaggcttttctgccgccctatcaggaaatcttgagccgccagatcccgccgggaacaaacgacccggctgatatctacgacattcggatgggtcgtttcaccaacccgacggtgcatattggcctgaaccagctgcgccgagtagttaacgctttgatcgcgcgccacggcaaaccgcaattcgtctcgctagagcttgcgcgcgatctgcagctttccgaaaagcagaaagccgaagccaatcgcgcgatcgcgaaaaatacgcgggaggcggcggcacgttcgaagaagcttggcgaaatgggtcagttggataccggttacaaccgactgctgctgaagttgtgggaggagctgaatccgagtaagccggaagatcgggtctgcatctattccggcaaaccaatcggtatcgatatgctgttttcggccgaggtcgatgtcgaccacatcctgccctggtcgaagactttggacgacagtcaggcgaacaagcttctttgcctcaagtccgccaatagacagaagcggaatcgcgcgccggccgacgtgcctgaatggcgggatcggtacgaggaaatcctggcaagagcagcacgcctagcgcccaataaacggcggcgatttgcgccaaatgccatggctgaatttgaagctgagggcggcttcctggcccgtcagttgaccgacacgcaatatctttcccgtatggcgcgggaatatctctcatgcctttttccgtcggcagaaatcgacaggcgtggtgagcgaaagaagaagatccgtgtcatcgtctcccctggccgcctcactgaaatgctgcgccggaactgggggctcaacaatattcttcctgatcataatcttggagagatgacccaggcaaagaacagaaaggaccatcgtcaccacgccatcgatgccgccgttgtgggtgttacgacgcgcagcctgcttcagcgcatcgcgaccgcagccggcaggctggatgaggcggatttcgaaaacctcgtcaggaaaatggtgtcggagaatccgccgtggcccacttttcgggaggaattgcaagctgccgtcaacggcatcgtcgtcagccacaaaccggatcatggcactgtttctcgcaagggttacgccgaaggtaagggtcggaccgctggtcggctacacaatgacaccgcctacgggttcggcacggacgcaagcggtaatccggtcgcggtccgacgcaagctttttacatcgttggaggccaaggatattccgatgatccgtgacccggagttgcaggccgagctttatgccgcaattgacggcttggacgacagacgagcgcttcaggatgctttgctgtccttccgtcgtactcatcccaaattcaagggcattcgcagagttcgaatggctgaaacattgtcgtttattccgattcgcgatagtcaaggcaacgtttacaaaggctataagggagatgcgaactatcgttatgacgtgtgggagacgcttgatgggaagtggcacgcagatgtcgtgaccatgtttaacgcccaccagccggactggcggtcaccggtgcaccaggaacatccgacggcgcgccgcgtgcttcgcctgcaacagaacgatatggtagcttacgaacatcccaatgatggttatacgattgcgcgcgtcgtcaagttcaacactgccggcatcgtctattttgcctctcatcgtgaaagcggcagcctcaaggcgcgtgacgccgataagcaggatccctttaagtatttctcgaaatctgctgcaggcttgaaggatatacagtgccggcagatcaggatcgacgcagctggccgggttttcgatccggggccgcaggatcgcgcttcgaagtcaaccagaaagacgaattagacatagcaatcgccaagctaccatttatgattgtttcatcgatttgtgatgcaatcaaaccatggatcggatcgtcgatatatcctcggacggccttcatttggccgtctatcgcggctttcttactgtctccaagaacggtgaggaacaggggcgtattgcgcttgatgatatcggcgccctgattgttcatgcacacggtacgacgtggtcgaaccatgttttcgtaaaaatggcggagcgcggcgtgccggttgtgctgtgcagctccaatcacgcaccgatttcagtcctgtggccacttgaaggccatcacgcccagggcgcgcgactgagagctcagattgaagcgtccaagcctctccagaagcagctttggcagaagatcgtctcagcgaagatcaggatgcagggccaggttctggccgcgaacggacgagagagcggcgcattcgatcttcttgcccgtaaagttcgctccggcgaccccgataatacggaggcccaagccgcaagacgctattggaaactgctgttcggctccgaattctaccgggaccgcgacgcagagggtgccaacgcacttttgaactacggctatacggtgttgcgagccattttctcccgcgccatctgtgcgtcaggtttgcaccctaccatcggcatttttcactcaaaccgggccaatgcctttgcgctttctgacgacctgatggaaccttatcgccctttggtcgatcaactcgttctgaacctggtctcgaatggcgaaagcgctgtatcgcccaccgccaaacgagccctgacctcgatctccacgttcgacctcgaaagcggtgcaggtctttcgccgctttcggttcaggccggacgtttcgttcactcgcttgccgtcagtttcgagacgggcgaggcgaagttggaactgccgttcctgccttcctttctcgagttgtctggacttggccggcaatctgtcgaggaggaggcgtgaaccaaccggcgcgtaaggccaacagcgggccgcgacatctaagtgggtatcagatcatgtggatgcttgtgactttcgatctaccggtggagactaagaaacagcgagccgcagccacgaagtttcgtcaattccttctggacatcggttttgagatgagccagctttccaattatttgcgtttttgcaacggcaaggaacagctcgagagctacgtgcgccagatcgagcgcgcgttgccggagtggggcgatatctatgtttttcagtttaccgatcgacaatacgaaaacatcgtccgattctcggaccaggcccgcaagaagcgccgaaaaaatcccgatcaactggcacttttttaagattcggcttgaatttgcaattatcgacaccgctcaattccctttttgtttcagggaattgagcggttatcgaacttagcagatcagaaaacgcggtccagccgcaacggggcggtccattgagcacgctcgccgccgaacttagcagatcagaaaacgcggtccagccgcaactgaaaccacaccgaacacgttgtactgtgtgaacttagcagatcagaaaacgcggtccagccgcaaccatcaccacgcatcaactgatttgcgtgataacttagcagatcagaaaacgcggtccagccgcaactattccgtctggcggaatgggcggtcggttaacttagcagatcagaaaacgcggtccagccgcaactaatcgacttcgcgcgtgacgcattgcaagaacttagcagatcagaaaacgcggtccagccgcaacgcgacggtggcgctgccgctgccggcgggggaacttagcagatcagaaaacgcggtccagccgcaacggcgaaagcggcgttgcgctgcaggcgcggaacttagcagatcagaaaacgcggtccagccgcaactgctgatttccgctatcttttccaggcgctcaacttagcagatcagaaaacgcggtccagccgcaacgatctgctctgttgagagatgcagggtgtcaacttagcagatcagaaaacgcggtccagccgcaacgaactcccccgcaacgtccgtaaccgcgccaacttagcagatcagaaaacgcggtccagccgcaacgaaagcgtgccgccggtaataccgtcatcgtaacttagcagatcagaaaacgcggtccagccgcaacctggtcaggatggtattcgtgccgcgcgccaacttagcagatcagaaaacgcggtccagccgcaacgcccgtaggtcagagtgaccgaggtggcagaacttagcagatcagaaaacgcggtccagccgcaacgaagcgtatcgaagggttagatgtgcgtgaacttagcagatcagaaaacgcggtccagccgcaacgtctttcttcttgcactcagggagccgataaacttagcagatcagaaaacgcggtccagccgcaacttgttgaagaccattggaatgatctgaccgaacttagcagatcagaaaacgcggtccagccgcaacagggcggcttgagtgatgacatgggcgttgaacttagcagatcagaaaacgcggtccagccgcaactcgccagcgaggcggcaaggtccagcgcgtcaacttagcagatcagaaaacgcggtccagccgcaacgctaggcggcggggtaccccccggggtcaaaacttagcagatcagaaaacgcggtccagccgcaacatgcggggtgttgtcgcctcaaaccatgcgaacttagcagatcagaaaacgcggtccagccgcaaccggtgtgcggacatttgccgagccctgtgcaacttagcagatcagaaaacgcggtccagccgcaacggatgatcgcgaggatctcccgctcgtcggcaacttagcagatcagaaaacgcggtccagccgcaacgtaaccgacgttttcgatcgcgatgccggtaacttagcagatcagaaaacgcggtccagccgcaactggaggtgagacccatggccgacgccagcaaacttagcagatcagaaaacgcggtccagccgcaaccgccgttattccaaggaatattaggtgggaacttagcagatcagaaaacgcggtccagccgcaacgacttccgccccacgtaggcccagaggttgaacttagcagatcaggaaacgcggtccagtcgcaacgcaatgacgtggtcatcgacggagtgacacaacttagcagatcagaaaacgcggtccagccgcaactgcgtcgtctcggaaacatggtcgcggaagaacttatcagaccgaaaaacgaggtctagccgcaatcgatggatgagatgcggggccgtggagttttaccagcggagagcgtctattgtaccttcgaacaaatggacaacacttccggcgcgatgaaatccatcggtcgcagcgccgaaaccaaactgccccttgacggctctgtgtctagtgaccggcgttggggtcgcgcatcggaatggacgagacggtgacggagaccggatcgcttgccgggaaggaatcttccaggccttcgttcagctcctcttcgagcagggcggcatccttgttgcgggcgctgtcgccgtgaacgggctcgaatacggaagcgagcaatgccttggctttggcgatggcattgtcgtgggtgaggtcgggggcttcgcgcaacgtgaccgcgatcctgtcctcgccttcactgccgaactcgacgacgaagccttcatcggcctggtagacgatgatatcgctgagtgccatgcccgttcctccgaaatcgctaatatgagtgaagcgcgttttcggctgtttgtcgagcaaagaccttcaccagccagtcgatgaagacccgcacgcgtggcgaaagctggcggttgcgcgggtagagcagcgagaccggcgtctgcgtcagcgggaaatcggcgagcacctcgacgagggtgccggcggccaggtcctgttcggcgtggtaacgcgggatctggatcatgccgagacccaggcgggcggccgatatgtaactttcggcggcgttgaccgtgacggttgcgggaatggtgacgttgcggacgctgccgtcgacgatgaattccagcggcagcgggccggcgctgccggttgcgcggaagcccaccatgcgatgcgcgccgagcctgtccggatggtcagggctgccgaaagcggcaatataggagggcgaggcgagggtgatttcgtccagcatggcgacccgtctggcgaccatgtcgctgtcctgcggggtgccgacgcgcagcacgcagtcgatgccctcgcgcaccagatccaccagccggtcgccctcgctcatgtagaattcgatatcggggtaggtctccagaaaggacggcaggctcggcagcacgaaatggcgggcaagcgtgccgtgcacgtcgacccgcagcagccccttcggcttggtgccggcgaaggcgccttcggcatcctcgatgtcggcgaggatcgacaggcagcgctgataataggcctcgccgtcgagtgtcgggctgacatggcgtgtcgtgcgctggagcaggcgcacgccgaggcgcgcctccagctgcttgaccgcatccgtcaccgtcgagcgcggcaggccggtatcttcggcggcaagcgtgaagctgcggcgctccacgacgcgggagaagacccgcatggcatcgaatctgtccatttagtttgttcgcactttccggatagtgatgccggataatggccgattatccgcagagcggaaaggggcatcttctcctcatcgaaagggcgctgcggcgccgaagcaaaggagaaggaaatgtctgccaatcaaaacaaggtcgctctcgttaccggcgcttcccgcggcatcggtgctgcgattgccgaacgcctcgcaacggacggctttaccgtcgtcataaattatgccggcaacgcggcgctcgccgaagaactggcccagaagatcgagaaggccggcggcaaggcgctgacggcgcagggtgacgttgccgatgcggaggccgtgcgccgcatgttcgatgcggcagaggctgccttcggcggcgtcgacgtgctggtcaacaatgccggcatcatgctgctgtcgcgccttgccgacgtcgatgacgcaagcttcgaccgccagatcggcgtcaacctgaagggcacgttcaacacgctgcgcgaggccgccaaacgcctgcgtgacggcggccgggtcatcaacttctcaagctcggtcgtcggtctgaaaccggaaagctacagcgtctatgccgcgacgaaagccgccgtggagacgatgggcgcgatcctctccaaggaaatgcgcggccgccagatcaccgtcaacacggtcgcccccggtccgaccggcaccgatctcttcctcaacggcaagtccgatgagctgatcgaccgcctcgccaaggccaacccgctcgaacgtctcggcacgcccgaggatattgccggtgtcgtcgccttcctcgccggccccgacggcgcctggatcaacgggcaggtgctgcgcgccaacggcggcatggtctgatgctttcgccgtggcggcctgagcgccgccacgctcttttctcgcatcctttcaatcaaccccgatcgaacagccacctgcacgaacagaaggaacaggaccatgagcaaacaagtcatcgtcatcaccggcgcttccagcggtttcggcgctcttaccgcccgcgcgctcgccaaggccggccacatcgtctacgcctcgatgcgcgaaaccgaaggccgcaacaagccgcaggtcgaggccgtcgacgccttctccagggaaaacggcgtcgatctgaaagccgtcgagctggatgtcgcttccgatgcctccgtcgaaacaggcatcgccaaggtgatcgccgccgagggccatatcgatacgatcatccacaatgccggccatatgtccttcggtccggcggaagcgttcacgccgcagcaatatgcggagcttttcgatatcaacgtgctttcgacgcagcgtgtcaatcgcgcggtgctgccacatctgaggaagcagggcaggggccttgtcgtgtgggtctcgtcgtcgagcacccgcggcggcacgcctccgtatctcgctccctatttcgctgccaaggctgcgatggattcgcttgccgtctcctatgccagcgagctgacccgctggggcatcgaaaccgcgatcatcgttccgggcgccttcaccaagggcacgaaccacttcgcccattccggctcgcctgccgacacggtccgcgccgcggaatataacgaaggtccctacaaggggttgccggaacaggcgctcaaggggcttgctttgctcgaacccgccgatgcggatgccgcttccgttgcgacagccattgtcgaagtggtgaacatgccgttcggcaagcggccgttccgcacccatatcgatccgtcgcaggatggtgcggaaatcgtcaacggcgttgccgaccgcgtccgggccgaactcttccgccgcatcggcatcgaggacctgctgaagcccgttgtcgggaaataaccgcctgtcgcaaagttgtgaacggtgtctcggcgtgctgccccttactatccggctaagcgcacctatatcagatcggacggaggcggacggcgagttgccgccagcctcccgacctccactccagggcctgccgcgcctttcctgcggtgcgacaggccttcagtttcagacatcagattaaggcccgtgacggttatccctcccatcgcgggccgctttcttttcgctttcagcgggcgttgagcttggcgtccgccagcagtttcaccagccagtcgacgaagactcgaaccttgttgctgaggtgcctgttcggcgggtagacgacgtaaagcggcagcgattcgcgcgtccattccgtcagggtctggaccagttcgcctttcgccaagggctcgcgcgccatgaagatcgggatctgggcgaggccgaggccggtaagcgctgccgtcatgtaggtacggctgtcgttgacggagacgatgtagcgcggactgacctcgatggtctcattgcccttgcggaactcgaaaggcacggtgcgattgttctgggcgcggaaatagttgacggaataatgttccgtttcaagctcttcgggccgctgcggcaggccgaatttctccacgtaaaggggggcggcgcaggtgatcatttcgatctccgagacgcgcctggcgatcagcgactggtcggccggcgtgccggcgcgcaaggcgcagtcgacattttcggcgagataatcgactgtgcggtcaccaacgccaaggtcgatgcggatatccggatagcgctggtagaaatcacaaagcgccggcacgacaatggaatcggcaaaggcgcccgccatctcgacgcgcagccgtcccgtcggcaggctttgggaattcgaaaggctgccgtccagttcctccagttcggaaatgatctgtgctgcgcgttcgtaatagagggcgccatccgtcgtcaccatgacgcggcgcgtggttcggttgaggagcttggtgcgcagatgcgcctccagcccctggataagatttgtcaccgtcgccttgggcatggcgagcatgtcggcggcgcgggtgaaattgcccgtctccaccacgcggatgaagacacgcattgccgagagttgatccatcggttcacttccgcagtttgcgttgcaacattgttcaggattcggaatagtgttatcgcgatatcgcttcttattccccgatttgaataacaatatctttttggcgcaaaatgcaagagacaggcgttgtctgtccctatgccaggcagcgaagagatagagacgatggtgcccgaaattaaggacatggtgctggaaaaggtggccgctggccccgtttctgcgcgtgtctatatgggggccgattttggcaaaggcccgccgatcgttctctacctgcatggcggagccttcctcgacagcgacccgaacgccgatcgcccgattgcggcgagccttgcgagggcgggtgcgatcgtggtttccgccgattacagcacgctctccggcaatgtctttccgaaggcgcttgaagtgtccttctcgatcttttcctaccttgccctcaagaaggccggccttggcgaccgcaagtcgctgctgttcgtcgccggggaagaggcgggtggcaatgtcgctgccggcgttgcgctgaaagcgcgcgaccagatgccggatgcgctggacggccagatcctgctttctccgcttctcgatcctttcatgggcacatcctcgatccgcaaggcggacaagatcggcatgcgccagcgctggacagagggctggagccattatctgagcggcggcggctgccatccctatgctgcgccctgcctttgctcgcggatttcgggtgttgcacccgcgctgatttttacggcggaggacgatccgctgcatgacgagaccctcggttacgccgctcgcctgaagaaggcaggcgttggcgtgcgccagcatgttctccccgccgggacaggctggccttccatttatggcggaaaatctgagggaacttcgatctggcaggacaacgtcagccgccatttcggggacttccttcaggatgtgagcgttcagccacaattgcattgacgacgaactgatttttacggccgtttgggccgcaaggagagtaccaatgacgtccaaaaataagcgctgggcccttgtgggcgccggcctcggcctcgctgcgtccgtttcggctgcggccatctttttcgaactgccgatgagcgcaactgccacggctgcctccgaacctgcgcagcctccggccgtgccggtgacagttgccgtcgtcgccagccgcgacgtgacgaactgggagaatttctccggtcgcctggaagccatcgaccgcgtgcagatccgcccccgcgtcggcggcgccatccagtcggtgcatttccgtgaaggcgcgctggtgaagcagggcgacctgctcttctccatcgatccggctccctatcaggcggctgtttctcaggcgcagggccaggtcgcttcggccgaagccaaggtcagcctggcgcagaccgaactcgaccgcggccgccgtctctcggacaaccggacgatatcgcagagcgatctcgaccagcgccagagcacgttggccgaagcccaggcgagcctgcgttcggcacaggcagccttgcagtccgctcagctcgatctcgactacacgcaggtgcgtgctccggtttccggccgcatcggcaagatcgaagtgacggtcggcaacattgtcgcggccggttcggcctcgccggaactgacgacgctggtctccgtcgatccgatctacgcaagcttcaacgcaagcgaagaaatggtcacgaaggcgctttcgcagcttccggcaaccgacgcggcactgccggctgtcgagcagatcccggtcgagatcggcacgctcgccgacgacggcacgccgatcaagggcaagctgcagctcgtcgataacgaggtcgatgctgccagcggcacgattgcggtgcgggcggtcttcgacaatcccggcggcaagctgatccccggccagttcgtgcgcgtgcgcatgggccagccgaaggccgagaacaagatcgtcatcagcgaccgcgccgtcggtaccgaccaggacaagaagttcgtcttcgtcgtcgacgatgagaacaaggtcaactaccggcagatccagctcggttccctgttcgacggccagcgcgtggtcgaaggcggcctgaacgtcggcgacaagatcgtcgtcaacggtctgcagcgcatccgtccgggcgcggtggtcgcaccgcagatggaagagaaggtcgcgaccgctcagtaaaatccagcctccttccctcgggcaggaggccgccaacccgacatgaaatgacctgccggcaggccctcg

SEQ ID NO: 3023 - DNA, 23276 bp, synthetic construct
  misc_feature 1..23276: note = Synthetic
  source 1..23276: mol_type = other DNA
gttgggcagcgctatccgtgttgacacccgcgggcgtgaagttatgcgcatcatgccgcgtgtcaatgaagcggtgaatgaagaatggatttcggataaaacccgctttatctgggatggtctgcgcacgcagcggcttgaccggccttatatgcgcaatgcccaaggccggcttgttgccgcaagttgggaagaagcttttgctgctgttaaaacagcggttgacgacgcgaagaaaagccatatcggcgcgattgccggtgacttggccagcgttgaagagatgtatgcgctgaagtcactgctgaaagcgtggcgttcagataattatgactgccgtcaggatggtgccgcgcttgatccggcactggggcgggcaagctatatcttcaacccgacgattgccgggattgaagagtccgatgcgctgttgattatcggcagcaacccgcgttttgaagcggcggttctcaatgcccgtattctgaagcgtaaaaaggcgggtgcgtatcctattgcgctgatcggtgaacaacgggatctgcgttatccttataaacatctgggcaccggtgctgaagctctggaaaaactggctgaaggccggggcggcttctacagcctgttgaaaaaggctgaaaagccgctgattcttatcgggcagggtgctttgaccggtcgtgacggcgcaaagatactggcattggcagctaaaattggcgttgccgttggcgctgttggtgaggagtggaacggttttgcggttctgcacaccgccgctgcgcgggttggtgtgcttgatattggttttacgccaaaggatagcagcaaaacagccgcggatattgtccgcgaaagtgaagtgttgttcctgctgggtgcggatgagatcagcctgtccgagaaaaaaggctttactgtttatatcggcagtcacggtgacaagggtgcacatgcggcggatgttatccttcctgcttctgcctacacggaaaagtcgggcatttatgtcaatacagaaggccgggtacagatgacaagccgcgccggttttgccccgggtgaggctagggaagactgggccattctgcgtgccctgtctgacgtgctgggccatcgcctgccgtttgattccctgcgtgccctgcgtcaaaaactttttgttgagtatccgcatctggcagccgttgacacgatcgttaaaggcgaggcaaaggatcttgctgcccttggcaaggctgccggcacggcgacaaggcagctttttgtctcgacagttgcagatttttatttgaccaaccccattgcgcgggcttccgcagtcatggctgaatgttcggccctgacgcgcggccgccttgcggaagctgcggaataagggataagggataagggataaggtgatacagaatgtatgattttttcatgacctggtttttaccgcttctgatcattattggtaaatccttgcttttgctggtggttttgctggtgctgatcgcctatctgctgtatgccgaccgcaaggtctgggcggcagtgcagttgcgccgcggccccaatgtggtcgggccctggggtttgttgcagtcctttgccgatttgatcaagtttgccgtcaaggagccgattattccggccggcgcaaacaaggtggtatttttgcttgcgccttttgtttcggctggtctggcgctatgcgcctgggcggttattccggtcagtgaaggctgggcaattgctgatatcaatgtcgggcttctctatatctttgccatttcttctttggaagtttacggcgttatcatgggcggctgggcatccaactcaaaatatcccttcctcggggcgttgcgctctgccgcgcagatggtttcttatgaggtctccattggttttatcatggtgacggtgctgctttgcgtaggttcgctcaatctgagcgatattgtgctggcgcagcagaatggtttcggcatcagggtgctgggggtttcgacagcctcgttcctggactggcactggcttggcctgtttccgatgtttgtcgtcttcttcatttcaacactggcggaaaccaaccgtccgccgtttgatctggtggaagcggagtcagaacttgttgccgggcatatggttgaatattcttccaccccgtatatgctgtttttcctcggcgaatatgttgctattgtgctgatgtgcgcgctgaccaccatcatgttccttggcggctggctgccgccggtcgatgtggcctggttcaactgggtgccgggtgtgatctggtttgttctcaaggtctgccttgtgttcttcatgtttgcgatggtcaaggcatttgtgccgcgttatcgttacgaccagctgatgcgcctggggtggaaagtatttctgccgctgtcgctcgccatggtggtgatcaccgccggttttctgaaatttatgggctgggcataggagagatgaggatgtcaggtatttttcaggctgcaaaatctctgcttctgctggagtttgtcagtgcattttttctggcgatgcggcagttcttctcgcccaagccgacaatcaactacccttatgaaaaagggcatatatcgccgcggtttcgtggagagcatgccttgcgccgctaccccaacggggaagaacgctgcattgcctgtaaattgtgtgaggcaatctgcccggcgcaggcaatcaccattgaagccggcccgcggcgtaatgacggcacacgccggacagtgcgctacgatattgacatggtcaagtgcatttactgtggcttttgtcaggaagcttgcccggttgaggcaattgttgaagggccgaattttgaatttgcgacagaaacccgtgaagagctgtactatgacaaggaaaaactccttgccaatggtgaccgctgggagcgggaaattgcgcgcaatatcgcattggatgcgccttatcgttaaggtgcatcaccaccggttctgccggtaaaaagtgaagacgcggcgctttccttccgcgtcacaggatattgattaaccttgggggaaacccatgctgacaggtatagcggctgcgtttttctatctctttgcctttatcatggttgccagcgcaatcatggtggtggcggcgcgcaatcccgttcattccgtgctgtttttgatcctcgccttcttcaacgcggcggcgttgtttctgttggcgggggcggaatttttggcgatgattttgctgattgtctatgtcggcgcggtggcggtgctgttcctttttgtcgtgatgatgcttgatgtcgattttgccgaactcaagcagggagcgctgcaatatgcgccgcttggcgcagtggtcggtcttgtcgtgctggttgaactggttgtggttttcgtctcaaaccgtattataccggattttgccgcacccgtggcgggcgctgtgacgaatgctgcagggcgcagcaacacgcaggctataggcgatgtgctctataccgattatgtgttctatttccagatagcatcacttgtgctgctggtggctatgattggcgccattgtgctgaccctgcatcaccgcccgggtgtcaaacggcagtcgattgcgaaacaggtggcaagaacacctgaaacagcaattgaagtcaaacaagttgaatctcataaaggtatttgacgggaagaagaccatgcatattgatattgctcattatctgaccgtttccgccattctgtttacgattggcattttcggtatttttcttaaccgcaagaatatcatcatcattttgatgtcgatagaactgatcctgctttcggttaatctgaactttgtggcgttttcttcccagttgcatgatctgcgcgggcagatttttgcgctgtttgtgctgacggtcgccgccgcagaagcggcaatcggtctggcaattcttgttgtcttcttccgtaaccgcggttctatcgcggtggaagatgtaaatgcgatgaaaggttgacgggattatgttgtataaagctatcgtcttcctgccgctgatcggatttttaatggccggtctgggtggccgcaccattggtgtgcgcgccagcgagtttgttacctgtacttttatggtgcttgtcgccgtgctttcatggattgcctttatctctgtcggccttggcagcggtaaagccgtatcggttccggtgttgcactgggtatcaagcggcggccttgtttttaactgggcattgcggattgatacgctgacagcggttatgctggttgtggtcaataccgtttcggcactggtgcatatctattccattggttatatgcaccatgacccgagccgcccgcgcttttttgcctatctgtcattcttcaccttcatgatgctgatgctggtcacagctgataacctcatccagatgttcttcggctgggagggggtaggtcttgcttcctatctgctgattggcttctggttccagcggccaagcgccaacaaggcggcgatgaaggcctttatcgtcaaccgtgtcggcgactttggctttctgctgggcatttttggtgtgtttgtcctgtttggcgctgtcgggtttgagacaatctttgccagggcgggttctggtgaatatgtgcagaccctgcagtttttaagctggcgtttcagtggtcatgatgccttgacagtggtttgtctgctattgtttgttggcgcaatgggtaaatcagcgcagtttctgctgcatacctggctgccggacgcgatggaaggcccgacaccggtttctgctcttattcatgcggcaaccatggtgacggctggtgtttttatggttgcgcgcatgtcgccggttttcgagcttgcgccggcagccttgacggtggtggttttcatcggggcgacaacggcgttttttgccgcgacagtcggccttgttcaaaatgatatcaagcgggtcattgcctattccacctgttcgcagcttggctatatgtttgtggcgcttggtgtcggtgcctacggggcagggattttccatctgtttacccatgctttcttcaaagcattgctgttccttggcgcgggttcggttatccatgccgtttctgatgagcaggacatgcgcaagatgggcggtttgcgccaatatatcccgacaacctactggatgatgattattggtacactggcgctgaccggggtcggtatccccggtacatggatcggtgcagccggtttcttctccaaggatgcgattattgaatcggcttttgcttcgggtaattctgttgccggatatgccttctggatgctggttattgctgcattcttcaccagtttttattcatggcggctgattttcatgacgtttcacggcaagccgcgggcaacagcggatgtcatgcaccatgtgcatgaatcgcctcctgtgatgctggtgccgctggtgctgcttgctattggtgcggtattcgcaggtgctgtgttcctgccctatttcttcggctcgtcctatgccgggttctggaagggcgctttattctccgccagcaagaatgcaattatggaacagtctcaccatgtgccgctgtgggtcaaatggtcgccgtttatagtcatggttgccgggtttgttctggcctggctgttctacattgttgcgcctgccattccccgcactctggcccgcatcttctccggtccgtacaaatttctgctcaacaaatggtattttgacgagttgtataacttcatctttgtgcgcccggcttttacggttggccgtttcttatggaaaatcggtgatggtaaaattattgacgggcttggacccaatggtgtggccgcgcgtgttctggatgtgaccaatcgggttgtccggatgcagaccggctatctttatcactatgcatttgcgatgctgatcggtgtcgccgcactcatcacatggatgatgatcgggagtttttacagatgacgaccgcttcttggccaattctttcaacggttacattcctgccgctatttggcgcgctgctcatccttttaatcaaagatgacagtgagagcgcccggcgcaatatccgcaatgtggctttcatcacaacggtttttgtctttattctttccctgcgtgtctgggcgctgtttgataatggcgttcagggcttccagatggcggaaagcttcaactggcttggtaaaaatatcagctaccggatgggcgttgacggcatttccatgctgtttgttgtgctttccgctttcctgatgccgttttgcattctggcaagctggaaaaccgttcaggacagactcaaggattatatgatcgcgtttcttattctggaaacgatgattatcggtgtgttctgtgctcttgacgcggtgctgttctatattttctttgaaggcagccttattccgatgttcatcattatcggtgtctggggcgggccgcgccgtgtttatgcgtcgatgaagttcttcctttacacactgcttggttcattgctgatgctggtgggcatcatgtatttgtatcatgcggttgggacaacggatattgcaaccttgctgaaagaagcgccaggagtactctcaccaaaggcgcagttctggctgtggctggcgttttttgcctcctttgcggtcaaaatgccgatgtggccggtgcatacatggttgcctgacgcccacgttgaggcgccaacggccggttcggtcattctggccggtgtgctgctgaaacttggcggctatggtttcctgcggttttcattgccgatgtttccgctggcttccgctgatctggcgccctatgtgttcgccctttcggtgattgccattgtttatacctcgctggtggcgctggtgcaggatgatatgaaaaagctgattgcctattcatctgtcgctcatatgggctatgtgacgatggggatcttcgccgccaatgtcaatggtgtggaaggcgcgattttccagatgctgtcgcacggtattgtttcggcggcgctgttcctgtgtgtcggcgtgatttatgaccggatgcacacacgcgagatcgccgcttttggtgggctggtcaacaatatgccgaaatatgctgtggtgtttctgattttcaccatggccaatgtcggcctgccgggcacttcgggttttctgggtgaattcatgacactgatcggtgttttccaggtgaatacatgggttgcggcggtggcgacaacaggcgttatcctgtcggcagcttacgggctttatctctatcgccggattattttcggcgcactggataaggaaagcctgaaggcattgctcgacctttcctcacgggaaaaattcattctctatcccatgattgcgctgacaattttcttcggtatctatccggcgccggttcttaatgttgtgcatggcgcggttgatgttcttgttcgtaattatgatcttgcgctgtcggcagttcctgccgctgcggcaatcgtgcagtaaaagaggcaaaagcagatgcaaactgatctgattgttcaactgacgctgatgcttccagaactgctggtggctgcaggagcaattgttttgctccttctcggggtcttttcgggaacccgttcctatatggccatcaatagtctggcaattgttattctggcgttggccattattctgcttgtcatgtctcctgctggcggcgctgcttttggtgatgcgctgatcatggatgcattcagccgttttatgaaaattctggcgctgggcggcactttggtggtgctgttcatgtcgggcggctatgcaagggcggaaaaattcgacaagtttgaatttccgattctggccttgctggcgacgcttggcatgatggttatgatttcagcgggcaatatgctgtcgctttatctggggctggaattgcattcgctggcgctttatgtgctggcggctttcaaccgtgacaatctgcgttcaactgaagcaggcctgaaatattttgtgctgggcgctttgtcttccggtatgctgttatacggtatcacgctgatttatggttataccggtcatttcggctttcgcgagattggcgtggtgtttgcagcgggcaagctgccactcgggattgtcttcggggttgtctttgttctggccgggctggcctttaaaatttcggctgttcccttccatatgtggacaccggatgtttatgaaggtgcgccgacgccggtaacggccttttttgccagtgcgccgaaagttgccgctattgcgctgattgtccgcgttatcatggtggcgtttggcggtggcggcaatgctgttccggcaatggggatgccagcatggcaacagattgtggtgtttatcgcgcttgcttccatgctggtcggtgcttttgccggtatcgggcagaaaaatatcaagcgcctgatggcctattcatccatcacccacatgggctatgcgcttgttggtctttcagccggcaaggccggtgtggatagtgttatcatctatatggttatctacacggcgatgacacttggctgctttgcttttattttgggcatgaacaatcgtaacggttatgttgaaaatatcaatgatctggccggtttggcgaagagcaatccgttcatggcggttattatgaccatgcacctgttctctcttgccagtattccgccgcttgccggcttcttcgggaagtgggcgacattctcggcagccgttggcgccggtctggtgccgcttgcggtggttggtatgctggcttctgttgtcggggcgttctattatctgcgcatgattaaaattatgtggtttgatgagccgcagggcagttttctgacattaccggcggaattgcggctggttctggctgtatcaggtatttttgtcctgttctatgtattcattgccatgggtcttgcgccatgggttgaaacagctgcaaattcgctgtttttaaaaatgtagacatggtttttcctctatcgccttccgctgtaaaaaacggttatcgggtggagtcgtttgaaaaggttgactccaccaatttaatggcgatggagtttgccagaagcggcgatgctggaaagctgtgggttgtggcaaaccggcaaacctcagggcgggcacggcgcggccgtcactggatcagtgatcccggcaatctttatgccagtttgctgctggtggggtgttttgaggctatcagcgtggcgacacttggctttgtcgcgggtgtctcggtggctgaaagtttaaaatcgttattgccgtcttcttgcgaacacgtatctcttcaacttaaatggccgaatgatattttgctcagtggagccaagctatcgggcattttgctggaattgttgccgcttgccaacgggcagaacgcacttatcatcggtatcggtatcaatatcgccagtgcgccaacagatacgccttatccaacagcttgttggcagcaggtagtgccctgttgtacggcagaagatgtgtttgccgccttgtcacattcctgggtggataattatgcgctgtggaatggcggggcagggcttggaaaaatccgtgagaaatggctgagctatgcggccaatcttggcaagccggtgcatatcagcatgaacaatcaacggattgatggcatatttgaaactattgatgaaaattgccattttatcatccggcggaatgatggcacacgtgtggccgtgcccgccggtgaagtgcatttcggcacagccgcttctgtgtataaaaaaatctgacagcacattgtgatataaaatgaaaacggctcccggaggaaccgccttatctggtgctggtcaaggcttgttaacggccagaccacgttttctaatctatttactaacatagcaaatggaaaaacgttgtcaatcaatttttaaaaatatttttcttgtaaaatcaggatatttatatagcctgtttaattatcaatattttattgcagggaaaattgcgatgtcgtgtcagcttccgttatattctaatcatttattttcatttgatatcggtaccaattctattggctggtgtgttcttgaattggataaggtcggtgtgcctgcatcgatcaaggatattggtgtacgaattttttctgatgggcgggaaccagccgcagatggcaagcgcggtgcctctcttgctgttgcacggcgggaggcacgcagtatgcgccgtatgcgggatcgctatcaatggcggcgtaaaaagaccctgtcggttctggtcgaatatggtttacagccagcggatgaggctgaacgcaaaaaactggtggcggaaacaggggatcagaagcctgattctacggcaccgaagattgatccttataatttgcgccgacgggcgctgacagaaaaattgccgccatactatattggacgggcgttgtttcagcttgggcagcggcgcggttttaaatcgaatcgcaagacagaccgcaaaagcaatgagaaggggcaaatcgctgttgctgtagaagagctgtcagcacgcatacaaatggctggtgtgtcaaccctcggtgcttatctggcgatgcaacgtgaaaaggggcacgtgattcgtattcgtgctggttcggaagcgttttctgagaagaatgattatgctttttatcctgaacgctccatgctggaagatgagtttcataaaatatgggatgcgcaggcagaattctatccggatattttgaccaaagcgcgcaaggaagacctgtttaagattatattctatcaacggccattgaagaagcctattgttggaaaatgttcctttaatccggctgaggaacgtttgccaaaagcgcatcccttgtttcaggaatttcgcctgtataaggaagtgaatgaattaggtgtccggatgccagatatgtacgtgcgcaagctgactgtggaagaacgtgacaaattgatttggcaattgcgccagaagaaaaaaccaagttttgctgctttgcgtaaaacgctgaaattgtcgaatggcttgacctttaataaggaaagcaaaaaccgcacggacatgatgggcgatgaagtctatactgtaatggcggataagaaacgcttcggcaatcgctggagtgaattttcgcacgctgaacaatggcagattattaaagagctacgggatgaagaaaatcctgcaatattgaaaaactggttgcaggaaacgtttggcctgacggatgaggagcagcttgcagctatcatggatgcgccactgcctgatggttatgggcggcttgggcaaacagcaatggctgccatgctggaaaagctgaaggaagatgtcattccggaagcagaggctgccagacgttgcgggtataatcataccttgtatgaccgtgagcatgaagggcatgatgagttgccgaaatatcaggaaattctggagcagcatattttgcccggtacaggcaacccggatgattcctatgatattgaaaagggacggattaccaacccgactgtgcatatcggccttaaccaattgcgccgtctggttaaccgccttttgcataaacatggaaaaccagcgaaaatggtggtggaactggcgcgggatttgcagctttctgacaagcaaaagaaggaagttaacaaaactataggtgaaaataccagggcggcggaaaagcgttctgaaaaactgaaagaacagggtgagagagacaatggctataaccagcttttgctgaagttgtgggaagaactcaatgaaaaaccggaagatcgtgtctgtatctattccggcaagccaatcaatattgaaatgcttttttccggcgcggtggatattgatcatattcttccctggtcaaaaacattggatgatagccaggccaataaaattctctgtctgaaggaagcaaaccggcaaaagcgcaatcgcgccccggcagaggtaacagaatggaatgaaaaatatgatgacattcttgcccgtgcggcgcgcttgccaaaaaataaacaatggcgttttgctcgtgatgccatgaagcgtgctgaaggcgaaaatgattttctggcacggcaattgactgacacgcaatatttatcccgcatggcggtgaaatatcttgattcgctatatccggcagaagaaccggatgaacatggtgaattgaaacatcgtaaacatgtctgggttatcccggggcggttaacagaaatgttgcggcgcaattggggcttgaatgatattttggctgacgcacaaataacagataccaacaagccaaaaaaccgtcatgatcatcgtcatcatgccattgatgccgctgttattggggtcacctcccgtgctttgttgcaaaggattgttacagccgcagcaaaaatggagcaggatgatctggaaaatctggtgactaaaattgtcaaggataaccagccctggcagggtttttctgacgatttggcacaggccattgccggtattattgtcagtcataagccagaccatggcacagtttcccgtgccagctatgcacaaggcaaggggcaaactgctggaagattccatgaggaaacagcctatggcttaacagggcagagggataaccgagggaagacaattgttgtctggcgtgttcctttcctgtccttaaaggaaaaagacattataaatatccgcgatgacaagttgcgtagtgaagtggaaattgccgtttacggcaaagatggcaaggactttgaaaaggctctgcgcgattttcagcaaaaacatttgcgttataaggggatacggcgtgtgcgtataacgggtacgcgtaatgtgcttcaaattaaagatgctgatggaaaagcctataagggctatcgtggtggcaccaattatcgttatgatgtttggttgacattggacggtaaatggcatagcgaagttatttcgacatttggtattcatcaacctgggtgggtttctgcatttcatgcgcaaaacccgacagccaaaaaagttttgagcttgcaacagaatgacatggttgcttatgaacatccagaagatggttatactattgcccgggtcgtagaattttatcaggatggaaagattgctttttctcctcataacgaggctaatgttgctcgacgcaataaaaataagggtgatcccttcaaatatttcgtaaaaatggctaatcctttgaaggctatccaatgccgtcaagttcgaatagatgaaattggacaggtttacgatgcagggtttcaaggataggcaataaaaattttgagttaataattcccgctttattgaaaaggtaaagcgggatttttttaaggaaaaaattacgaattagggagtaatgtaaggaatataagtaatatttttctttgcaagcggtatattggcatggatcgtattgttgatattgaaacggatgggcaacatcttgctatttatcgaggctttttgactgtcagtaaaagtggtgaagagattgggcgtatcgctgttgatgacattggtgcgttaattgttcatgcgcatggcataacttggtcaaatcatgtttttgtacgcttgtcagaagcaggcattcctgttgtgctctgtgcgcaaaatcatgcacctgtttcaattgtctggccgttggaaggacaccacgtacagcatgcccggatgaaagcgcagatgcaggcttcgcgcccattacaaaaacagctttgggcgcaaattgtaacagcaaaagtgcggatgcaggggcaggttatcaaggctgcggggcaaaataatgtggcatttgatatgctggctcgcaaagtgcggtctggtgatccgcaaaatattgaggcacaggctgcaagaaaatattggcaactgctttttggttctgattttcgccgtgacaagaatcgtagtgatgccaatgcattgctgaattatggttatacagtgttgcgagccattgtttcccgcgcgatatgcggttcgggtttgcacccgactttaggaatttttcattcaaacagctataatgcctttgctctgtcggatgacttgatggaaccatttcgtcctgttgttgatattgttgttcgtaatctgattgcggcaggtaaatatgatgttgatcctgaaaccaaaagtagcctgacttctatttctacctttgatctggaaggtgtggagggaacttcccctttaacactgcacattacccgactggtacattctctcgccaaaagcttcgaggctggtaaggccgagttggtttttcctcgtttgccttcacatatagaattgtgcagcttgggcataagccttgaagaggaagaagtcagtgacagcttatcttgagcgggcaacatcaagcccgcgccatttgagtggatatagagttatgtggatgttagtgacttttgatttgcctgttgaaaccaggaaacaacgccatgatgcaacaaaatttcggcagggcttacttgaccttgggtttgaaatgagccagttttcaaactatatgcgtttttgtaatgggaaagaacagttcgaatcatatgtacaaaaaattgcggctattttaccggagcagggtcatgtttatgtattccaatttacggatcgtcaatacgaaaatattgtccgtttttcggatcaatcacgccagagacgtcaaaaaaatccgaatcagttggcgcttttttaagatgatttgcgatttttttaaaaacgaaacccagttaattctttttaaagacaaagagttaactgggtggcaattatagcagattagaaaacgaggtccagccgcaacgaactgactggggacgcttttaccagttttattatagcagattagaaaacgaggtccagccgcaaccaataaggctgcaccagtcgttgaccttgcattatagcagattagaaaacgaggtccagccgcaacgtagataccgtcagcaaatatttctgctttattatagcagattagaaaacgaggtccagccgcaacgcgcacagcagagcgtacctgtgttgtataattatagcagattagaaaacgaggtccagccgcaacagagagtgagtttttggcgaccgccggtcaattatagcagattagaaaacgaggtccagccgcaactgacaggggcaatcagatatgtataatgggattatagcagattagaaaacgaggtccagccgcaactaagtctatcactactgtggcaaaggcgctattatagcagattagaaaacgaggtccagccgcaaccatggcggggtgggaaaatcatccagactgattatagcagattagaaaacgaggtccagccgcaacaccaaaagagacgtgtgagcaattccgatattatagcagattagaaaaccttgggttgctttgactgcctgtttttgattataatcattgaagccttatgtaacctgctttatactcaaggcgttggatgcctaaggaaagggtttatatgcttaaacgtttaaatattgcgctggccgctgtggcaataactgcagggaccatgacagcggcccaggcggcagatgacattgatgtcattgtgttgaatgctgatatcaggacggttgatgctgccaagccgcgggcagaggcgcttgctgtcaaggatgggaaatttattgctgttggcagcagcgcttatatcaaaagcctgggcggggaaaaaacaaggatcattgatgccggtgggcgaacgctgatcccgggcattgccgatgcgcatacacatttgcttggcggtgctgatttgttgcggggcgttgatctgtatgggttgaaggacatttcttcctggcaggccgccatcaaaaaacgtgcggcagaattgccggaaggcgcgtggctggttggcggcagatgggaaggcattattcatatgccgacaaaagaggaactcgattcggttgtaccggataggcctgttgccttgcttgatctggatagccatacgctgtgggtgaattcaaaggttctggagctcaccggtattacggctaaaaccaaagcaccggcaggtggcgagattgtgcgtgacagcaagggggagccaaccggcgttttgaaggaaagcgcaatggggcttgtgtttgaccatgcggcttttgccaaaacaaaaacctccaaagctgctgattacgaacagcttgcgcgccattttaacagtgttggtgtgacaagtgttcatgatatgtgggataatcttggcgaatatgaagatgcctggaagaatagcaaaaataccttgcgtgtctggttcggcttgctggatattgctggcgatagagaggtgcggcgcgctgattttactgctcttgccgcgcaacagaagcgtatcaataaagaagctgccgagcgcgaggcgcgggaagctgtcggcccgaaatttcgttttggttatctgaaatatttcagtgatggtgcattatccggctatacggctgctttaaaacaaccctatgctgaccgtgaagatggctttgcggggcagccggtacagacacaggcgcatttgaatgcggttgtgacagaggcaaaccgtgccggttttccggtcgcaattcatgccattggcgataaaggggtggatatggcgcttgatgcttttgcgcaaagcccatatcgcgatggtaaacttaaccgcattgagcatattgaggttgcgtccaaagagatactcacccgttttgggcgtgagggggttgtggcggcaatgatgccggatcatgcgatggatggtgattttcaggaaaagcggctgggggaagcgcgtttgccggatagctatgcctggcaggctattttaagcaatggtggcttgcttgtttttggcacggattggccgacagcaaaagaaagcccgctgttgcagcttggtgatgcggtgttgcgtatccgtaatggtaaaacatggtatggtgaaaacgccctgacttttgatgaggcgctttatgcctatacgcaagcgccggcgattgttgctggttgggaaaaagagcttggcagtatatctgttggcaaatgggctgattttgttattctgcaaggcaaggtacaggataacccgatgacagatattcgtgactggaaggtggaccagacatggtttgccggtcaaaaggtttttgaccgtttgcagtaaatagagtggaaaagaagcattatttcggtttttggaatgccggataagatttctggggatctgccatggatgattatgagagatttgctgcccgtttgctgattgttttcagtgcggtgattatcggtggcctgatggccatgcatattacggtttatagcaaggccggttttctgtttgcgctttcagccgcggtatttggctggttttcggcttttgcggtcttgtttgacaagccgcgtgtttatttctggctgattgtggtggcagtgctgtgtgttggcgcttcaataggggtttatgtgcgctgaggcgggcatataaaatgagggcatttttaaaagggaagtggataggggtatgaaaattgcaattggttcagatcatgccggatatgcgctcaagcagcttattgtcgagcatcttgagcagcaggggtattctgtcaatgatatcggaacgcatagtacggaaagcactgactatccccaatatggccgtgctgccgcggaagaaattgtatccggcagagcggacaggggcatattgatttgcggtacaggggtcggcatttccatcgctgccaacaaggttgccggtattcgtgctgtcgtgtgcagtgatccactgacggctgaactatcagtgcggcataataacaccaatattctggcgctgggagcgcgtattgtcggcgatgaactggcaaaatatctggttgatcattggttgcaagcaaaatttgaaggcgggcggcatctgcggcgtgtccgggagattgagccggagcatggaaaataagtgctgatttttatcaaaagggggacagtgatgaaaagattggcgtttccgggggtggttgctattttcctgtcaggatgtttgacaaaggaagttcatttatatccgatctcagatgaggggatgtcgacacatcttattcgccttagggcaagcggccttgagggggcctcgggtgctttaacaggtacattgccgaatggagtggtctgccatggtaaatgggcgtcgacagtgtcaacctcaaatgaaatcatggcgcattacaagtcgaatgccaggaatggtttggcaacaatgttaacgcaaagaaggagcgttgtgccaaagataaatcccgggcaagcatttttaagctgtagtgacgggacaatgattgacattgagtttgttactggcacggccaaaggcggctatggtgaagcccgtgataacaagggtaatgtttaccgcgtgatcatctgaaacattgttcgttacctggtctcctctccatccggcattgatctgaaatcatctgcacgaccggattgcgggtaaaaaccggtgttgttatgtggctttccggaggcgggctgcgcaccataaaggctgcttgcggcaggggagatgtcccaaaggccggtgggggcaatatgcctgatgtcgcgccgtgcgcttgtgcctacaatgggtatgctggccataccgccactggcggatatctggttggcaagaagcggggcgataagctggtcagcataaaatgccagtttgtgtttaccggcgatggtaaagctgatgccgtcattattgcgcaggcgtgctgtctgcccgttactgtcataaccggaaagggcaaaatggccgttgtcatcaacaaagccgctccagatatcgataaaatgtccaccggatttttctgtcgcctgtttatataaggcgttgaaggaaacaaaactgtctgacagaattttttgtttaaaggacggcaggccgacccagagccattgcgcgccgctttgttgcagtttaagggccagagcgttgatacggccctggtaattgcttgcccattcgggggaggaaacgtcaaaatttttattggcgagcctcatactctgccggtcattggcgccaatcaccagaacaataacatcgggtttgtctctggcgataatatcagaaatcttgatcggccagttgtaataatcatcgcgcacaagaccggaagagccttctgtccggctgataacattcatttcaggattgtctttgtacatatctgtcaagccgtccgccaaagcgccggcgacaaaatcaccgacaatgacaatgcgttttgccgtgggatttttgggtgcggccgcaggccgctgcctggattgcataggctgtgtgccatagatttgctgttgctgcccctgacggatgatgacgcggcgctgttggtgcggccggacaggttgtgtgattcggggttgtttgcgcccgaataaaacatcaaagagcgaacgccgcttttgttgtgcggcagccgggtcaatcgtgagtgtggtaaaaatcacggcaagtataacggcaatgacgctccagataccccctttatatgtatgcaggcttttgatcattgtttttccattcatctacgctgcaggaggtttagaacctctctgcctggatatccgtcaaccggctgcttcatgcggcgttgaaatgcctcaattgccctgcgggtttcattgccggttttgccatctattttgccgctatacagtccaagggcagcaaggcgctgctgcagttcctgccgttcgctatgatttagggcggtaaatggccgctgccagtcacgcacagggctgttgtaaccgccgattctgtcggccagcaagccgacagccagggcgtaacggtcggcgttgttataacgcttgagcgtaaagaaattgcctgttaccagaaaaaccggaccgctgtggccatccggcaatttgagcgtggctttctgggaagcggcagggaaggggcggccattggcacgtttaaggccaagctgccgccattgggcaatggtcaaggagtcggccggaaacctggccattgccggcagaatgacctcatagccccatgtttcgttgtttttccagccattacgggcaagcagattggctgcacttgccagagcgtcgggaacagatgtccagatattacgtctgccgtcaccgtccatatccactgcataagcaaggtaacttgtcgggataaactgggtatggccgagtgctcccgcccatgagccgcgcaaatgggcgcggtcaatatcacctctttgcagaatttttaaagcggcaatcaattgcgtgcgggcatagcgggcgcgtttgctgtcgccccaggcaagggtggccagcgagcggatggcatcacgcatgatgtcatcgcgtttcatgacctcgccatagccggtttccatcgaccagatggcaagcaggatattgcggctgacgccaaagcgtttttcaatcgcgtcaagccattttgcccattgtctggcgtgggcctgaccagtctgtacggtatgctcgttgacgcggttgtcaaaatagttccaggcagggtcggtaaattccggctgggtttgggctttctgcaaaacttccatatccggtgtggtgataccggccacagcacgtttccatgttgcggcggttattccggcctgtgcggcggtgttttgaaaattgttcagccaggtttgaaaactgtttgcgccatgggccgtgccgggtaatcctgcggcggcaaatatggcgcctgctatgaacagaaactgccgcctgccggtggtatggggagggaacagctttttgacaaaatagggcatgggcgtttatttcttccctgtcatgatggaaaaaacatcataaagccatatcattataatttggtttatgatcgtatacgggaccaaattatcacggttttttgccggatgagaaaaaagctgacaggcagggcgttctattttgtatttaaagtgcgggacaagcggtctatttatgatatgaaaaatcctgtatgttgaaaaaagtttttgatttaaggagatgtccattgcgtaaaatccgtaaagctgtctttccggtcggaggattgggaacgcgttttctgccggcgacaaaaaccgtgccgaaagaaatgctgacggttgttgacaagccggtcattcaatatgtggttgatgaagcacgtgctgccggcattgaacatctgatttttgtcacgggccgcaacaaggcggtgattgaagactattttgatgcgcaggttgaactttatacaacactggccgagcgcggcaagacggaagcgcttgctcatatgcaggatttgcaaccctcaccggggacaacctctttcacccgccagcaggaaccgctggggctgggacatgctgtctggtgcgcgcgcgagcttgtcggggacgagccttttgcgctgttgctgccggatatggtgatgcaggcgcgcaagggctgtctggcggaaatggttgagctttatagcgagaccggcggcaatattatcgctgtgcaggaatgtgacccggaagaaacacatcaatatggtattgtcggtaaaggccgtgatatcgcccatggttttgaaattaccgccatggtggaaaaaccgccaaggggtatggcgccgtccaacctctttatcaacgggcgctatattttgcagccggaaatttttcacattctcgccagtcaggagcgcggttcgggcaatgaaatccagttgacggatgccatggtgaaactggcgggcaaggaaccgttttatggttttcgttttgccggaagaacctatgattgcggttcaaaaaccggttttatcgaggcgaatgtcgcttttgcgctggagcgtggggatatgcgcgacaaggtgatggaaccgcttgcggcgctgctggcgcaacatgacaagtaaaaactgaaaccaggtgggcacataacgtgttttatgatattttatgtgttcataaatatccgataggaagacaatgactgtaatggatgacgagagcattgcgggttcggccctggccacagtttcaacggaaactgcagggcttgccgctgtcatgaaagccttgcagggcgatatggcggcggcttttgtcgctgcggtccgtctggtggctgccagcaaggggcgggtcattgtcacagggcttggcaagagtggtcatatcggcacaaaaattgccgccacactggcctcaaccggcacaccggccttttttgttcatgcagcagaggccaaccatggcgatctgggcatgatcggtgccggggatgtgctgcttgccttgtcatggtcgggggagacggcggagcttgccggtatcctcaatcattcacgccgtttccgtattccgctgattgccctgacgtcgggaaaaaattccgcccttggccggcaggcggatgttctgctgttactgcccagggctgaagaagcctgcccgcatggtctggcgccgacaacgtcaaccatgatgcagctggcgctgggagacgcgctggcggtggcgctgttgcaggcgcgccatttcactgcaagtgatttcaaggtgtttcacccgggcggctcgcttggggcgagcttgcgttatgtcggcgatattatgcacaagggtgcagaaatgccgctggttaaaaccggcacattgatgccggaagcgatgaaggtgctggcggccaagcacctgggctgcgttgtggtggtggacgggaagggcaagcttgccggtattgtgacggatggtgatctggcgcgcaatatcacgcgggatctgtcaaagcttcatgttgatgatgtcatgacccgtgcgccgaaaaccgtgaagccggatatgattgccgccgcggcgattgcgttgctgcaagaccaccagatcagcgctttgctggtggcggaagccggtaaacctgtcggtattgtgcacttccatgatttgctgcggattggcacagcctgaagcaggcggataaaagaaaaactgttaaccgggaaagaagaagagtggggctatgaaaacacgtgccgctgttgcctgggaggccaataaaccgttaacgattgaaaccattgatattcaaggaccgaaggcaggcgaggttctggttgaaatcatggcgacaggcgtttgccatacggatgcctatacactttcagggctggatgcagaaggaaagtttccggcgattttaggacatgagggtgcgggtattgtgcgt

SEQ ID NO: 3024 - DNA, 23276 bp, synthetic construct
  misc_feature 1..23276: note = Synthetic
  source 1..23276: mol_type = other DNA
tgttcgaccagatcgatgccggtgatcagctcggtgacgggatgctcgacctgcaggcgggtgttcatctcgaggaagtagaagtttctgttgccatcgacgatgaattcgacggtgcctgccgaatgatagccgaccaccttcgacagggcgacggcctgttcgcccatggcgcggcgggtcttctcatcgagaaagggcgagggggcctcctcgatgaccttctggttgcgccgctggatcgagcattcgcgctcgccgagatagagcaccgtgccgtgtttgtcgcccagcacctggatctcgatatggcgcggctgggtgacgaatttctcgatgaagatgcggtcgtcgccgaacgatgccttcgcctcgttcttcgaggcctggaagccttcgcgtgcttccgcgtcgttccaggcgatgcgcatgcccttgccgccaccgccggccgatgccttgatcatcaccggatagccgatcgaagcggagattttcaccgcctcgtccgcatcggcaatcagccccatatggccgggcacggtggacacgccggcttccgccgccagcttcttcgaggtgatcttgtcgcccatcgctgaaattgcgcccaccggcgggccgacgaaggcgacgccttccttctccagcgcctcagcaaaggccgcattctccgacaggaagccataccccggatgtacggcatcggcgccggtcttgcggatcgcctccaagatcctgtcgatgacgatataggactggttcgatggtgccggcccgatatgcaccgcctcatccgctagtttcacatgcagcgcgtcggcgtccgcatccgaatagaccgcaaccgtcgcaatccccatcttccgcgcggtcttgatgacccggcaggcaatctcgccgcgattggcaatcagaagctttttaaacatgtgttattccgtaagtgatgggttctggatgacgggccggccattccatcgtaatggacttcgcgttttcgcacgagacgtgaaaaccggccgctgtaaagaaaccggatgctcatccccggcaacggcttctctcaattccagggcgttgggcatgccgctcataacggtatcgtgtcatgcttgcgccagcgcacgtcgctgcgcttgtttcgcagcgaggcgaatgcccgcgcgatgcggcggcgcgacgaatggggcatgatcacctcgtcgatgaagccgcgttcggccgcgacgaaggggttggcgaaacgttcctcatattccttggtgcgcgccgcgatcttctccgggtcgcccagttcggaacggtagaggatttcggtggcgccttttgcacccatgacggcgatctcggcggtcggccaggcatagttgacgtcggcgccgatatgcttcgacgccatgacgtcataggcgccgccataggcttttcgcgtgatcagcgtcaccatcggcacggttgcctggctataggcgaacagcagcttggcgccgtgcttgatgacgccgtcatactcctgggacgtgccgggcaggaagcccgggacgtcgacgagcgtgagaagcgggatgttgaaggcgtcgcaaaaccggacgaagcgggcggccttgcgcgatgagtcgatatcgaggcaaccggccagcaccatcggctggttggcgacgacgccgacggactggccttcgatgcggatgaagccggtgaggatgtttctggcgaaggcttgctggatctcgaagaaatcgccctcgtcggcgatcgcgaggatcagctccttcatgtcatagggtttgttcgaggaatccggaatcagggtatcgagacggtgctcgatgcgggcaggatcgtcgaagaacgggcgcacgggtgcctgttcgcggttgttggcgggtaggaaatcaaacagcaggcggatctgctcgagcgcttcgacatcgttttcgaaggcgccgtccgccaccgacgacctggtggtgtgcgtgcgcgcaccgcccagctcttccgccgtgacgatctcgttggtgacggtcttgaccacgtccggaccagtcacgaacatgtaggaggtgtcgcggaccatgaagatgaaatcggtcatcgccggcgaatagacagcgccgccggcgcaagggcccatgatcaccgaaatctgcgggatgacgccggaggcctcggcattgcggcggaaaacctcggcatagccggcgagcgaggccacgccttcctgtatgcgggcgccgcccgaatcgttgaggccgatgatgggcgctccgtttctcagcgccatgtccatgatcttgcagattttctgcgcgtgtgtttccgatagagaaccgccgagcacggtgaaatcctgggagaaaacatagacctggcgaccgttgatcgtgccccagccggtgacgacgccgtcgccggcgaccttctgttcagccatgccgaaatcaacggcacggtgggtgacgtacatatcgtattcttcgaacgagccctcgtcgagcagcacctcgatccgttcgcgggccgtcagcttgcccttggcatgttgggcatcgatgcgcttctgcccgccgccaagccgggcttcggcgcgtcgctgctcaagctgctcaaggacggatcgcatgtcatttccacttcgacggctgtgacgatgagcggtttgtagccgagccgggcggttgacaaaacacttgatcgtgcgcgcatgagtaaactataaaaatgcaaatcaattattgcaaagttgcgaacatggcgatcggcaagctgttcatcggcagaaaagtcagggaattgcgggacgccaacagggcgacccaggcgcagtttgccgagcgcatcggcatttccacgagctatctgaaccagatcgaaaacaatcagcggccggtttccgccgcggttctggtggctctcgccgaaaaattccagatcaacatgagcgagctgtcgtccggcgaaggcgaccggcttttatccgccctgacggaagcgctgacagacccgttgttcgagaacctcgcccccaattttcaggagctgaagctcgtcacccagagcgcgcccaatctggcgcgggcattcatccgggcgcatcagggatataagcgcaacggcgagcagctcgtcagcctgagcgacagtcttggccgttcggcctcgctggcggaaacgaccccttacgaggaagtgcgcgacttcttccatttcgtcgacaactatatccatgcgctggatgtcgaagccgaggcgctggcgggcgagctcggtctgggagacgcagacagctacgcggccctctccggttttctgaagtcgcggcatcagatcgacgtgaagcgctcggaactggacaatgatgcgctcaggcaattcgaccgcccctccgggacgctgctgatcaaccgttacgcgccggcggcgacgcgggatttccagctcgccctgcaggtcgcccagctgcacgtgccggacctcatccagtcgattgcgcgcgaggccaatttccgcactgtcgaagccgtggaaatctgcaagatcggcctgcagaattacttcgccggggcgctgctgttgccctatggcgacttcctcgtggcgaccaacagcctgcggcacgatctcgatctgctggctgcccgtttcggcgccagcctcgagcaggtctgccacaggctgagtacattgcagcgtccgggcaacaagggcgtgccggtgttcttcgcgcggatcgaccgcgccggcaatatcacgaagaggcacagctcgacgaagcttcaattcgcccggtttggcgcggcctgtccgttgtggaacgtgcacgaggcattcgaggcgcaggggcgcatcatccggcaactggcggagacgcccgacggcgcgcgctacctctgtcttgccacgcagatcaccaagtccggcgccggctatcatagcccgcaaccccgctacgccatcgctttcggctgcgagatctcatacgcccatgccttcgtctatgccgacgatctcgatctgtcggccaaggcaaactttgcgccgatcgggatctcatgccggatctgcgagcgggtagcctgcccgcaaagagcggtgccgccgctcatgcggaaaatccaggtcgaccacgacaggagaacggtgctgccctacacgatcggcgaggcttgaaggcgccattgaatgttcatgcgtgtttgatggaaccggcagctgtttccagctgccgggataatatcgtcagaccggattaagcggcgaacgagctgtcgaggctcaccgagcccgccgatgcggtgatggagaccgtaccggccttgtagaccgggatcgacagcttggaggagaagctgccggaacggtcgccaagcgtgtaggtgccgctgacggtgccatcggcagcgatgtcgatcgtggaggcgaaggacgaagcgccgccgctgacgagatcaagcatgtcggtgttgatttcagtgatcgtgttcattttagtctcctgttgatcttggatttcaagtctggtttcggaggatgtaccggaatggcctccccttcttattgtcgccggctgcctattgccctcaagggatccaatacccagtcggtgaagtggcggcggtcggtgatgacatcgccgagaagggtcatgccgggagccagcggccggtcttcgccataggcggtgacgctggtacgctccagactgacggtgacgcggtaaacggtgtctttgaatgcgatcggggcaagcagctcgccctcgcggtaggtggcgcgcgaaacctgcacgacatggcccgaaatcgcgccgaaacgctggtaggggaaggcgtcgattctcagccgcacgtcctgtcccggctggatcagtccggcggcgcgcggtggcaccagcaggttggcttccaggctgctggcggttggcaccagagccaagaggggcgattgcgccgccgccgtctgtcccagctgagcctgcagcacggcaacccggccggccacgggcgcaaccatgacgtaggagcggttgacctgcagctgcgccagggattgctcgagttcgctgcgcaggccgcgcaattgcgccagtttgtcctcgcgctccgccggcaggcttgccagctgcgagcgggcatcgctgaggtcgccgccacgcgattctttctgccgctccagttcgtgaatgacgccgtcctgggtcagggcctgctgctgcaggcgcgacagctcaaaccgcgtgccgcttcccttggcctgaagttgaccgtagcggctcgcatcctccgcctgcagggcttgcagcttgcgctccgacgacagacggctttcctggctcgacaattcttcgccgagacctgctacccgggcggacaggcgccggctctcttcttcaaaacgggccgttgccgccgccatctgggtgtcgatcgcctggatgcgggcttccgtctccagccgcagcttttcgcccaccgggccgtcgatgccggccgtttcaagtgacagctccaccaggggctggccctgagcgacgatatcgccttcgtgcaccagcaccttcgagacagtgccgcccttggtggcatatatctgggcgaggcctccgatcggcgcgatatagccttgcacggtctccttgcgggcataggtgccggtcaccagataggtgccgccggccagcacgaagaggcccagaaccgccgtcatcaccttgtggcgcaccggctgcacgatcatcacctcgccgcgaagccggcggcggtgctcaatggcctgcgggcggaacaatccggtgctcatggcaccacctgcaatggctgggcctgcacgtcgcgcaccagttcacggaccttgctgttttcgacggcaaaaacccggtgagcaccctcgatggcgccggggcgatgggcgaccatgacctgggtaatgccgatggtgcgcagcgcctgcatgacccggcgctcggcaagcacgtccagattggccgtcccctcgtcgaggaacaggatggacgggcggcggtaaagggcgcgggcgagcagaacgcgctgttgctggccgcccgacagggtggatccgaggtcgccgaccagggtcatgtagcccatcggcatgcgcaggatctcgtcacggatgccgaccagcccggccacttcctcgacgcgctccatgtccatgtcgggatcgaagaaggcgatgttgtcggcgatcgtgccggcaaacagctggtcgtcctgcatcaccacgccgatgcgttcgcggtaggctcgtgtaccccatgcgttcagaggcaggccgtcggcgagcacttcgccttctccggcaggataaagtccgatgagcagcttcaaaagcgtcgacttgccgccgccggacggcccgacaaacaccacggactgccccggctcgatgcccagcgagacatccttgaacacccagggttcgcgttcggcatagcggaagcagaggttgcgcgcttccagcgcgcccgcgaacgggcggttgatccgcgcctcggcttccagccccggctcgagatcctgatgcaccgcgtccgccagccgttccagatgcaggccggtcatgcggaatttgaaatattgttcgacaagcgacagggccgccgtgctgaactggctctggtaggacaggaaagccagcagcatgcccagcgtcatctcgccccggatgatcgccgcagcaccgagatacaggatgaaaacagccgccgctcccatcagcaaggacaggccggccgtgccgttgagattgactttctgaacgcggacattgttgttcatgctgtcggcataggcgttctgccagacgccgtggcgctccagttcccggccgaacagcttgaaggcgcgggcgccgcggatggtttccagaaagacgctgtccaccttggcctgatactggataccctcattggtgaggctcttcagccaggggaaggtgccgagccggacagcgacgacaagcgccagcgaggccagcaccatggccgtcagagacggcgcgtagatcagcatcaccaccagggtgatgatcgccatggctccgtccatgacagcggagacgaggccgccggtgagcaggtcctgcaccggctgcagcgagttgaaacgggagaggatatcgccgaggcgtcttttctcgaaccacggcacaggcaggcgcagtgcgtggcgcaacagattgccgcgcatctgaaacgtcagaagcgtgctgaaatgcatctgcacgtaaccgcgcagcagggtcgtgccggtctgtatcaacagcagcaaaccggcgccgatgacaatgacgttcaggaggtcgagatcgcccttggagattgcctcgtcgacgatcatctgattgacgaggggagacagcaggctgaacagctgcagcagggacgagagggccagaatctgcagcaggctgggaatgaagccggcggtcttcgaccacagatcccccagccgcacccgctcgacaagcttgcgcttttgaaagctggcggcgggcatcagttcgagtgccacaccggtaaaatgcctggaggcctccgcatgggacagccgcctcagtccgctggccggatcgtgcacctcgatgcgggtcggcgtgaccctgctcagcacgacataatgcgacatgtcccagtgcaggacgcacggcattcgcagccgtccgatgtcctccatctccagcctgaccggccggctggcaaaacccaggccatcggcgacggagataagggtcttcagcgtcgcgcccttcaacgacacgacatggcggcgccggagttccgacagcgtcacccggtggccatggtggcttgccaccatggccaggcacgccagtccgcactcggccgcttcagactgaagcagcggctcgatgcgggagcggttatgaagggcattgaggagcaactgacgatcctatcgcgcgcttgaatgaaaacctgcgcgccctggagttcagaactggtttgttatggtggaggctgacggcgcacgggcgccggcgtctcatcggtcccttttcagaagcggtcggtcgtcatgcgccgcgtttccaggatttcaccccggcgggagacgataacaagaagcctttcatcccggcgggaggcccttacaaaataccggccacgttccagccgcacgtcccggacgcggtatccgcgccgttcgagcaggctgatgacatcgcgctggccaaactgctcgtgccgctcgcgggcgtatcgattgcgttcctgggcccgatgtccgttcgccaggccgtcctccagataccgctcgcgggcaccgtctctgtaatagccgtcctgggccagggcgggggagaggacaccggtcatcagcaatgcggcgcaagccagagcggccaggtttctgttcattcttgtctcctgtcgagccgaatttccgcgaacccggacagtcgcaagcgaccatcgtccggggacgtcaatccgggaacatgtttcatccaggccggttcggctgcttgtctcaccccgcgcgccgccggttggcttggcgatcgattgtgggagaagcagtgacccagccaggtaaaactagccgctgcgaaattgctgtgtgtgctgttttgttacgaaaggttcgcaactgtggtcgcttggaggcacgcggccatgcgggcagcaggggagatccgggatgccagcctcaacccgcgcatgaccatcggtgaggccgtcggtcagccgaatccccggttggccaagggcgacgagatagaccggcggtgtggaccgaatcctcgccggagccgaaggcgtttatcccggctttgcgagccgcccgcttgcacggcatcggaaacctccatgccgccaaacttcgccttgtatttgtagaaggtcgcctcaaggcggcaggaacaggaaccaggcgcctctgtctttcaaggcctgtgccgctttggtgcttttgtgaaccgcgagattgtcgaggatgacgatgtcaccaggtttaagtgttggcgcaagctgggtctggacataagtgctgaacggcgcaaacattcgccacgcgggcagcggccacgcagccggaccatcttcgtgttcacggaagtttcgtcaatgaagacaagacgatgtggttccagccgtaccgtcgcgcgcgtgcgttccgatgccgtcagggcttttttatatgggaacccttgggccaccaggacacgcgacaacgacgagggcgggacccggacgccatgcgccccgtcaagcttgtcagccagttccggcatggtgatgtcgggcctgtgctcgacctcggcgatcaggaaaggcagacaggccgaaagtttgccgcttcccggcggacggccttgcatcccgccacgcaagaagcggtggcaccccgccgactacgacaaaactctctacaaacagcgataccgcatcgagaacatgttcggcaggatcaacgatggtttgccgttcgtctttggctcatacccaaaaccaaaaacggcccccggaggggccgccttatctggtgctggtcgaggcttgttaacggccagaccgcgttttctgatctgcatttctgccaaatctggcgatgcgcgtcaagcggtccaactgcaactacatcatcgcgtactgactataagcttcagtctcaacggttgtgggcggaaaccggtgtggacccgctctcctgcatgtgatagcttttataacgccagctaatagacgcctatccgacgagtttggactccctccgtcatgtatctcgctatcactctaatggtgactatggcggagttctcgcgcgattgcaatatgctccttacatcatcgcatatttttttcagcctgtccgctgatggttgcagacggctggaccgcgttttctgatctgttaaactcacgcaaagcgcagaaaatatgcgctggaggtggcggctgggccgcgttttctgatcagccatgcagggccaaggtttattcttttttatgtatagcaatcttcttttttcatttgatatcggcaccaactcgatcggctggtgcgtgttcgcgctggatgaggcgggggagccttaccgtatcgtcgatctcggagcccgcatctatgcggatggccgtgatccgcagtcgaaaacctcgctggccgttgcccgccgtgaagcacgcgccatgtcgcgccggcgcgaccgctatctgcggcggcgcaaggcgacgctgcgcacgatgatcgagtacggcctgatgccgggcgacaaggcggggcaggaggcggtgttgcgtgaaaccggcgatcgggagggcggcgacgaaagcttcaatccctatgctttgcgggcccgcgcactcagcgaaaagctgccgcccgcctatatcggccgggtgcttttccatctcggccagaggcgcggcttcaagtcgaaccgcaagaccgaccgcaaggacaacgacaagggcaagatcgcgctcggcatcgacgagctgacggcggcgatgcaccgttccggatctccgacccttggcgcctggctggcgatgcgccgggcggaggggcattcggtgcggctgcgggccggttccgaggtgttcgatgcggagggctatgccttctatcccgaacgatcgctgctggaggatgagttccgccagatatgggacgctcaggcggtgcatcatcccgacatattgacgccggaacgccgcgcgcacctttttcgggtgatgttctatcagcggccgctgaagaaaccgcttgtcggccgctgctccttcaatccggcggagtttcggctttcccgagcgcatccgctgtttcaggagttccggctctacaaggaaatcaacgacctggaggtcgttctgccggatcagagccaccgcaagctgacgcttgatgagcgcaatgcgctggtggccaagctgaaaacgtcaagaaaggccagcttttcggcattgcgcaaaacgctgaaactgacgccggaccttgttttcaacaaggaatcggaggcccgtaaagagctcctcggcgacgagatctattcggtattggccgacgcgaagatgttcggtgcgcgatggggcggtttttcgcgcgcgcggcagtgggagatcatcacgcgcctgaaggaggaggaggaccctgcaagcctttccagctggctgaagagtgaattcggccttgatgatgaacgcgtcaccgcgattgccaacgcatctctgccggatggatatggccggctcggagagacggcgcttgcttccatgctggaggagctgaagacggcggtgatccccgaatccgaggcggcgcggctctgcggttacgatcatagcaatcttgcgaaagagcaggacgaagggctggacaccctgccggaataccaggaaatcctggagcggcacattcctccgggcaccggcgatcccgatgatatctacgatctgcgcaagggccgcatcaccaatccgacggtgcatatcgggttgaaccagcttcgacgcgtcgtcaatgcattgatccaccggttcggcaggccgcagcgcatcgtcgtggaactggcacgcgacctgcagctttcggaaaagcagaaggacgatgtcaatcgccggattgcgaaaaatacccgcgaggccgaggggcgttcgcagaagctgatcgaaatgggtcagctcgacaccggttacaaccggttgcttctgaaactctgggaggagctgaacctggacaagccggaggatcgggtctgcatctattccggcaagccgattggtatcgccatgttgttttccggcgaggtggacgtcgatcatatccttccctggtcgaaaacgctcgacgacagccaggcgaacaagctgctgtgcctgaaatccgccaatcgtcagaaacgcaatcgcacaccgtccgacgtgccggaatggcgcgaccgctatgacgaggttcttgcgcgcgcggcgcgcttgccgaggaacaagcggtggcgctttgccgccgatgccatgcagcaattcgaggcggaaggcggctttctggcgcggcagttgacggatacgcagtacctgtcgcgcatggcgctcgaatatctgtctgcgctctatccgtccgaggaagccgataaatcgggggagttgcgccaacgcaagcgggttcatgtggtgcccggccggctgacggagctgctgcgccgcaactggggcctcaacactctgttgccggatcacaatctgggtgagatggcgcaggagaagaaccgcagggatcaccgtcaccatgcgatcgacgcggctgtcatcggcacgaccagccgctccctcctgcagcgcatgtccggtgcagcggcacggctggacgatgtggctttcgacgatctcgtccgcacggttgtcaaggacaacccgccatggccgggctttcgggaggaattgctcgcggccatcggccgcgtcacggtcagtcacaaaccggatcacggcacagtgtcgcgggcggcctatgcgcaagggaaaggtcagactgccggcaagctccacaacgacaccgcctatggcctcaccgggctggtggatgcaaagggcagtccgctggttgtgcggcgcaagccgttcatggccctggaggtcaaggacatcgcctcgatccgcgatacggagctgcagtcggcattgtacggcgccatcggcagcctgacggaaaagaaggcgctgcaggaagcgctcatccgttttcgcgacacgcatccgcaattcaaggggatcaggcgggtgcgggtgctggaaacgctttcggttatcccgatcgttgatagggacggcaaggcctacaagggctacaagggcgacgccaactatcgctacgaggtctgggagacactggatggcaagtggcatacggaggtcgtgtcgatgttcgatgcgcatcagccgggctggcaatcgcctttccacaagcaaaacccggcagcacgccgtgttcttaaacttcagcagaacgacatggtggcctatgagcatccggctgatggatacaccattgcgcgcgtggtgaaattctcgaacgacaaacggatctatttcgcctcccatcgcgagagtggcagcctgaaggcgcgcgacgcggacaagggcgaccccttcagctacttcgccaaggcaaacaacgggttgcgggacatcaaatgccggcaggtgcggatcgacgcggctggccggatcttcgaccccggcccccaggacagggagacgcggcaggcgaataagggtgtgtagggaaaaaattccctttatgattgtttcatttctttgcgccactctggccggatggaccggattgttgatatatcgacggatggcctgcacctggccgtctacaggggttttctcaccgtatcgaaaaacggtggggacgaggttgggcgcatcgcgctcgatgatatcggcgcgctgattgtccacgctcacggcaccacatggtccaatcatgtcttcgtcaaaatgtccgaacgcggcgtgccggtcgtattatgtgctgccaatcatgcgccagtggcggtcgtctggccgcttgagggccatcatgcccagggcgcaaggctgcgcgcgcagatagacgcttccaaaccgctgcaaaagcaggtctggcgaaagatcgtttctgccaaggtgagaatgcaggggcatgtgcttgcggccaatgggctggaggccggcgctttcgatatgcttgcccgcaaggttcgctcgggcgatcccgacaatatcgaggcgcaggccgcgcggcgctactggaaggcgcttttgggccctgacttttatcgcgaccgggaagcagagggcctcaatgtccttctgaactacggctatacggtattgcgcgccattgtcgcgcgggcgatctgtgcctccggcctgcatcccaccatcggcgttttccattccaacagggccaacgccttcgcccttgccgacgacctcatggagccgtaccggcccctcgtggatcaactggtccgcaatcttgccgcggccgggaaaacggatctgtcgccggagacgaaacgggcgctgacatccatcaccaccttcgatctcgatacggacatcggcgtttcgccgctctccgttcagatcggacggttcgttcattcggttgcggtcggtttcgagaccggtgaggcgcggctcgatctgccagtcccgccatcggccttgcatctggcggcgctcggaaaacagcccgtggagcaggaagaggcatgacggcggctcttcacaaggccaatagcgggccacgacatttgagcgggtatagaatcatgtggatgctcgtgacattcgatcttccggtcgaaaccaagacgcagcgttatgcagccacgagattccggcagcggctgctcgacataggctttgaaatgagccagctttccaactatcttcgcttttgcagcggcaaggagcagtttgaaagctatgcccgtcagatcgagagcatcctgccggaatggggtgacatatacatcttccagttcaccgaccggcaatacgaaaatatcatccgtttttcagaccaagccagaaaacggcggaagaaaaatcccgaccaactggcgcttttctagcgccagccgccatttccgctgccgtcaccccggccaatcttcctttgaaatcagaagattaaccgaggatcgagcttagcagatcagaaaacgcggtccagccgcaactagctactgcccatgaacggagagcttcccagcttagcagatcagaaaacgcggtccagccgcaactggtcatcagtgcgatcaccaccgtccttgagcttagcagatcagaaaacgcggtccagccgcaacaagcggccacccgtcatgaccacccgtgcgagcttagcagatcagaaaacgcggtccagccgcaacacgccgccaaacggcttgaacaagccagaaagcttagcagatcagaaaacgcggtccagccgcaacgatcgtccaccgaggtgcagatgcttggcgagcttagcagatcagaaaacgcggtccagccgcaacccggcggcggcgtcttgaaagacgacgaatgagcttagcagatcagaaaacgcggtccagccgcaactctttggatgacgaggacgtttttccgtacagcttagcagatcagaaaacgcggtccagccgcaacgccttgctcatcatctcatcgaatagcttcagcttagcagatcagaaaacgcggtccagccgcaacagatagcgcaccatgcgccgcgctacatctagcttagcagatcagaaaacgcggtccagccgcaaccgtggcgacgccatttgctttcaaggttctagcttagcagatcagaaaacgcggtccagccgcaacggagatgagcagggtaggctccgtgagcgtagcttagcagatcagaaaacgcggtccagccgcaactgaaggcaaagcaacccgtgatgtgtttatagcttagcagatcagaaaacgcggtccagccgcaactactttcccccgaacctgtttggatgggagagcttagcagatcagaaaacgcggtccagccgcaacgaacgcatcagcaagaacgccagccagatcagcttagcagatcagaaaacgcggtccagccgcaacgaacgcatcagcaagaacgccagccagatcagcttagcagatcagaaaacgcggtccagccgcaaccaagatcgcccggatatattttccccaataagcttagcagatcagaaaacgcggtccagccgcaacgggtgaaggctcgtttgctggcggcaagcgagcttagcagatcagaaaacgcggtccagccgcaacgaaaacctgcagttgttgtgcgcgccatgtagcttagcagatcagaaaacgcggtccagccgcaacccggcgctcaagaggaatgaacatccaccgagcttagcagatcagaaaacgcggtccagccgcaacaagccgtgcagcaaccatgccaccgtagagagcttagcagatcagaaaacgcggtccagccgcaacgaagtacgcctcgtaggcgtgttccgggttagcttagcagatcagaaaacgcggtccagccgcaacgaaaagatcgccagaactgcatctcggtccagcttagcagatcagaaaacgcggtccagccgcaacctgcatctgcttgccgaagcccttcagggtagcttagcagatcagaaaacgcggtccagccgcaacgttcaggacggtcttgtcatgctccaggtgagcttagcagatcagaaaacgcggtccagccgcaacatgccgcacaccagtatatggtcgtgtggcagcttagcagatcagaaaacgcggtccagctgcaacacgacgggccggtaaggcctgttccgttctagcttagcagatcagaaaacgcggtccagccgcaactaagtcgactcggttactgttcctctgaggagcttagcagatcagaaaacgcggtccagccgcaacggcgaatgacaacaaaaggttctgggcgttagcttagcagatcagaaaacgcggtccagccgcaacgcacgcggcaaaaaggtcgcggcggatccgagcttagcagatcagaaaacgcggtccagccgcaacgcgatgatcgggcagacgatgtcgtccctcagcttagcagatcaaaggatatggtccagcggcaatgcgccgatcttgaaggagtgctgccgagcccgcgatatgctccacaccgcgtcgactcctgagagttgcaaaatggctggcgacgtccagcgccttgccgggctggctcgatgttgaagattgatcgaaagtgagctggagcgttgaatgctaggattttcaatgatctgcagaagctgcgatctgcgcggtcgtggggttgaattcgttcaggcgcatcgtgactggctgtcgtgatcaattcacggtgccgccgcggtccagtcttcgacatgtaggcgaggtacgcgattaaactcgcgctggctattggtgatcctctcgttgtgaaaatatgatgtggtcggcccggctgcctcgtaacggcacctgtgctcacgggggagtgctgcggggctcccttgactgttcccagaattcggtcgcatcggttatccagccttgcgcgctggtgccgatgccaaggccgaaaccgtggccaagcgcggggtattttctgtatgcgaccggtgtgcccatttggcgcagagcggcgatgcgcttctccatgctggcaggcggggcgatggcgtcgtcggcgccgacaacgacgaatgtcggtggttcgtcgttcgagacatcggagtgcgcggtgtaggccatgaccagcgctgcaggcttcggcagcatggcacctccgaatgcggcgaccccatgcgatccgacagccgccaccatcctcgcgccggccgagctaccccaaagggagtatccgtcggttgcgacatcgagcgacccggcgttctcaaagatataggagatcgccgtggcgaggtctgcggctggagcctttccgccttgcccggcacggtaccgtatgacgaagacgttgaagccgagcttgctgatctctgtcgcatagggaaatccctcatggacagagccgacataggcgaagccaccgccgggcgcgacgatcgcgaagggcgcgccggatttgccccggaaaaagaacagtcccgtattttccttcgtggggtctgcgcgcctctctgcgtcggagtagatgtcgtagaagactttacggccgtcggctgcgtcgtcgatcatccgattcagtccatcgacaacgctcagcgtgtccacgtggctgtgatagggcaacaggctggcaataccgctgagtggctggcgatcgtcgtatccccgaccatcccacggaaggatcaggcgaccaaacgctgcgaaagtcggatgcaaaagaacgtctccgatcgtgctgctcgccgacaggtgacggctttgcgccgtcacctgtgtgtcatggtctctgatccgggatgcggctcgtcgggtttcccccgcatccgtcagcgcggaatccagcaagaacggcaacgccatcagcgcggttttgaaactgtcctttgcccgttgcatgctcgcttcataaacccgtcatcttgaggacagcctccggaagccgctccccttcgatctcgatcccggcgagtgctgtgccgatttcctgcagatcggcatctgaaagagcggcgtcgacggagccgaggttttcctcaaggcggtgcaacttggtggtgccggggatcggaacgatccagggcttctgcgccagcagccacgccaaggcaatctgggcaggcgttgctgccttgcgttccgcgatcgacttcaacaggtcgacgagcgcgaaattcgcctttcgtgcctcgggcgtgaagcgcgggaccagattgcggaagtccgtggcatcgaatgtcgtgttctcgtcgatcttgcctgtcaggaagcctgcgccgagcgggctgaacggcacgaagccgataccgagttcttccagcacgggaagcagttccgtttcggggccacgccagaacagcgaatactcgctctggacggcggtgaccttctggactgcgtgagcgcggcggatcgtctggatacccgcctccgaaagaccgaagtgcttcaccttgccagcgtcgatcaggtccttgaccgcacccgcgacatcttcgatcggaacagcgggatcgacacggtgctggtagaacagatcgatgcgatcggtcttcagcctcctgaggctggcctcggccacagccttgatgtgttcgggtctgctgttcgtgccgccggtgcgcgcgcctgtttcgagatcgatgtcgaaaccgaacttggtggcgatgaccacatcgtttcggatcggtgcgagagcgtcaccgacaaggtcctcattgacgaatggaccataggcttcagccgtatcgaacagcgtgacgccgcgctcgtgggcaaggcgcatgagcttgatcatttcgccgctatcggcagcggggccataggcggcgctcatgcccatgcagccaaggccgagtgccgaaacttcaagctcgtttccaagttttcgttttttcatggtcgtatctccgttcataggaatgcatctggtgggtcattgcgcttcagttgccgtaacgggggcggtctcggggcacttggcaacgatgaaggcgagggcggggatcaacgtcagagcgatcgggaatgttcctgtttccgcggccagatcccgacagtgagccagaaggcagccgccgaaagccagcgcgcaggcggtggagacccatgacagcccggcatcggtgaagccgggttcgacgtggatcttcgggagacccgtcggcacgatggagatgccggggacgatcatcacgttgctggcgaggacgatcgcgaagatggcccgcttgtttggggggctcgattgcatgggtcatgcatattccagttcagacgcgacggggactgctgtcgatcacccgtttgactgactgcaatctagcgtttgccgccgctttcgattagtgcctataatcagcatgaacctataagctgggataatgaatggcacaggacaatttcaatgatctcgttgccttcatcacggttgcgcgcgaagagagtttcacgcgggcggcggtgaagctcggtgtctcgcagtcggcactcagccagacggtgcgcagccttgaagagaggctcggtatcagattgctcacgagaacgacgcggcgtgtatcgcccactccggcgggcgagcggctccttcacacggctggtccgcggttcgaggaaatcagggcggaactgtcggctctgagcgagatgcgcgacaagcccgccggcacgatccgcatcacggccggcgagcatgcggcgatctccgtccttgcccccgccctcgacaagttcctacccgacaaccctgacgtcaatgtcgagatcaccgtcgattatggtctgacggacatcgtcgccgagcgatatgatgcaggtgtccgtctcggggagcaggtcgcgaaggacatgatcgcgcttcgaatagggccgccgatgcgcatggccgttgtcggttcgccgtcctattttcgtctcaatccatggcccgaaaaaccgcaggacctgaccgcgcataactgcatccagattcgcatgccgacctatggaaacatcttcccctgggaatttgaaaaggatggatacgaactcaaggtcagggtcgacggccagcttgtcttcaacagcctggcgatgcgacgtgatgcggctttgagaggtctcggccttgcctacatgccggaagaccaggtccaggacctgatcaagggcaacaaactcatccgcgtgctggaggactggtgcgagccgtttccgggttatcatctctattacccgaaccggcggcacgcctctccagccttcgcccttgtcctggaggcccttcgctttaagggatgacgtgctcatcaaccgtttgtgattaagaagccaggctaatggcttcaatcgaaaataggtggctaatgctgataaagagcttcgcataggcttcatccactcgaccacgagaaggatgaacatgacgtctctgatgaagaccttcgcgcttgctctgatgttttcgacgcaactcgccgccggatcggcctttgcgcagaccggatcgaaaccggaaccgctcgttatcgcggagcagggaagcttcgccgttggcggaagcgtgacgtccacgccgggagcctacaacaacaacgcgccctcggacgaaggccaaagcctgcacggggatcacgcctacgtcttctatcaggtgccggagaagccaaagccgcttcccattgtcatgctgcacggggcctaccagtccgcaagaagctgggaaacgacgccggacggccgcgagggatttcagaacatctttctgcgcaagggctattccacctatctcgtcgaccagccgcgccgtggtcgcgcaggcaacagccccgtcgccatgacgatcgaaccgacgccttacgaccagctcttcttcgaccagttccgcataggcaaatggccggactatttcgacaatgtccagttcgaccgcgaccccgaggcgcttgaccagttcctacgttcggtcacgccgaataccgggcccttcgatgccaacgtgatcgctagctcgatgtcggcgctgttcgacaggatcggcgacgccattctgttcacccattcccaggcgggcggcccagggtggctgacggcaatcgaaaacccgaaggtcaaggcgatcgtcgctttcgagccgggaagtggtttcctctttccggaaggcgaactgccggaagccatgccaagtgctgccggaaccttgaagccggatgcggtatccgtggctgatttcgagaagctgacgcgcattccgatcgttatctactacggcgacaactttccggtcgaaccgaccagggagcgcgggcaggacaactggcgtgtccgtctcgcgatggcgaagctctgggtcgccgcagtcaacaagcacggcggcgatgcccgcctggtgcatctcccggagatcggcatcaaaggcaacacccatttcctgatgtcggatctgaacaatgccgagatcgccgaccaggtcgtaaaattcctggccgagaagaagctcgactgaaacccaggcaaaagattttgacgatcccaatgcaatcaggaaggcggccgttccaccatcggaacgtcccggtccttacaggagtacggacatgaaacagtccccgaccaaggccacgctgatggccgcgatgatggctttcacagctggtgaagcgatagccgcggacttcaggaaaaatccgttcacccttgcatacgccggtgcgcttacggcaaacgagcccggcaaggtcaatatccatccggtccagtacacgctgaacggcctagatattgccgcgaacgtctacacgcccgccggttacgatcccgccaggaggtaccccgctatcatggtggcgcatccgaatggtggcgtgaaggaacaggttgctggattgtacgcccagcgtctggccgaacagggctatatcacgatcgccgccgacgccgcctatcagggcgcgagcggcggtgagccccgcaacgtcgacaagcccgcgaaccgcatcgaagacattcatggcatggcggacttcatcacccgttatgccggggtcgatgcagagcgcctcggacttctgggcatctgcgggggtggtggctactccctggcggctgcggagaccgacaagcggttcaagtcgatcgcgacggtgagcatgttcaattccggacgcgttcgccgcaacggttacaacgacacccagttcgccaccgtacaggcgcggatgaagcaggcgtccctggcccgggctcaggaagccgccggcggcgaggtcctgtattccggcgatgccaacctgacagacgagcagatcgcggcgcttccgttcgacctctatcgtcaaggctacgaatattactggaagacgcacgcgcacccgaactcgaccttcaaatataccacgagcagcctcgtggaactgatgcggttcgacgcaaccgaccagatcgagctgatcgatcagcctcttctgatgatcgcggggagcaaggccgacagtctttacatgacggaagatgcgttcgcaaaagccaccggcacccgcaacaaagagatgttcaagattgagggcgcgacccacatcgacacctattgggtacccgagtacgtggacgccgccatgaacaggctgacctcattctacgcgacgacccttacgcaggaggcactggcccaatgagcttgaaactgtcgatcatcaccatggcaatcgttgtcgcaggcaccgctcattcttctgtctccgcgcaggatcagccatcggcaaacctcgagtccgcgaagtcccgaacccagcaattgatgggcggtatcgctccgaagctcgcggacctgaccgacgatgtcctttacgccgacatctgggagcgtcctgaactttccaagcgggatcgaagcctcgtgacggtcagtgcgctgatcgccctgaacagaccggatcaactccgctctcacctgatccgtgcccgcgacaacgggctgaccgaggcggagctggtggaaacgatcacccacatggccttctattccggctggccaagtgccgtttcggccgtggcaatcgcc

SEQ ID NO: 3025 - DNA, 23273 bp, synthetic construct
  source 1..23273: mol_type = other DNA
  misc_feature 1..23273: note = Synthetic
ccaccggctctgaaatcggcacgatgtcgtaacggcaaccaagcgccttggcgcaatcctcggcatccttgaaggattcttccgatgtgtaatgataaggcagcatgatggtgcgcacgcgctcatgccccagcgcgtccaccgccatggccgcgcaaatggccgaatcgataccaccagacaggcccagcacaacacttttgaacccgttcttgttcacataatcacggaagcccaacatgcaggcgcgataatcggcctcctcaccttgcggaatagcggcaaccttacccggctcacagcgccagccatcttctccgcgctgccagtcggtcagcgccaagcattcctcaaactgcggcatctggaaggccagcgacttatcggcattgatgcagaagctggcaccatcaaacaccagctcatcctgtccgcccacctgattggcaaacaccagcggcaggccgctttcaatgacttgtcgcacaaccctatcatagcgcacatccagcttgccgcgataatagggcgagccattgggcaccagcaggatttcggctccgctttccgccagcgtttcgcacacgcccagatcgttccagatttcttcgcagatcggcacgccgatgcgcacaccgcgaaaattcaccggccccggcatctcgccttcaacgaaaacacgcttttcatcaaactcgccgtagttgggcaggtcgatcttgtcacgcagcgacagaattttgccgccatcaaggatcgccaccgaattgtgccgacccttttcaccctgacgcgggaaaccgatgatgacaccggggccgccgtcagcagtatcggcggccagttgatccactgccactttgcaggcttgcagaaatgcaggtttgagcaccagatcttccggcggatagccagacaggaacagttcggtgagcaaaagcagctcagcaccctgtgccgccgcctgcgcccgcgcggcacgcgcttttgcaagattgccgacgatgtcgccgacagtcggattaaactgagctaccgcaatgcggagcgtttcgggtctggtgactatatcgctcatgcttgacgtttagcgcggcgcgaatgcgttcgcaaacagtttcaggatgcgcgcagtgtgtttttaatgtcccaacggtcatgataccaaagccattgttcgggatattcccgcacccagctttccaccttgtcgttcagcaattgcgctgtggcctgcacatcgagattgccgtgtgcgtcatagggcagttccaccttcggctcgatctccagccgatagcgatttcccggcaagcgaacgcaacgggccggaaagacatcacagccgaactgacgcaccagtttcgccaaaagcggatttgtccgcacattctgattgaaaaatgtggtcggttttccacgggagaatttctgatcaaccagaacacccacgcccttgcccgcttccaactggccggccagatgaaaagcagagcctgcgtgtgagggcaccagattgcccatgcgctctttgcgaaaaccaaacaccatatcggcgatataggggttgttgggcggacgaaacagcacggtcacatccagaccataggatgctcccgccacaggcagcatttcaaaattgccggtatgggcagtaaaaacaatgaacggacggcgcgtattcaacaattccatgaaaatcgggatgcctgacacatcaatgcgcccctcgcccaaccgcgtcggatcaaagtcgaacagcttgtccagaaagacatattcagccgtttggcgacccatatgcccccatgcgtccgcggcaattttttcgatttccgcctgacttttttccggaaaagcattgcgcagattcgccagcatcagatggtgacgcgcaagccttgggccaacaaaccgcaccagacgatcagcgaagttcaatgctgcatccgccggaaacactttcaacaccatcagcaacagcagcagcaattttgccacaagccactgtggaaaggcgcgaaagcgtaacaccagcggcgtcaggattcgtctcaacagccgtttcacgggcatcaatccattttcagaatgatcttgccaaagatctggcggctttccatgcgcgtcagcgcaacatcaatatcctcaaaggtcacttcggtatcaataacaggatgaacaatgccgcgtgccattttctgcatggcattggccatgttttccatgcggcagccaaacgagccgagcagcttgagttgctgctggaacagcatcatcaggttcatgtcggtcgaaacacccgaggtcgaaccacaggtgacaagccgcccgccgcgcttcatgcacagcatggagccagcccaggtgtccttgccaacgtgttcaaacaccacgtcaacgccctttttcttggtcaatttacgcacaacaccttcaaaacggtctttgcgataattgatgacatgatcagcgcccaaagccttggcgcgctcgatcttgtcgtccgagccaacggtggtgatcactgtgcaaccaattttcttggccagctggattgccgccgtgccaatgccggagccgcccgcgtgaaccagaatggtttcgcccggctccagtttggcattgtcaaacagcatatgctcgacggtgccgaaagtaacaggggcaagagccgccgccacagcatccacacccggaggcgcaggcaccagcagacgggcaggaatattgatcttttcctgagcaaagccatcaagatggaaaccgtgcactccgccaacatgttcgcaaagattatcacgcccttcccggcaaggcttgcacaatccacaggtgcgcgctccgtacaccgccgccaattgaccgggcaggatattgccaacgccgggaccaatcgcctcaaccacgcccgatgcttctgcgccgatcaccagaggcatcttgcgcttggcaaaagccatgccccgccagccccagacatcaatgtggttcagggccacggccttgacgcggagtgtgacctcacccggaccgggcgcttccggctctggcaggtccacgatttccagcttgcgatcttcgatcagttgcaatgcgcgcataggtctcaatccttgttgcccgaaggccttattctgtcaattccggcaccagatgccgcttacgccggctccagtgccatgatcaggctggcattctgcccgccaaagccaaagctgttcgacaaaacagcactgacttgcgcatcgcgcttcacattgggcaccacatccatgacgatgctcgggtccgggtttgtatagttgatggtgggtggcaccgtgccggtcaacatggtctgaatggagaacacggcttcgacggcaccggctgcggtcagtgtgtgaccaatcatcgatttgttggatgacaccagaatctggtcgctcagccgctggccaaacaccgaaagcatggcaccatattccatcttgtcattttccggcgtcgaggttccatgggcattgatatagccaatggcctcttccgccagaccggcatcatccagagcagctctgattgtggcaatcgccgggccaccatccggcgaagaccgggtacggtggaagtggtcggccttatcgccacaacccttcatgatgcccagcacttttgcaccacggccaacagccgattcgagcgattccagcaccagcgttgccgagccttcggcgatgacaaaaccgtccctgtccttgctgaaaggcttggaagccttttccggtggatcattctgcgtggacagtgccgacagcagcgcaaagcggatcagcgcttccgcgccaactgatccgtctgttgccacggtcaaggcgcgatccgtgcggccctgccgaatggcctcaacaccaagctgaatggctgttgcgcccgatgcacaggccgttgacagcgtgaccggcaggccacgggtgccaaagcgatccgccaggcgctcggaaatcgagccaaattgcacggcttccatgaaaaccggatcggcttcagcccgaaccgccgccagcaggcgatgataggcatggccatagtctccggcaggagcgcgttctgccagaacaaaacgatcttcccattccggctcgaccggaggggccgccaaaaacagaggaccgttgaactctccggaaattccggcctgtgccaacgcttccagcgtggtttcccgtgccatggcgtaagagcgctcaacggcattgttggcgggcacatcaataaaatccacagtgccgctgatgcgcgtgttcagcccttccgtggggaaacgggtaatcttgtgaataccagaaatgccgctggtcagttttgcccagttgtcggcaagcccctgccccagcgatgtgatcacgcccatgccggtcacggcaacaatcgggcgacccagatgatccttgaaacgggaatccgtcatgctctcaactcctcacgcttcagccgacagatgcgccatgccttcgccgcgcacatagccaaccgttgtgacaattgcttcactggcaggtttggtcatcaccgcttcgcccgtcgcatcaaacgccggaacggtggcctttgaatccagcgccagagctgccaaggccagaccaaccgggaactgggcttccagtccatggccggtcacgccaccaaaaccacgcacaacagcgccggggaatgcagcatccagcaccgccttttcccgtttggaaatgtcagccatgccgctggcacccgacagcaccagagcgccgtcacccacacccttgccaacagcatcggcaatgtgggtcaggcgcttttccagaccgccttcgtcgcggcgtccgcgatcactctcaatcgcatcaatggtcgcatagatatgcgcgccccgcgcagcagcatgttcgcgcgattccaacaccagaaaggcgccaacagtgccgagaatcatcccgccgccgtcttcgccatcacgctgccaaagtggcttccacgcaccagtggcatgggcctgaatgccttcgaccagcaggaaaatatcgtcccgatcggcaatgaaagccccacccaccagcgaatggctcgattgaccggcacgaatacggtgaaatgcggtttcaatcgcagaaatgccagccgcttcttcacccataaacgtgcgcgatgagccggtcactttatgcacgatggaaatattgccggccatcagattggaaagctgggccagaaacagcgttggtcgcagctctgttgtcagcttttcattgaccagctgatcacgatcattgcgcttcaagccgtcattgacgatcagcgtatcgacctgaatgtcacgctcgccgccgcctgcggcaacaatcatgtccatggtcgaacaggcatcaagattgtccttcagcccggcatcatccagtgccaagccggcagaataaacgcccagccgctgccagttttccatctggcgctgatcaccgcgcttggtgatctgcgaagaccagtcaatctcgggcatggggtgaacaggatagggcttgaatttttcagcctcaatcggcggcacaggcacatttgcgccagacagaagcgcaatatgcggctccttgccagttccaaagcaactgacaatgccaatgccggtaataaccacatccttgggcgtcttttgcatattttacctcttcagcaacgctgtaccctgaaacccaaggcaccgcacactcaaaaccctgccacaagacccaagcattcgctccaaggtccgggaaagcagctctgccgtactccgccagacagatttacgcaataaggccgcacgcaaaagcggcggccttattgacgaattcctcagaatctcacttagccggcagcagcaatggccgcaaccagaccaatatcatcggcgcgcttgcgcacaatatcgccgagagggatctcggaaaacgacatggtgcgtagcttcagctgacaatcggccacttttttgccagcagagcttatcttcgccttggtcacggcaaagccagatccctcgtgctccagataggcttcaatgtccaaaaccgcattcggctcgacaaaactgcgcattttcgcgccgtccaccgacatcagaaacggcatagccgcaaaatttgtggcagccagaaccagcaagccggatgcctgcgccatggtctcgatcagcaacacgccaggcaccagcggcattccaggaaaatgcccctcgaaaaccgggcttttctctggcacaactgagcgcgccttcaaggtcaaacctttcagatcaacggactcaaccttgtccaccatctggaaatattccagcagcatcagagaccctctgcttttctgatcaaaatcaagccttggcggccttcagctcgtcaatcttggcacagaggtttttcagcacgaaatattcttccgtggtcaccttgccttcgttcacttcctgagtccactgttccagcgggatcttgatgccgaattccttgtcgatcgcaaacacgatgtcgagaaaatcaaggctgtcgatgccaagatcgtcaatggtgtggctttcaggcgtaatggtctcgcggtcgatttcactggtttcagcaatgatgtcggcaactttatcgaatgtagcggtcacgccatttttccttcacaaattcaaattcagcgtctcacataggcaaaactcaggcaaaagccaatggcctgattgggctgccagcagcaaaatttccacgattgttgctcaaacagcgattgaatgacgcgccttgccgctggaaaggtagcaatcgaacaccgccgccacgctgcgggcaaaggtgcgccccaccggcgtcagggcaaaataatcatccttgatcgtgcacaggccatcccggtcattgcctgcaaaaaccttcgcctccatgatgataaggtctgcatcctgcggaaaagtctggcgcagttgggcaaaagaaaagccgaactggcacatgatctgctcgatcaccaaagcgcgggcgcgatcatctgacgacaaggcaatgccacgcactgccgccagcccttcagccttgaccatccgctgatattcgccggttgcagccatattctgcacaaagccttggggcaactggctgatggacgaggcccccagcccgatcagcgcatccgccgcatcggtggtatacccttgaaaattacgcctcaaacatccgtttttcgcggcaatcgccatggaatcatcgggcagcgcaaagtggtcaatgccgatgggctgatagcccgccgtgcacaacatctcagcggcaaagcacatctgctcaaaccgctgcccaacatccggcagcgtgtcttcggcaatcatggtctggtgctttttcatccatggcacatgggcatagccaaacagtgcaacgcgatccggtgccagagacagaatatcgcggaccgtgctctgcaatgtttccacagtctgatacggcagcccgtagagaatatcgcaattcaccgaggtggcaccccgcgccctcaccgcctcaaccactgattttgtctggtcaaacgactgaagacgattgatagccttctgcacctgaggatcaaagtcctgcacaccaaggcttgcccgcgtcagaccaatggcggcaagggcatcaaagcggccatcatcaaggtcattggggtccatttcgacactgatctccaccttctgcgcaaagttgaaatgagcgcgcaggcgggccatcagttcgatcatgtcttccggcagtaacattgtgggcgagccgccacccaaatgaacttccaccacctgcacctcaggatcaatcagcgcgccaatccgttcaatttcgatgaaaagtgcctcaagataggtttttatcggggcatatttcagcgtatggcgcgtgtgacaggcacaaaaccagcaaaggcggtcacagtagggaatgtgaatataaagcgataccgtttgtccacgggcaagacctgccagccattgcgaatatttgccacagtcgataccactgtgaaaatgtggcgcggtgggatagctcgtataccgtggaaccgctgcggaatatttttgaagaaggtctttcgcaatcatcaggctcggcctcgtgtcatcctctgctttcctgatgaattaggacaatggagataactgagctttgacttcgatcaatttcttgctaatctcgtttaagtagagaaccatacaaacttggccgcagcgaaagctcggtatcgacactgggcggctccgctgctcatacaccagcttggggcgaacaatggatacgcacagcaaaaatagcaacgcagtcttgtgtgaagcaccgccagccgtgtgtaacgcctgcgaagcaaggcatggcggagtctgtgcggcactttccagcacccagttgaacgagcttaaccgcagctccacaaaacgtcatttcgccgcaggcaacgaagtgatcggccaaggtgagcaaactgcaagctacagcaacattctccatggtgtggtcaaactttccaaaatgatggcagatggccgtcagcagattgttggcctgcaatttgccccggatttcatgggccgtcctttcctgaaagaaagcagcctgacagccgaagccgccactgatgtggaagtctgcgcttttcctcgcgccagttttgaccgtctggtgggcgaaacgcccgatcttgagcacaagctgcaccagcaggccctgaaagagctggatgaggcccgcgagtggatgctcacacttgggcgcaagaccgctcaggaaaaagtggccagcttcctttatctgatcgccactcatattgacccgatgcagtccttcaaaaaaatgttcgatctgccgctctcgcgggcggacatcgccgattttctcggcttgaccattgaaaccgtcagccggcaaatgacaaaactccgaaaagaaaatgtgattgtcattgaaaacaaccggcatgttatcgttcccgacgaaaagcggttgcgcaatgccgctggcattgattcgtagcatccatgagcctgacaatcttacgctacccggacccgcttctggagcagccatgccaacctgtgcagcattttgatgacgagctgcgcagctttgctgaccagctttatcaggccatgcgcgccgcacccggcgtaggcattacggctgcacatgttggcaggctgatcagggtggtcgttcttgatctgccagagctgggcggacgaaaaacctatgttaacccggagattatctcgctctcgccagagatgatggaccatatggaaggcagcgtctgtatgccaggcatgacagacacgatcagccgcccacgtatcgcccatatccgctaccagcaacttgatggcagccacgttgaagaagaaatgcacgactttgctgccatctgtatgcaacacgagattgaccagctggatggcaaattctggatccatcgactgtcgcggctaaaacgcgagcgcctgctgaagaaatggcaaaaagcaggtcgtgcctaaagcctgccacagtgaatcctattcgctgcgacaggctttagctctttctttttcgcatgtacgttatcgttttattgaggacaataaaacgcgacatgctttatgaatcggaatccacagtacacagcattttagctttgagtgcctggctccccctcaccccgcctccgctttgctcggcggacctctccccgctggggcgaggaacccatgaacgttgctgttctttccgtcttctcccctgcggggagaaggtggcggcagccggatgagggggtgcgaagcccaaaaacacgggcgtcgtgtcctgtgaaccgaaacacaaacaaaaaaccgcccccggagggacggccttatttggtgctatcttagcttgttaacggccagaccgcgttttctgatgtaaaatgcacgttcatattgcatttactccacactctcgtcaagttgtaaattctgacaagtggggactttcaattgcaatccaatcttttttcattcgacatcggcaccaattccattggctggtgcgttctgggccttgatgagcgcaatgtgccaaatcgcatcattgacatgggcgcacggattttttccgatgggcgtgacccgaaatccaaggaatcacttgcggttgcgcggcgcgaagcgcgggccatgtcgcgccgcagggatcgatatttgcgccgccgcaaggctattctgcgcacattgattgagtacgggctgatgcctaccgacaaaatggcccaggaagcgctgttgcgtgaaacgggcgaccgggaaaacgaggccagcgccaacccctatgcgttgcgcgccaaagcgctgtctgagccattgccgcctgcttatattggccgtgcgctgtttcaccttggccagcgccgtggctttaaatccaaccgaaaaacagaccgcaaggataatgacaaaggcaaaatcgcccttggcattgacgagctgaaagcccaaatgcacaaagccaaagcgccaacctttggcgcatggatggcagcgcggcgcgaggacggccatgtggtgcggctgcgggctgattcggaagtctttgcgggcgatgcctatgcctattaccccgaacgatcgtttctggaagatgagtttcggcaaatctggcaggctcaggcacagttttaccccgacattctcacgccagagcgtggcgagcatctgtttcaagtgatgttctatcaacgcccgctgaaaaagccgcgcgtgggaaaatgctcttttaaccctgccgaagagcggctggccaaggcgcatccgctgtttcaggaatacagggtctataaagagatcaatgagctggaaattgtcgcacccgatctcagccagcaaaaactgacgctggaccagcgcaatgccttgatcaaactgctgcgcgacaaacgagaagtcaccttctcaaccatgcgcaaaacgctgaagctgatgcctgatatgcggtttaacaagcagacggaaagccgggaaaagctgaaaggcgatgaagtttattccgcactgggagataaaaaacgttttggtccgcaatgggccagttttggccgtgacaggcaatggcagattatcaaaaccctcaaagacgaagaaaacccggccgagctgtttgcctggctgaaggacgacttcggcattgacggcgagcgtgccgaagagattgccaacaccccgcttcccgatggttatgggcgtctgggagaaacagcgcttgcctcgatgctggacgaaatgcaggcagaggtcattccagaagcggaagcagccaaacgatgtggctataatcatgccaatcttggcgatgatcgtgatgaaggcttgccctatctgccgccctatcaggaaattctggagcaccagattccccccggctccaatgacccggaggatatttacgatattcgcaaaggccgcattaccaaccccacagtgcatattggtctcaaccagttgcgacgggtggtgaatgcgctgattgcccgccacggcaaaccgaaattgatggcggtggagctggcgcgggaacttcagctctcggatgagcaaaaaagggacgttaaccgcaccattgccaaaaacacccgcgatgccgaagcgcggtccaaaaaactgattgagcataagcaggccgacactggctataaccgtgtgcttctcaagctctgggaagagctgaaccaacagcacccggaagaccgggtgtgtatctattccggccagccaatcaatatcgagagactgttttcggctgacgttgaagtggaccatattctgccatggtcgcgcacattggatgacagccacgccaacaagattctctgcctgaaatcggccaatcggcaaaaaggcaatcgggctcctgcggaagtgccggagtggcaagatcgttatgatgaaatccttgcgcgcgcggcccgcctgcccttcaacaagcgcaagcgttttgcgcccgacgccatgcagaaggtggaaacatccgagcgggattttctggcacgccagctcaccgatacgcaatatctctcgcgcatggcccatgactatctgcaatgcctctaccccggcgaagagccagaccagcacggcgtgctgaaaaagcgcaaccacattatcgtttcgcccggtcgcctgacggagatgctacgccgcaactggggcctgaacaatcttttgccagaccataaccttggcggcctgacgcaggagaaaaaccgcaaagaccaccgccatcacgccattgatgccgccgtggttggggtgaccacccgcagcctgttgcagcggatttcctcggctgctggccgcatggaaggtgttgacctcgacaatctggtgaaaaaaatggtgaaggaaaatccgccatggccggggttccgcgaggatttgcaaaaggcggtcaatgctatcattgtcagccacaagccggatcacggcacggtatcaaccgttgcgggcagcgccaaggcccagacggcaggcaggctgcacaatgacaccgcctacggccttggcacaaaccgccatggagcgcccgtggccgtgcggcgcaagccgtttttgtcgctggagcccaaagacctgcccggcgtgcgcgacgacgaattgcgcagcgcacttgagggcgtgattggccatctgagggataaaaaagccatgcagaatgcgcttgcgcttttccggcagcattccttgcatttcaaaggcattcgccgggtgcggatgcaggagaatctgtcgctgattgaaatcagggaccagcagggcaaggcgtataagggctataaaggcgatgccaattatcgctacgatgtctgggagacgctggatggcaaatggcattcagaggttgtttcgatgtttgaggcacaccaacccaattggcaatcgcgcatccatacggagaaccccaccgctcgacgtgttttgagccttcagcagaatgatatggttgcctatgagcacctcgaagaggggtatacgattgctagaactgtcaagtttagcggtagtggtagtatattttttgcccctcacaaggaaagtggcagcctcaaagctcgtgatgctgacaaggacgatccgttcaagtatcttcaaaaatcggccaatagcctgaaggacatcggttgccgccaaattcggattgatgcaaccggacgagtttttgaccccggccctcaggatcgacaatcgagactggcaagaaaaaacaaaagtaccacataaattctatttataattgattcagaacttggtgaaacaatcagggaatggatcgtattgttgacatagcaacagatggccagcatttggccatctaccgaggctttctaaccgtttccagccatggcgaggagcgcggtcgcattgcgctggacgacattggcgcgctgattgttcatgcccatggcaccacatggaccaatcacgtctttgttaaaatggcagagcgcaatgttcccgttgtgctctgcgcatccaatcatgcgccggtttcggttgtctggccgctggaggggcatcacgcgcaaggtgcacgtttgcgcgcgcaaattgatgcatccaaacccttacaaaagcagctgtggcaaaaggtggttgccgccaaaatccgtatgcaggggcatgtgttgaccgccaacggccatgaggcaggtgcatttgacttgctggcccgaaaagtcaaatcgggagatagcggcaacgtagaggcgcaggccgcccggcgttactggaaagccctgtttggcaacgatttcctgcgcgaccagaacgcagaaggcgcaaactccctgctcaattatggctacaccattcttcgcgctattgtttcaagggcaatctgcgcctctggtctgcatcccaccattggcatatttcactccaaccgcgccaacgccttcgccctggccgatgacctgatggagccttaccgacccttggtcgatcaaatggtgctgaacctgatccgtgcaggcatcaacgaggtctcccctgcggccaaaaaagcactgacctccatcacaacatttgatcttgagacacctgttggcgtctcccctctctcggtgcaggtcaaccgattcgttcattcctttgctgtcgccttcgaaacgggacaagcccagttggagcttcccgcccttccctctgctgccgagcttgcgggattgggactgcaaacagaagaggaagacgaatgagccctccttgccaaaaagccaaccacggcccacgccatctcagcggttatcaaatcatgtggatgcttgttacttttgatctgcctgtcgaaaccaaaaaacaacgcgctgccgccacaaaattccgccagcaccttctggacattggcttcgaaatgagccaactttccaattacttacggttctgcaacggcaaggaacagtttgacagctatgtccggaacatcgaaaaagctctgcctgaatggggcgatatttacatcttccagttcacagatcgacaatacgaaaatattgtccgattctcggatcaggcacgccggaaacgacgaaaaaacccggaacagctcgcgcttttctaacaaaaaacacggttttttaatttcgattccggtcaattctttttatttttcaaagaattgaccgggtatcgagcatatcacatcagaaaacgcggtccagccgcaacgttcaaggccgcatttctggaaatcgtgcgagcatatcacatcagaaaacgcggtccagccgcaacttgagcaatgagcgattgcacatcactgctagcatatcacatcagaaaacgcggtccagccgcaactgtcaaacatgcgccatcccgtgcggttttagcatatcacatcagaaaacgcggtccagccgcaacgaaattccgctcaatacggtggtgaaaatcagcatatcacatcagaaaacgcggtccagccgcaactcaggttagtagtgataacctctacaatacagcatatcacatcagaaaacgcggtccagccgcaacttcgagctgatcaacagcacgcaccaaggcagcatatcacatcagaaaacgcggtccagccgcaaccgccaggatctaactagagcgggggtttcgaagcatatcacatcagaaaacgcggtccagccgcaactgcgtcaagttcagattggaattcattgtgagcatatcacatcagaaaacgcggtccagccgcaactattcgctcttgtattgattacgatggtgaagcatatcacatcagaaaacgcggtccagccgcaacaattcgctcattgcctaattacctcaatctagcatatcacatcagaaaacgcggtccagccgcaacatgaaacttagtgcaatgcccgtgaccaaaagcatatcacatcagaaaacgcggtccagccgcaacattcgttgccggttatcagttcggcggtttagcatatcacatcagaaaacgcggtccagccgcaactgaaaggatgcacatgtctctcgaagcacaagcatatcacatcagaaaacgcggtccagccgcaactcacggtacgctgcaagattattgggctgaaagcatatcacatcagaaaacgcggtccagccgcaaccgaaaccgtcgccactcatagacgtaagtaagcatatcacatcagaaaacgcggtccagccgcaacctccgctgaagcagataccccattttaaggagcatatcacatcagaaaacgcggtccagccgcaacctgcaatatcattgccagtaagaaaggttgagcatatcacatcagaaaacgcggtccagccgcaacgctcgatcagatgatcctgacaccaggttgagcatatcacatcagaaaacgcggtccagccgcaacaacggagatctggactacgaggaatggctcagcatatcacatcagaaaacgcggtccagccgcaacgtccgccgcgagtgctgtttttcagcgcgtagcatatcacatcagaaaacgcggtccagccgcaaccactaccattcgttctttacccgaaccgcaagcatatcacatcagaaaacgcggtccagccgcaaccgccaggatctaagtagcgcgggggttttgagcatatcacatcagaaaacgcggtccagccgcaacctacaagtggctgattgttagttgctggctagcatatcacatcagaaaacgcggtccagccgcaacgatctgaacgtcagctacacgcttccatccagcatatcacatcagaaaacgcggtccagccgcaacgtgccccaactgctggacttttcggtatggagcatatcacatcagaaaacgcggtccagccgcaactcatcagtgcctacctttgcgcattgacggagcatatcacatcagaaaacgcggtccagccgcaacgcgttgcgcaccattgccacccaccgaactagcatatcacatcagaaaacgcggtccagccgcaacgtgaagaagaactggaaaagttggtggcgcagcatatcacatcagaaaacgcggtccagccgcaacccacgccgacactgttattggcatacgcttagcatatcacatcagaaaacgcggtccagccgcaactgcactcgctcacaaggcggcgggaatgcgagcatatcacatcagaaaacgcggtccagccgcaaccacggcggttgtcgcatcactggcgaactgagcatatcacatcagaaaacgcggtccagccgcaaccacaaaaagcggcaaggcaccaagccgtggagcatatcacatcagaaaacgcggtccagccgcaacgccgtggggtttgttccctgcctccgtgagagcatatcacatcagaaaacgcggtccagccacgacatccagcagtccgcccttatgaacactgaaaaccagcacgccgcacctgaagcaaatgtatgcgtgccgcgtctggttttgacgccgggtgttctgaaatttttgttacgatttaaaaaaagaaaaacccggcctaagccgggttcttggtgcggtcgagaagactcgaacttccacgggttgccccacagcgacctcaacgctgcgcgtctaccaattccgccacgaccgcatcgtggtagtgtgtgtcgatttgcgtcgacgaggctgcatctagcaaatgccttcggcgtgcacaagagtgacgtgcaacatttttgtgaaatcatgcgcaatcatgcgcaacaacaccctttatatttgatttttaaggctttttaaattccatcaagattgaccaattccgccttgcaaacggcagatcaaagcatgggcctgttaagacaccatgccatcacgccggaacaggcgtttgccctcatcaattttgacagccgctacgattccgatttatgaacgcaacggagcgctttgaacgcagcacgtaacattggataagggatgtctttttgacgcccttcatcggcatcatcacagaaacaggaccgtaagccccatgcttcgcaccgatatagaaacccgtatgtttgcagcggctgactgtcctgccgtgcgctggcgtattgctgagcggcccgttccctatgaagaagcccttgccacaatggagcaagaggtggcagccattgccaatggcgaggccgacgagctggtctggctgctggaacatccgccgctttacaccgccggaaccagcgctgatccgaaagacctgattgatacgcagcgttttccggtgttttcaaccgggcgtggcggagaatacacctaccacggacccggccagcgcattgcctatgtcatgctggacctcaagcgtcgccgtcaggatgtacgggcctatgtggcagcccttgaagatgttgtcatccgcacgcttgagatgatgaatattcgcggcgaacgacgcgaagaccgggttggcgtatgggtccgtcgcccggacaagcccaccctgcccgatggcacgatggccgaagacaagattgccgcattggggatacgtctgcgtcgctgggtcagttttcacggcctgtcgctcaatgtcgagccggatctttcgcattatggcggcatagtgccctgtggcatctcggcctatggcgtcaccagtctggttgaccttggattgcccgtgatgatgacagatgtggacattctgctgaaggaagcctttgaggccgtatttggccccactgtggtggagccatgatcaattctcattgcctgcgctagtaagcgatactgtatcgccccattgactatacggctggattgcgctccagatcaccaatctgacgatgcaatgcatcaatcattgccgctgtttcctgatgcattcttgtcaggcgctccagctcccaacgcatgaaattgatcatgtctgtatccgcgctctgaggctgcgggccaacaccctcgcccgtcagcaaccagccaggcgaaacgccaagcacgtccgccatacggaccagactttgattatcaatctggtcattgcccgcttcccacgcgcgaattgtgctctcggaaatatctgccgcaacagccagatcagacaaatccataccggcactatcacggacaatgcagaggcgatcaccgaacgattcacggctaatccccaacaggcccttaatatcgaaacgcctcatgaaccaagatcccttttacattcaactttgcgacccctcgcccagacgaaacaccgacaaatcgatttgaaccgatcaaccgtgatcacgcatcccggtggtatttttacgtgtaacccatcaacaatctgcttgtgacgcgccgcaatcattcaccagaaaatcagccttaaaatgacgcagtcacgtttttgttcccaagatttgaaaaacaacctcagcatttcagaaacgttacgagaagacgccgagacaggcaactccctgttaatctccaaacactcactgctgcaccagatccgagcaccccaaaaggatgacaacggctggaccgacctttcttttattcgaaaaatatcattatttatcaatactataaatcaaaaactaaatgcttgcgccataaattagcaggtcacacttccctgaattacccccagaaagagtgcgttcttcaaaccgctttttttaattttcgaattaagttcaggttaacgggtttttatgaattgtatcaaaatgggacaaaatatccatcacgaaacacgtcaactctcgatgagtttcattctcaaacagcagcaggcgtaacaatgctggcgataacaacggcgtaaaaaaacggcagagttgtcactcaagacaactctgccgtttttaaaaatcctcttggggattgcgagagggggctattccgccgccctgggctgctcgctcaagggttcggacatttcatctgcctcaaccggatcatgctctgccgcatgttccagcggctccagctcataggaatacccctccagcatggagtaggcgcgctcaatcgcatcaatctgcgtttctgccgccttgatggcatccgagatcgattgcgtgcgggcgcgcagcatggagccaagcacatccttgtcgggacggcgaccgagtcgatccacatgctggcgaatgcgaccgcgatgacgctccagctccagaatatgaaagcgcgatttcagcacatcatccgtcagcttgcgccgcagtgccgccacaggatcgaagctgccgggttcgcgctcatcaagaatcatgtcattgatcagcgattccagcaccaccagtcccttaagatcggccacgtcggccaattgcgggtcatagccggtatcgtcataaaccttgcggcgcacaggatccttcaacagatcataggatgtcgagatccggccaaactcgtccggatcaccacccgtatcgggatgtgcgctcttgaccttcttgcggtatgccgccttgatggccgtctcatcggcatcgcgctcaagtccgagcattgtataggggtcgatcacagggccacctgttttgtgtcattgccaagtcgtatgaaaagccggatcaaaagagccaacatgttcaccactgaagttgagagtctgtcaggttcagattgaaccagacagaccctaactactcttattttcgtttgccttatcgggaaaaccggattccacttttccttgacaaactctagcgcaagcgcggggtgaataggtgaaaagaaatccacaatccccaaacacattgcgccgttgatcaaaaccgcatgtagcagaggcagaacaacatctcaatgtggcaaagaaacagcattttcgctgcaaaccttggaaaggccgcattttccagtcgcgcgaatggattggctgttataaaagaaccgcaaaacttccactgccggatgaagagagaaccatgacgatcccgaatgcaatccagatcaccccggaactggtcgcctcccatgggctgaagcctgaggaatatgaccggatcctgcaactgatcggacgggagccgacctttaccgaacttggcatcttttctgccatgtggaacgagcactgctcctataaatcctccaagcgctggctgcgcaccctgcccaccaccggcgcacgggtcattcagggcccgggcgaaaatgcgggcgtggttgatattgatgatggcgattgcgttgtcttcaagatggaaagccacaatcacccttcttatatcgagccttatcagggtgctgccactggcgttggcggcattttgcgtgacgtttttaccatgggcgcacggccgattgcggccatgaacgccctgcgctttggcgcaccggatcatccgaaaacccgccatctcgtatccggcgtggtggcgggcgttggcggctatggcaatgcctttggcgttcccaccgtgggcggcgaagtggagtttgacgaacgctacaacggcaatattctcgtcaatgcctttgcggctggccttgccaaatcagacgcgattttcctctcagaggccaagggcgttggccttcctgttgtttacctcggcgcgaagacgggccgcgatggcgttggcggtgccaccatggcatcggcggaatttgacgaatcaattgaagaaaagcgccctaccgtgcaggttggcgaccccttcaccgaaaaatgcctgctggaagcctgccttgagctgatgaagaccggcgcggttattgccattcaggatatgggggctgctggcctgacctgttcggcggtggaaatgggtgccaagggcgatctcggcattgagcttgacctcgacaccgtgccggtgcgcgaagaaaacatgaccgcctatgaaatgatgctctcggagagccaggagcgcatgttgatggtgctggagccttccaaggaagagattgccaaggccattttcgtcaagtgggggctggattttgccattgttggcaaaaccaccgatgatctgcgcttccgaatcctgcatcagggcgaggaagtggccaatctgcccatcaaggatctgggtgatcaggccccggaatatgaccgcccatggcgcgaatcagacaagcgtggcccgcttcccgccaatctggtggaagaaccgggcgattatcgacaagcgattctctccattgtcggctcggccaaccagtccagccgtcgctgggtttatgagcaatatgacacgctgattcaaggcaattcgctgcaattgcccggcggcgacgccggtgtggtgcgcgttgacagtcaccccaccaaggctttggccttctcctctgatgtcacgccgcgctatgtcgaagccgatccgtttgagggtggcaagcaggcggttgccgaatgctggcgcaatattacggcaacgggggcagagcctctcgcctccaccgacaatctgaattttggcaacccggaaaagccggaaatcatgggccaactggttgaggccatcaagggcattggtgaagcctgccgtgctctggatttcccgatcgtctccggcaatgtctcgctctataatgagaccaatggcgttgccattctgccgaccccgaccattgctggcgtgggccttctgccagactggagccgtatggcccgaattggcggtgccaatgagggtgatcatgtcttgctgattggcgtggacggttcacatctgggcagctcgatctatctgcgtgatcttctcggccgcacagacggtccggcccctgaggtcgatcttcatgccgagcgccgcaatggtgattttgtgcgctctgccattcgcaatggtcaggttacggcctgccatgatatttcttccggcggtctggccatcgccttgagcgacatggccattgcttccggcaagggcatggagattaatctgtctgaaagccgtggcctgaaccatgctttgctgtttggtgaagatcaggcgcgctacgtcatcacggtgccggcagatctggccaacttcctctgcgccaatgcggaaggtgcaggcattccgttccgccgtctgggcaaggtcggcggtgatgctcttgccattgctgatgtgtgcacaatcaccgttgatgaattgcgcaatgcctatgaatcgtggttccctgatttcatggatggcaaggcacctgcccttgctgccgcagaataacgaaaagttgggagcagaaccatggcgatgaaacccggtgatattgaagacatgatcaaagctggcattcccggtgccaaggtcgtgatccgcgacctcgcaggcgacggcgatcattatgcagccgaagtcgtggccgaggcctttcgcggcaaaacccgtgtacagcagcaccagatggtctatgatgccctgaagggtaacatgggcggcgtgcttcatgcacttgccctgcaaacatccattccagacgcttgagatagaatcgcacagtcatgagcaatccaatttcttctttcatcaagtctctgctgggctccatcaaaggtgagatggccgacaggcggcaatataaggaaaagcgtctgcaacgggccaatgcgccccagacggagaagaacagtgacattgccaagccggttcaccgcagcaaatctgccagacaggcacggcgcagaacccgcagtcgtgggtgatgtcaaatccacgtgcactgttttgcaagtttgacacacggtgcttatataacacatatcaaactgcggccttgacccgcatgtgaaaggacaaaatccatgagcggtgtgaatgaattcatcgacaatgaagtgaaaagcaacgacgttg

SEQ ID NO: 3026 - DNA, 23261 bp, synthetic construct
  misc_feature 1..23261: note = Synthetic
  source 1..23261: mol_type = other DNA
gggcagtctggttgccgccccaggtcacggccgacgcaggcaggccgcggtgacgcaattccgcttcgcaaagaagagcgacaagatctctgagatctttgtcattcagaagagcgatatcattgcccgtgatctcaaacatgccgacgcgtaaccaaaccctcgattctggtcaaatacgtacgggccaaatcttttcattgataggcccaatcgcccatatttccccgaagtcaattggcgtcattcgtgcagccaaagcccaacggcaacttacggggaacgatctattggacttgaacgactaggatgagggcgcatagcggtcgtttaatgcaccataaacaagtctgcgcagggtcaaaatcgaccaatcgaccggaagcgattcgaactttttcaccaccaaacaccgccgtttctacgccttttcgcgcaaggaccgtctgatgctctttgtgcgggcgtagtttcgccggttatcggcggcaacagagggcaatcggcggtatttggcgcgctgtaccgggtgaagatgacagttacatctacgctatagccctctaaattccagtagtgtttctgcggataacatattggaataagaagtgttttatctaatcagcgggttggtgacatttcgagccattgcctcaatctgtcgacgacggcgctaccacggccgaagatttatgatcggcggatttggggccggctgctgcctgtccggttctggcagaaaaactcaggaagccgccgttcggcaacgtcgacccattgtcgtcgttcggtgttcttccaacaccacccaaaacctgccgttcattcagtctcgccaaacggcaggaccgagggcgttagctgctcggcagagtcatttgcgcgcggacaggaaagcgggctactacggtgcagtacatccgagaactggcaaggagatatccagtttgagctagtcggtctatttccccatcttgccaatccgcatcagatacgattttgggtgtagccaattgcgctcggtgggaagggttagcgactgatgctctgtgagtttgccaaccgctttccgcgtgaccttgctcagctccttgagcgcaaccgtcgtcttacccgcaacttccgcgaggagaccgcgaccgatctgctgatgatgggtctcatgccactccagccgctcggcgtccgcgtcgacttcccggatgagaaggtcacgggcgcggacatggactggatctatgcagcaccgcatgaggttgggggcggcagctacctgcgcctgatgatccaatcgaagcgctgtaaggagcagaggctaaagaatggctcaagctactggtattatgatcatctcgatcatggcacaccgaaaggtagtcagagtcagacgctggtgaaccatgctgcggcatcgcccgatggcatggccacgcttccgctctacatgttctatcatcctcagtcggctctgcagcgtccggtaggagccctcccggcgatcgaaggcatcaacattaggcttgcgcgcgatgtcgtcggtatcgtcgccggtgggtgcaagcggaaggaaaaaaaggtcagccgatggcgggcgggcttcatgtcgctgtcagatcttctgtgctggccggtggttgacctgccttcgccgccgtcaccgccagtgggccccacaaccgagttcctcctgcctagcgggttcggggagcttagctatctgtcaatcgccttccatccggacctaatcgccgagcgcatcaatctgagccgcggcgtggccgcccgtgccgccgaccctgatttccaggtccgttcgtcaggggaacttcccgacagcattcgccgagcaattgccggcgaggtgaccgacaaagaccgagccactctacaacggccgagggtcatcctcagcacccagctaacgcgcgagcacccgagctttgagcaggcccgcgccgctgtgcgtcgtagaagggggaggtcagccagtaactaaccgcaaccgcatggcaagatcgaccggcgtcccgaggtgacgggacgctcccgcgcttcaacctgctcgcgttgatcctcgtcgaccgtgcccgacgatcggaaccgtttacccagaaggcaaccgcgagacgtgctctgcgcgcctcagtcatcagcatgcggatcgcgccgagaagctttactctgcggacttgcataatcgtcccaaccgtcgtcaacatgatccgatttgcgcagacagtctggcaggttagtttcgggagagcgtcatgcgccacgaagaggtggaggaagatctgtggccgctgatttgcgacttcttcttctggttttctcggttcgagtctgccctaaaagagaataactggctccagtcgaaaacggttaatgcaacggcgctggcggactggaagggtttcgtcgaagcgtatggcggcgactatgttccgtccaatgccgccggacggctcgtcgtcgccaacccgcagaagcaaatcgttggcgatgccgggctgacgttcaccgaggtgactttcacggacagcgcctcgcagctcgaccgcgtcacattactgctaaagacggtgcgcaacaacctgttccacggcggcaagcacggaagtgcctattgggacgatcccgaacgaatacggctgttgctgccgctttgtatcaccgtgctcggagaactggccgagttcggcgggatgcaggccgactataccggttattactgatggcgaggcctccaacagactggttcggtggcaaaggacgtaattgaaatagtgcaaaatattgcggggaacattgataccgtccgggcatcgcgcgcaggccataccttccacgagagatgggctgctcggagagccttacagttggttttcccgaatgacggtctgtttgcgatcgccgtagagggaatctcgtcgaccgagactgcaagcccaggcacaagcggcgaggaagtcgccgatcttgtcctctattacggccatggagacaattttcacagctgcgagcggcttgagaccgttcaattcaaatacaggatacgcgacgaggctgtcacagccgcctatctgaagaagacgatcgaaaagttcgctgacacaatcgtcggctatgaggctgcgtcgtctgcggccgacgttgacgataaggtatcgttcctctttgtcacgaactcggaatttgcggacagtctttgggacgcgatccagtccctcatcaagggaacgacgccttcagatctcggcgcagccactcaggctcgcaacctcaagaaatggtgcgcgaagcgcggcctgtcggatgcaagccgcctcttctcaagaatagtctttcgggccggggagaagagcctcgcagctcaagataacgcactcaagcggacactcaccgactggtcggccgggacggactccgaggctcggctccggctacatggacttcaggaccttgtcctgaagaaggccgggccaagcggtcagggcaagaaccttattcaccgcgaagatgttttagacgcgctcgattgtgaaccggaggacctgtttccggcagacacccgcttcatcgacgtgggcgctgtcgtcgggcgaaccgagctttcgacgacaggcgaactgatcaagacctcaccgcttcccgttttcgtccacgcggaaggcggagtgggcaagacagtgttcgtccagagccttgcggcgaggatggccaacgaatttgaggtcatcgtttttgattgcttcggaggtggttcataccgttcggacaatcactcccggcaccttcccagaattggcttggtgcagatcgtcaacgaactggcgtcacgaaccctctgcgatccgctgctgccaggcggggatgacagtcgcaggatcatcaaagctgcacggaaacgactggcgcaagcggcgacagcaatccgaacccaatcgagcaggctcggattgctcatcatcatcgatgctgccgataacgcccagcttgaagctgactaccgccacgaagaggcattcccgaagcttcttctctcgaccatcgacgaagacccgatcgaaggtgtgaagttgctgcttacagcccgcacgcatcgcaaagagaacgtcatcggacgcactacggtggaagaagtcgagttggggccgttcaccgatgtggaagcccgcgaatttctgaagacccgcgtgccacacgcttccagtgtagaaatagccactgccttgacccgctccggtcggaatgcgcgtgtcctcgattatctggttcagacctgggatacaaacgtactcggcgagacgtctgctgcgcccatcactgtccccgaaattatcgccgaaagttgtaacaagattgtctcggaccttcatgttgccgggtggccggattcagaggtagccgagttcttcgtggcactttcacttctacctccccctattccgctcgccgaactggctaacgcgttggggtggtctgtggctcaggtcaacaccgcagcatcggatttggctccaatgctcgagatcacttcgcatggcgcgatcttcagagacgaacccacggaaacatatgtgagggagacctattccggcaaaccagaagctcaacgggccattgccgaccggcttctttcttcgcagggtacatcggcctatgccgccgaagcgctgccgcactttctggttgtcatcaaagacagcgacagagcattcgcactcgctgattcaaccagttttccgacgacagttcagtcagagttcggtcgccgcaggctgacgctcgctcggctgcgtgcggcctttcgactggcggtcgcggagcatgactttgaccgcgtgctgggcctcagcatgcgactggcacaggcggtcgcggcgaatttgcgaggcgacgagttcattcgtggcgccccggctctcgccgttgtgcttggtgacgccgattcctatcgccgcctcttcgcagatcgctccggatggcgcggtgccagaagtgcaaggctgacaattgcgcatcgctttgcgggtgacagcgaagaagccggaattcaatgcgaaagcacgattcgctggatcaactggcacattgcgcagccacctgatgagacgcgtggcgctcccgccgggccggagatcgacgactacgcggctgtgctgttccaacatgtgaccgaaggggagttcggcatcgctgaccgcaacctcgctcgctggaacgatggcttttcgctgtcagcaagcgacaagcttctgcagcttctagagcttttcgacagggcaaacggcacggcgatactcgcgaattttgtctcgtttgccgcaagcgacaaaggcacgtccaaggcgctcaagctccggcttctaacacgcccccgctatctcggcagaaagcaagtcaaggcactcgccagagcgatcggatctcacgttttcgtcgaagaccgcgaagatgaaggcttttcaatcaggtctgagcgagagaacagcggcgatctcgtgcaagcggcgctgacaacgcttttctatggttcccgaagcgctgccagaacgatcatccgccgtgcgccaacaacccgtccttccgcctacgactacggcgaacgctatggcccttcgagagtttggcccccaattcttcgcgcttgtgttcgcgcatggtcggccggaagaccgctcgcctgtcatgacctgcttccgaacgacgtgaagattaccaggcaggctaaggctgttaatgacaaaagaggactggtggcttttctcaaagagctacgccaagccgcccccgccgtttcggccgagaaaagtcgcaagaagcagcagagggcgcggtttagtgagcgagaacgggaggatatcagcgaagctatcgagcttgcccgtgagttgatctcgccgattgaggaagccgtgctgtcgcgcaagggtatctccggtacgagcgtcgatacctttctcgacgtgtggcgcaaacacttgcgcgttggcatacactggaatgcggaaagtgcagctgatgtgcttgcccgcaccatcgggcttggttgcgttcgcatcctgctaaaccattcgccgacactatcggcagcccaagccaaggtcctgatcgatctggtttccgctgggcggttctttcctgcgcagaaaatcgatctattggctcggctggctttgcgcccagagcttcatgagcttgccggggaattcgcgcagcatgttgtggagcaaatccgtcaggatgacaatatcggtcagcgtggagattcctacgccgaccttgcggcttcccttgtgcccatgggcgttgaagaggcccgtgaatactatcgacaaggcttggcccagttggaccaaatgggcggagagagctacgaggaaatctactcgctgcttcattttgcagcggttcagaaaggcggctttctgaaacccgcactagcgcagcggctgatgaatctttgccagatcattgcggctggcgagccaagcaagttcggatggacattgttcgctcgcgccgctgccaactcaataggttttccggcaatcactaagttggtgcgatggcacgatcaggatgtagcgaagctatcttacggcttgccgcagcttgcatgctttctagccgaaaacggcaatctcgatccacgccgcgccgcctttgtccttacgatctgtgaagatcacggctggtgggactggcgctccggagacgcggtcgccgatttactgaaattgtccgtaccagcggatcagaggcgcatttttcaggcgatcatctcgaaactacgctccgaacacccggacgccgcctggccctcgctctgggaaagttacctagagaccgccaatcagtatccgaacgccatcacgaccgaggagcgagaggcgatcgaacagctcaggatcgaggccaagcgcaagcaggatgcgtataacagtcggaacaactcctcacccgatatcctgaccgagcagaccccaaaatcgaccaaagaggatatgagctacttcatctcagcgttggtcgagaactgcgatctgtcgtcggcaagttcgatcgacagtgcgctgaaggccatcgatgagaagatacaattttcctacgatgctcggcggcgcttttacgccgagttgcgggatgcgtgtccatacgcgaagcgtttggcatttttgttcgcgatctgcgacgcgaccgagttgaattacacgcagtcccttgaaatcctcaccgactgttttcgcgtctggagcggttccaccgcgcatctcgtctcaaacgcaaagtcgctggttggacgactgttcgcgaacaaggcctcggaatttctcgaaggccagttctccaatgtcgcgcgcggcgtccgccagctgtcggatttgtgcggcgacaatctctttgcattggagctcgttctaaacaaggtcgtggcggatgaggtcgatttcggaagtgatgagtggcttcaactggcaacggcgctgaccgacgtaacgtcgggccaggccgggttagaagcgctggagttactgctgtccgggcctgcatcccgcatagctgacgagatcggagaaggcgcctttcgtcctgaacaagcagttgcagggaacgaggatgacttcgttgccgacgtgatttggcatctcctcggcgatgacgacgcatatgtccgctggacggctgcaagggggctgagaacacttgccgagttggggctcgtcaacgatctcggcctgctgcttgatcgcttcgacagaagagaagtcgcaacactggcatcaccggatcggaagctgccgtttcagaactcccagcagtggttgctgatggggctggcgcggaccgcgttgcgccacggacaaatgatgcggccgctttggcccaagttgttggctctttctcaaagaagcgacctgcacctcatacataaagtccaccttgtccgttgtttgcggcacatcagcagcgagcgagagcatggcgctgcgctggacgcgttgcaggatgagatcgataagccgcagaagggaatcgtcaccgacgacacccacccgcccgcgggaaaacccacgtcaggttttcgattcggctacgagttcacaaaaacagaaatcgacaacttggcccggctgttcaatgtcgcgaaggcaacggcggaagacgccattgcggccgagatcgtgcgcctatggccggaggcaacctccctggacagcttccccggccgcgaccggtaccaatgggaccgcgacgatcgatatgaattcttccgtgaacacgttcaacggcacgcgctgctcagtgctgccacgagcctttcaaagaagctacctgtggtcgttcgcagctatgaaaccgaagagctctcgccctggacggaatggcgcgatcgctatgacgttacatttgatgacggcttatggctatcggactggaaggacccgatcccccaacaggcaaaggaagacctgctgggcaataggattggccaacaggaaacgctgcaggatcagcaaacggttttgcgtaagctaggcttccgggacaccccggacgatgcgcagtttccgctgtacgggcgctggtcatcgccggacggcgtctcggtgagtatcgtgtcggcactgacggagcgaaagggcgctgtaggccgctgcaccgcactcgccaggcaacccagccatgacctcttgctcccggagttctgggacgagggctactatgatcagcgctatcgcgaaaagagccccttcgctcccttggtgtgggcacccgagacccacggtctcggcatcgacatcggcgacgaaatcgccgcgaaaggtcccgccgggagacctcgtcttggaatcaacctcaccaaacgcctcaagttagtcaatgaaccaaacggcggtgattggtgcacggccgatggaagtctcgctctgcgcagccaagtctgggggagttggagtcccaatcccgacgacaccagatatcgccacaataacgatggtgaaattctatgggcttcggccgattggcttgcttcgatgctgtccgccgtggagaagcaactcgttttcaaactgaagctttggaaatacagatcatcacgcgactatgatgctacaaacggagtaaagcttatccttattggactcagacgggatgacgggactcttagattctggcacgcgaagaaagcttcgcgacgagaccattgatgtttggggcgtccggctggcagagcgtgagctgcgcaatttgttcgaccgaatggctggttttgggaagctgctaggttctgctcaacggccgaattgggggcgcatagcggtcgtttagtgatccataaaccacgtctgcgcagggtcaaaatcgaccaatcaaccggaaacgattcgaacttttccaccgccaaacaccgccgtttctacgctttttcgcgcaagggccgtctcacgctctttgcgcgggcgtagtttcggcggctatcggcggcaacagagggtaatcggcggtatttggcgcacccgacaggattcgaacctgtgacctctgccttcggagggcagcgctctatccagctgagctacgggtgcctcgcggaaatatggagaaacttccgcgcaatcgggcaactggccgaccgatcctgcgcttcatagccgatgcgtcgacggtcatcaatgactgatttcgggtaaggatgacgttggtccgatcttgcggagtgcgacgttgcgtcggccacagcggtccggtcgggagcgacgcgttcaggagatgatcgccgaggcgtcacctcaaaagaaaaaagcgcccgccggagcgagcgccttatctggtgctgtcttagcttgttaacggccagaccgcgttttctgaactgttacatatatgaaagttccacagtaactctgctttgtcaagcacgcttctattggagtttttggggtgaggtgataggtgattattgggggaagttactaggggaggggtggttatgcctttcaggcagccagtttcttacgcatttgacatgggcaccaattccattggctggtgtgtctttcggcttagcgccgcaggtcatcccgtggccattgccgatgccggggtgcgcatttattccgacgggcgcgatccgcaatcgaagacctcgctggccgttgcccgccgtgaggccaaggcagccgcacgccggcgcgaccggaccaagcgtcgccagaaggcgaccctgcgaacgcttgccgaatacggcctcatgccgggcgggaaggacgagcgtgaacggctgctgcgcgagacggccgacagcgccgacagaaatgcacccgccaacgacccgctcaacctgcgtgcccgcgcgctcacggagaagttgccgcttcaccacatcggacgcgcgctgtttcatctgggccagcgtcgcggtttcaagtccaaccgcaagaccgatcggcgtgacaacgacaagggcaagatagccattggcatagaccgcctgcgcgacgccattcgcgaggcgaaggccgaaacgctcggtgtgtttctggcatcgcgccgcgcccaggggctgcatgtgcgcctgcgtgcgggcagcagcgtcattctcgacgatggttatgatttctatcccgtccgcagcctgctcgaggaagagttccggcacatctgggacgcgcaggcggtgcactatcctgatgttctcaccgaggcgcgcggcgagcatctgttcaaggtgatcttccatcagcgtccgctgaagaagccgcgcatcggcagttgcaccttcaacccgctcgaacagcgtctggccaaggcgcatccgctgttccaggccttcaggctctacaaggaagtgaatgaactggaggtcgtggcgccggacctttcccaacgcaagctgacgttggatgaacgcgatgcgctggtgttaaaactgcgtggcgcgaagacggcgaaatataagacgttgcgcaaggacctgaagctgacgccggacatgcgcttcaacaaggaaagcgaaaaccgcgtggatatggccggcgacgaggttactgcggcgctttcggccaaggggcttttcgggccgcgctggaacacgctctccatggatagccaatggaaggtgatcgagcgtatccaggaggaggaaaacccgtttgtccttcaccagtggctggtggaaacgcatggcctgtccgacgatgcggccgaggccgtggccgcctgccatctgccggaaggctacggccggctcggtcacaccgccttgtcgaccatgttggaggaactcagggcggatgtcattcccgaggctaaggcggccgagcgcgccggctacaaccattcctatttcggtaccggtgaaattttcgatgaactgccgaaatatcaggaggttgttgcccgcagcattcccccgggcacaggcgatctggaagacgaatacgatgtccggaaaggccgcatcacaaaccccacagtccatatcgggctcaaccagctgcaaagactggtcaacgggctgatcaggcgtttcggcaagccggccgaaatcgcagtcgaactggcgcgcgatctgaagacaagcgagaagaaaaaggtggagatcaatcgccgtatcggcgaaaacacgcgcgcggcgcggcagcgttcggaaaaaatcgcggaactccggaaagatactccggctctcgtcgacaatggctacaaccgcttgttgctgaagctctgggaagagctcaatccggcaaagccggaggatcgctgctgcatctataccggcaagccgatcagcatttccatgctgttttccggtgcggtggatgtcgatcacatcctgccctattcccgcacgctggatgacgggcagggtaataagctgctgtgcctcaaggaagccaaccgcgtgaagcgcaaccgcgcgccttccgaagtgacggaatgggccaatcactacgatgagattctcgagcgcgccaaccgcctgcccaagcccaagcgctggcgctttgcgcgcgacgccatggcggatttcgacgccgatagcggctttctcgaccggcagctcacggacacgcaatatctgtcgcggctggcgcgcgaatatctttgctcgctctatcccgagaaacacgagcagtggcgggtgcgtgtcattcccggccgcatgacggaaatgctgcgtcgccactgggggctcaacaccctgctgcccgatcacaactacagcgatgcgaaaaatcgcaatgaccatcgccaccatgccattgacgcggcggttgtcggcgtcaccacgcgttcgatgctgcagagaatttccacggaggccgcgcggcgcgaggagcaggaactggaagatgtggtcaagggcattccggtgccgtgggagcacttccgggatgatctgcagcaggcgctcgacaacatcgtcgtcagccacaagcccgaccacggcaccgttgggcttgatgacaaaggcaagtggcagacggcaggcaagctgcacaacgacaccgcttatggcctgaccggcgaagtggatgccagaggcaacaccatcgtggtgcgtcgcaagatgctgctttcgctgaccgacaaggacattcccgcgatccgtgacgacgaactgcgcgcgcggctctattcggcggccggcgggctttcgggaaaggaattgcagcaggcgctgctcgattttgcgcgcaacgatccgaaatatcggggcatccgccgggtacgtgtcaccgaaacgctggcggtgatcccaatccgcgacaaggacggcaatgtctacaagggctacaaaggcgacgccaactatcgctacgatgtatgggaaatgaaggatggcaagtggcaggccgaagtcatctccatgttcgatgcgcatcagaaggggtgggaatcgccggtgcgcaaggcaaatccaaccgcgcgcaaggtgctgagcctgcagcagaacgatatggtggcctatgagcatccgagcgatggctacacgattgcgcgggtggtgaaattcgccagttcgggtcagattgtctttgcccggaacaatgagggcggcagtctcaaggcgcgtgatgccaaccgggacgaccccttcaaatatttctccaaaacggcaaatggcctgcgtgagataaaggcgcggcagatccgcatcgatgaaaccggcagggtttacgatcccgggccgcgtgatcgggaaagccgcatgaccagcaaccaaaaattgaaaacaattgcaatttaggattgttttacctccgtgcgccagacttggcgcatggagcgtgtcgtcgatatagcgacagacggtctgtatctggccgtccatcgcggttttctcaccatcagcgatagtggtgaggaaaagggccgtgttgccctggacgatatcggcgccttgatcgtgcatgcccatggcacgacatggagcaataccgtgttcacgcggttggcggagcgcaatgttccggtggttttgtgtggctcgaaccacgcgccggtttcctgcatttggccgctgcaaggccatcatgctcagggcgcgcgcatgcgggcgcaactggaggcgtcgcgaccgctgaagaaacggctctggcaggttgtcatcgccgcgaaaatccgcatgcaggggtatgtgctgacggcaaatggtgccgaaggcggcggcttcgaccttctggcgcgcaaggtgcgctcgggcgatcccgacaatctggaagcgcaggcggcgcggcgctattggaagacgctgttcggcaaggagtttcaacgcgacaccgatgccgatggcgcgaatgcgctgcttaactatggctatactgtcctgcgggccacgctctcgcgtgcgatctgcgcggccggactgcatccgacgccgggtatattccactccaatcgcgccaatgcctttgcgctggctgacgacctcatggagccgtaccggccgctggtggaccagatcgtgctcaacctgatgaagcagggggtcgaaaccgtgaccccggaagccaagcgcgcgctgacatcgctgacgacgttcgacctggagacgccggtcgggctttcgccactttcggtgcaggttcagcgcttcgtgcattctttggccctgagcttcgaaacccggcaggccgtgctggaactgcctggcatgccgccgccgcttgcccttctgggacttggggcaccggcgccatgacggtgccagccaaagcaaatatggggcccgctcatctcagtggatacaggctgatgtggattttagtgacgttcgatctgccggtggaaacgaagaagcagcgcaaggcggccacgaaattccgtcagtatctgctcgacatgggcttcgaaatgagccagctttccaactatctgcgtttctgcagtggcaaggagcagttcgagacttacctgcgcaagatcgaatcacacctgccggaatggggtgacatctatgtctttcagttcacggacaggcagtatgaaaatatcgtccgcttttccgatcaggcccgccgaaggcaaaagaaaaaccctgatcagcttgccctgttctagggccatgaggcgctttttctgcgccgtgaccgtcgattttccctttgaaatcaggaagatcgacggccaccgagcttagcagttcagaaaacgcggtccagccgcaactcgtcggggtgttcgtactcgggccgcttgagcttagcagttcagaaaacgcggtccagccgcaacagggcacgctgttcttcgatgtcgcgcgcaagcttagcagttcagaaaacgcggtccagccgcaacaggaaagggtgctcgacgcattcacccgccagcttagcagttcagaaaacgcggtccagccgcaactgtacgggctcgtcaccaatcgtttcagcaagcttagcagttcagaaaacgcggtccagccgcaaccgctctgcgtaccgagcgccatgagggtccagcttagcagttcagaaaacgcggtccagccgcaacagcacaagaagcatgccgcctttgtccagtagcttagcagttcagaaaacgcggtccagccgcaacgatgacagtgggcgatgccattcaggctgtagcttagcagttcagaaaacgcggtccagccgcaactcggcggcagagctttgcgtgaaaccgggcagcttagcagttcagaaaacgcggtccagccgcaaccggagaggtatgatgctgggaaggcttgcgagcttagcagttcagaaaacgcggtccagccgcaacaccggcgatatgcttgacgccgctggcggcagcttagcagttcagaaaacgcggtccagccgcaaccattgttcgcatcacaggctacggcccgccgcgagctgccactttctgctggcatgcgtgcaggcacttggctctgcggcgtatgggggttaggacgtccgggtaaaaggacgcgaaagatgttcagcctcgaaaacgtcgagaccttcagccaggagatcagaaaaagccgcttccatgcggtggccgggcctgtcgcgagcgaacaggccgcgcgagaattcatcgccgcgcattcggattccggcgcgacccacaattgctgggcgtggcgcatgggccagaactatcgcttcaacgacgacggcgagcccggcggcaccgcaggcaagccgatcctgcaggcaatcgacgggcagtcgctggatggcgtggtggttctggtcacgcgctggttcgggggcatattactgggcagtggcgggctcatgcgtgcctatggcggcactgccgcctcctgtttgcgcgcggcggcgaaagtggagctcgtggccaccgtcgatgtggccatagggtgcggcttcagcgatcttgcgctggtcaaggcacggctttcggcgcgcgccggcgtgcacatcgcaggcgaaaccttcggcgcggaaggggcagagcttgtggtgacgctcccggagagggaattgcaggagaccatccgcatggtcacggacataaccagcgggcgtgccgcgatcacacccccggattaaggttgccgcaccgttgccttgccgcttcatacgacggtacggggcgcatcaacgcgcctacacgcttgcactgcggtgcgacagaaattcgccgattcgctccagcgcgcgcaggatgttttcttcggaattggcgtaggaaagccggatatagccttcgccgagcatgccgaagtccggcccgccgatgagcgctacgccggcttcctccagaagcgcgcttgcaagctgcttcgatttccagcccgtggcggcgatgttggggaacgcatagaaagcgcccttcggcgtgatacaggaaatgccgggcagggcgttcagcccttcgaccaccaccttgcggcgccggtcgaaggcccgcagcatcttttcgacctcgtcctgtggcccatcgatggctgcgatgcctgcccattggctcggcgcgttgacgcaggaccagcagttcaccgccagcttgcggaccttgtcataaaggtggccgctttctacggagttcggccagatcgaccagcccatgcgccagccggtcatcgcccaggtcttggaccagccgttgagcacgatcaggcggtcgcggatttcaggaaatcgcagcagcgagcaatgctgctcgccatcataggtcatgacgtcatagatctcgtccgaaaggattgcgacatgtggatgcgcctccagccccttcaccagtttttcgatttcggcgcgcggcgtgacgccgccggtcgggttggccggcgagttgaggatcagaagccgcgttctgggcgtgatcagcgccagcgtttcctcggccgggaaggcgaagccgttggcctcgcgcatcggcacgggaacaggggtcgcgccggtgaactcgatcatcgagcgatagatgggaaagcctggatcggagtagaggatttccgcgcccggttcaccgaacatcaggatcgcggcgaacatggtcggcttgccgccgggcatgatcatcacgctctcgggcgatatttccacaccggtggtggccagcgtgcgacgcgccaccgcctcgcgcgtggccagcaggccattggcgggcgtgtagccgtggtggccgtcgcgcaatgcctttatcgcggcctcgacgatgtgcggcggtgtgctgaaatccggctggccgatgccgagattgacgatgtcgcggccttgatgggcgagttgcgtggcgcgtgcgagcacggcaaaggcgttctcctcgccgaggcggtcgaaagcggcaatcgtttggagcatggttcgcgcctgtctggttctttcgtgcagaatgcgtttttgtgaggctttcacgcaaggaaagtcaatcttgaggacacaacggatgacgaaggatctggcaaactggcagccgcggccgcgcccgcggcgcgaagtcatggaagggcgctatgtgcggatcgagccgctcgacccttccaggcatggcgacgggctgtttgctgcttcgtcggtggcggatgccgatggtcgcttccgctggctgccggactatccgccgcaaagccgcgcggcgttccagccctggctcgacaaagcggccgccagcgacgatccgctgttcttcacggtcatcgacaaggcgagcggcaagatcgccggacggcagaccttgatgcgcatcgatgctggcaatggcgtcatagagatcggcaatatctattggggaccgctcatctcgcgcaggcccgccgccacggaagcgcaattcctgttcatgcaatatgccttcgatacgctcggctatcgccgctatgagtggaagtgcaacaatgccaatctgccctcgaagcgggcggctgagcgtttcggcttcaaattcgaggggattttccgccagcatctggtcgtgaagggcgaaaatcgcgatacggcatggtattcggtgatcgacggtgagtggcctgcgctgaaacgcgcctatgacaactggctcgacccgactaatttcgatgccgatggcggccagaaaaaacggctggaagattttcgcgccgaagccggcgcgtagcggagggccggtcgctcggccctgcaacggaatgggaataacgatggattcgaacaaccgcagcaatgcaatcgccgcggcggtgattctggtgggctttgggctttttgcctatttcatgcccaccatcatgcttgacatcggcagcgtctcccccattgcggccggtgccgtggcggtgctgttcgtcgtggccttcttcgtggttttctggttgcgtgcccgcagccagaagaagcgctcgcgctgagatcgactcagaaatcagcccgaccccgaatacgcatccgccgcgcgcggcagtgtcagcgtcgtgcgcaagccgccgccggcacggttttccagaaccacgtcgccgccgaagcttcgggcgatgttgcgggcaatggtcaggccaaggccgaagccgcccgtctgccggttgcgcgacccctccacgcgggtgaagggacggaacaccttttccatgtgatcttgcggtatgccggggccatcatcatcgatcgtcagcacgatgcggtcgtcggtgtgcgaaaggcccaatcgtgccgcgccgccatatttcacggcgttttcgatcagattggtgatgcagcggcgcaagggtacggcgcggccgagacagaccagtccacgcaggggcgccgtcgtttcgtcgaaagagacatgcggattgccgtcggtaacggaatccaccagcgaccagaagtcgatccgctccagatcgtcatggcccccgtcatgagtggcgaagtccagaaccgatgaggaaattgactcgatgtcggcaaggttctgcatcagcgccgtcttcagcggcgatttgcgcagaagctccagccgcaggcggatgcgtgtcagtggcgtgcgcaggtcgtgggcgagcgcggccgccagcagttcgcgatcctcgacatattcgcgcagccgcgcctgcatggtgttgaccgcgcgcgcagcggatttgtattcgctgctgccatgttctggcaggggcggacttttcaggtcctcgccgatgcggtgcacagcgctttcgagtgctctgtaaggcgcagtcaaacgccgcagcagccagatcgacaggagcaccaccgccgccgccgcggaggcgaacaggggcaggctctgcgaggtcaggatcgggctcagcggcgttgagggcatgacgaagttgagccactggccatcattgaactcgatcgacgcgatcagcgtgtcgcttttcgtgaaatcggccgaaagctccagcaattcgcgttcgatgctgccgatgtcttcttgctgttgcggcgcgcggggccggtgcgggctgctttcggcgtcggtcgcggtttcgcggcgcacgcgcgcgtcctgcacgccatatttggagaggcggccgacgatgatgtcttccatttcagccatctcgtcgtcgctcgggatcgtggtggtgatggcgggcgtgtcggacatcgtcacagcatagggcggcacggagaggccggcggcgacggttttacgctcttccggcgtggccgcatatgtcagacgtaccagcgaaagtgcgcggtcgttgagacgaaacaggtcgaggatgttgttggaggccgcccgctcgcgcgccacgatggagagcgtcgagacctggattgcgagaagccccgcgatgacgatcagcagcacccaggccggcagcgatcgcggcagcagccatttcattcggcgacgacctccggcacgaattggtagccgccgccgcgcacggtgaggatcagtttcggcgcgcgcggatcatcctccatcttgcggcgcaggcggctgaccagaatgtcgacgctccggtcgtagctgtaatcgccattctggttcgaaagctcgatgagctggtcgcggctcagcacgcgctgcgcgcttctggcgagcgtcagcagcagattgaactcggcggtggtgagttcgatgcggacatcttccggattgagcagccggcggcgtccggaatcgagggtccagccggcgaatttgtagatttgctgtaaaggtttgtaggcggcgccggggtccgcgcgccggcgcagcaccgcgcgcgtgcgcgccagaagctcgcgcggatcgaagggcttgggcacatagtcgtccgcgcccatttccagtcccacgatgcggtcgatcgtttccgtcacggcggtgagcatgatgatgggaacggccgagtgcgtcctcagctcgcgacagatatccagcccgcttttaccgggcagcatcacgtccagaatgatgaggtcgatggcggtgcggcgcagcgcggcctgcatttcgtcctcgtcgcgagcggtggaaacgcgaagcccgtgcttctggaaatattcctgaagcagatcacggatttccttgtcgtcatcgacaatcagaatgtgggcttcagtcttcaattcatgggttcctgatcggcggaatcgggatcggcccgcacattggcaaaataaggttcaaccgcggaattgaccagcgaggcgaagcggcggacagcggctgttacaatccggaaacaaaattctgcagagcagaaaaacgccggacatgacggccccgcataaagaccctgctgccagtcaccggttcaggggtcgtcatgcaaaagtcagggaccagttcgatgatcgttctgctcgccgcgcttgcgcttggcgctgctgccacccagtcactggcacgggggacgacgtcgcgggccgatcaatgcaatcagctgcagcagcagttctcccacgcaatcaccgagcacgcggaggcaaaacgggccgccgaagcgaaagcccttcagcgcaaggccgtgaaattctgtgcaggcaaccgccaggcacagggcatacgcgcctatgcgaccgcgctgaagatgctcggagtgcagccgatcgagccatgatcggccacgttaacccaggcccctctagacaaggaaacctatcatgaccctctccaagtccctgatgtcggctcttggcctgaccgttgccctggccttctcggctccgatgttcgccgccacggccaatgccgcaggcacgaccaccacgtacagctcccccaccgagaacaccaatgcgccggtcaagaaaatgaacaagaacgttcatcataagaagaccacgcacaagaagcaccacaagaaggctgctccgaagaaggaagagaacaagtcggccatgtaaatcagtcgggccggcccgccggccggaccgattgttcttcgccctggtcgctgccacggccagggcgatttttgtgatcgccggtcaggccgacaggcttgcggtgagaagcaggaggccgagcaggaagacgagccccgcgccaccgatctcgatcgcggcatggatgcgattgccggcgcggccgtcaccggcaaaggaaacagcccagttcttggcggtgaccgccatgatggccagcgccgagacggtgatggccgtgcccacggccattgcaagaaccgaaagaacgccgccgacccaaaggccgttgaggaaggcgaaggtcagcacgatcagtgcgcccgagcagggtctgaggccaacggcggccactgctgaccaggccgtcttccagttgaaatggtcgcccgatatcatcgccgggtccggtgcgtgcgaatgcccgcatgtggagcagaccgtgcccggaccgtgatggtggtgatgatgatggtcatgcgcgtgatccgaatgatcatggcccgcgtgactatcctcgccggcaggttcatggctgtgatggacgcaagcgtgatcgtgatgatcatgcgcatgcgccgccgaaaggctgtaggccgggttcgcgccgatcatgccgcgaatgcgcggcgccgccttctgccagagcagatatgcaccgaagagcatgaccagcaggtagcttatcacttccaggaaccatgtcgcgttggtcatggtgatggaggtgccgcgcagcaccaggaacagaagtgtcatcatcgcgatggccgttgccgcctgcaggaaggccgagacgaaggaaagcatgatgccgcgccgcagcgccacctcattggccagcatgtaggaggaaatgaccgccttgccatgaccgggaccggcggcatggaaaatgccgtaggcgaaggaaaggcctaccagcagccacatttgcccgccgtcctgccgcatggccttcagcgcgccggtgagcgcgcgatagaatgcctgctgctggatgttgatccacatcatcaggccgccgaacagcccggtcgaggggatggttgcctcgctggtgccgatgccgagcgaactctgcgcatgggccatgctcgaaaactgggcgagcgcgcaacctgctacaagagcggcaaataccagacgtccggtggttctgttcacggggctatccttgggctgggcaggtgagttcgagacgggtggcgaaaatcttgctcatgtccgtgccggtcgggtcgttgaagaaggcgtcggtgagcgttccctggttctgggcaagcgcttcttccggatcgggccggatgacggtgcggctgcaatcggccggcatgccatccacggccatgttgtcgtcctcgatgaaatcgatggccgtgtagaaggtcggatcgtagacgccgaaactgaccttgccggagagcttcagcggctccctgggctcggattcgaacaggatcaggagctggtcctgatcgaaattggccatgagctttggcggcgggttcatcgccgcgtcctttccgtcgaccatcacgatctggaaatagccaaattcggcgagcgactcgtagacggtgtccgatacgtccttcaattccgcgtcgtcgagcttgagatcgccgttcttgtcgaactccatcagcacggtggacgaaaacaggtcatcgaagcgccagacatggcgcaacgactttaccgtgcggtcggggttgaccaacacgtccagcctcgcctcggcgaagacatgggggtggacgctggcgggaccggtcgaaacgagaagcacggcgatggacgcggcaagggtcgtcgttctcgttctgacatgcatggacggtcgcattcctgtcgggattcgtgattaccgaaggttatcagaaacccggcgaaattgggaccatcccggggaatgggtcaggcacgatcctgcggcttgaaccactgcacaagaaagtccac

SEQ ID NO: 3027 - DNA, 23207 bp, synthetic construct
  misc_feature 1..23207: note = Synthetic
  source 1..23207: mol_type = other DNA
cggggcggcgatctgctgttcgaactcacggttgacaagtccgccccagcaataatccggctgggcacacagacgatggaggtggcgccatgaacaatggttggatcggtcagcgcgtgcgggtgacggctatggcgctgcttgcctgggcaggagtgttcgctgagaccgccattttggcacaggggcagggcggtggagcctcctgcaacgggggctaccgggtcacagggcgtcaggccagcggacagagttatgatcccaatcaagcaaatcgcacggttatccagatcaccttgcaagcagagggcaacaacattcgtcccggttgtaccggcgtgcccgtcaccataacgccgcaatcaggtgccgctttcagctttgccaatggcggcgatcagcttggctttgtgcaaatcaactcgaacctcgtctcggaagctaatgtcacgcgcttcgcattgaatggcaattcacgccgcaggctcgtgcgcggcgaggccgttacgattgatctgttcgaattgaacgccgggcagtttcctgccgcaggcgagtatcgcggcacggtgctggttcaggtcggcaacgcgttgccgcaggcagtgctgcttgcgatcacggtccgcccggcgatcaggtttctcgccgagcatggcgcgatgacgcgagatctcagctttggcgaggtgagcgctggttcggtgatccggaccgctgtcttttatcagaccaatgccgcggccaatatcaccatcgtgtcgcaaaatcgtggccgcctcgtacacactgtgcagggtccgggcagtgccattgcatactccctcacatatgacggggtggcggtaaaccttgcaagcggcgcgcagattaaccgtccatttcgcgggcttctggcgcggcgcgaggaaatggtgctggaggttgcccccggtaccaaccgtttcgcaggcgattaccgcgatgtgctcacgctgctctataccgcatattagatcggttgaagcatgactgacagcgcctcgctgccggttggcgctgttaactcgacggtggtgacggcttcgcccggcctcttgcttgtgatcgtgaccgcgcccgggctgacttgcactggtcctgccgaactttgcgctgcacgcaatccggccggccgcgagccatcccgaagcaaaagctggaagcgctcggcgttgcagattgtggtgatggcgaagccaccgggctgccggatcagaggttccaccgcaatgatcgtgcacattaccggaacgttcgcttccaagcgccactgcaacccgttcgcagcgagtccagctgaagccagcccgcccgccagcaggaataactgcgcacccaggaaacggtttggcacgaaataaatcggtcgcggcactcgaggtctcctgaccaaacgccatggcctttcattcgcgaaggtcttcaggctgcagcctatgccctgaccaggacggtgctgagttgccaaacttaagtccatgcaaggaatcgccgccagacgtttgttctgcgctgtgccgccgggaaacaatcggccagcagaaccttcacaggtcgaaacgtcgatgccgtcaggcctacccatgctcaggtgtcggccgattagccgggcgcgcaaccgcgcgctcgaccagtaacgcatcaccacctccccgcccgtgtgcaatcgggaccaacaaatcatcatcggcgttgcggggcctccggtcggtcaggctgcaggggcaacccactaccgctcagagtcgatagccttggcacacagtctggacataggccctgtgcgatgccggcttcatcgccgaacagatctcgaatagtcgccatctacgcaccagacaggggcgtgaacgcgagctgttgcatcagccgggcaacaggctgttttggggagctcggcaattcccagaaatcgtctgcgttaatgccgaccgggctgtgaaactcgcagcaatcggccaagagggaagggggctttgccctgattgagccatttgggcgtcgatagtcggcgtgccgggctctcagtcaggagtgtgtcccatgatcaagtcgatcccgctcaacaagcttgcttgctcaccccgcaatgtccgccgtcacagcgatccggcagcggatgctgagctcaaggccagcatcgcagcccgcggcctgttgcagaacctcatcgtccgacctgccacgaagggcaagttcgaggtcgaggccggcgagcgccgccgccgcgcgatgctcgcgctcgccgacgaaaagttgcttgcccgcgaccatgaggtcacgtgcctcgttctcgaggacagcgtggaagccgcggtcgagaccagcctcgcggagaacttccatcgcctcgccatgaaccctgccgacgaagcccaggcctttgccgcgctcgtgacgggtggtgcgacggtcgaagatgttgcgcgccgcttcggtatgactgtccgcttcgtcgaaggccgcctgcgtctcgcgacgctcgcgccggttgtgttcgaggcgcttgcctccggccagatcacgctcgacatcgccaaggccttcggtgcgacctcggaccgcgagatccagacccgcgtcttcgagcaggtgtcctccggctactatgcgcccaatcccgacagcgtccggcgcatggttctctccggaacagtccggggcagtgatccgcgcgcacggctcgttggccgcgacgcttacattgccgctggcggccggatcgaacgtgaattgttcgatgacaacgacagcgagtcctgggtcgatgtcgcgctgctcgaaagcttggctgccgcgacaatggaagagcaggcgaaggcgctcgctgccgaacagggtctcgcatgggtcaagcccacgctcgatccctttgccagccacgatctggtcgaagggctggtccggcttcccgccgaaccggcgccgctcaccgaagcggaactggcaaggcttgatgcgctcgatgcgtcctatgacgagcatgcggcgatcctcgaagacgaagacagcgccgaggacgccgtggcagcggcagaagctgcgatcgaggcgatcgaacgcgaatgtcaggacattcgtgcgcgcccacccgttatcgcgccggaattgaaggccgaggcaggcatgatcctggttctctcccgcgatggcacgccggttctccagcctgtcttctatggcgagcggcagatggaagccgtcgacaccgacggcggcatcgaagtcattccgggcgaggaaggttcggacaagcgccgggcgacgttgtcgcggcggcttgtcgacgaactcgccatgcagcgccgcgatgtccttgccttgcatgtcgcatccgacccgggggtggcgcttgatatcatggtcttcacgctcgccgatgccgagacccacgactggcggtcgcgggcagcgaccacgctccgcgcgcctgtcccggcaggcccgatcgcgggcttcgaagccaaggatgcaccagcgagcagcgcgctcgccgagcttcggtctggtcttgacgaaagctggcgtggcggtgccgatgcgacctcccgcttcgacctgtaccgtgcactgccggatgatgcccgcgccgcatggctcggctatgtcgtggcccggtcgctcgaggcgagcctcaatatggcgggcgagcgtcagctgcccttccaggatcaccttggcagcctgatcggcatcgacatggcacagtggtggcgtccgacggcggccaattacttcgaccgggtgcaaaagcaggtgatcctcgacgccctgaccgacgtcggcggcctcgagctctcctcgcgctttatctcggtcaagaagggcgacctcgcgatgagtgccgagcgcatctttgccggcacctacattaccgaagtcgaggtccgcgagaaggcgctggcctgggtgcccgaggtcatgcgcttcgctgccgctgcgccggatgctgacgaacccgggatcgacgccactgcaactgaccccgctgtcgataccaacgatccgtccccccgcgagctggccgcctgacctcctcctgacaggcacagccactcgcaacttgtgaagcggtccttcggcttacgccggagggccgcttcccttttgcaaaggagagcagagggggcgcgggatcttgcggcactgaccggcgaacccgtcgccgactgtccggatgctgcaatcaggagaaccatcatggcctatcgcaaggggcaaagcggcagcgtgtcgcccgctgcccgcatcacccaggaaatcatcacccgtctggaagccggcaccaagccatggatcaagccatggcgcggtgtgcccgtttcgcggcccctgcgagcctgcgggatcccgtaccgcggcatgaatgtgttctggctgtggatggtcgccgacatgtgcggctatgcctcgccgttctggatgacctacaaccaggccaaatcgctgggcgcccaggtccgcaagggcgaaaagtcgaccatagcgatcttctacaagagctacaccaaggaggtggaagctcccgataccggcgaaaagaccgacgaagcccgccgggtgctgaaagcctatccggtcttcaatgctgatcaggtcgaaggcctgcccgagcgcttccatccggctgctacgctggaactggtcgagcctgaagggcgtgaggccgaactcgacgccttcttcgctgccatccctgtcaatctgcgccatcagggctgcgaggcgtactatgagccgacggctgaccgcgtcaccatgccgccgacgagcctgttcgacggcttcgatcattactacgccacgctcgcccacgagctgtcgcactggaccggacatgccagccgtttgggccgtgatctcaagaaccgcttcggcacagcggcctatgctgcagaggaactggtcgccgagctctcaagcgccatgctgggcgcagagctagggctgccggtcacgcatctcgacaaccatgcgagctacatcgagcactggctacggctcctgaaggttgacgaccgcgccattctgaccgctgccgccaaggccgaagaagcctcgagcctgctgctgaagctcggcggaagggtcacgcccgaacagtctgacgatgcgtcggacgacgctgcgctcgcggcctgagggaggatgccatgggccgatcagtcagctatcccagcggcgcaatcgtcgcctttacggtgctcgaggtcgaaaccgagggcgactgtgagttcgaatacgagtggctgcgcgaagacctgtgcgagcgggccagccgagccttcccgtcgctgatcccgcatgacgggtggcgtggcagagaggaccggatcctcatgcgcaatgcctatgcggatttcggtatatcggtctacggcgccctggtggccgtctggatcgtcgagcgtgatgacggcgcctattgggacgccgattggcgcacggcccgttcaccgcgggcacggcgctggctgtcccagatcgcatcccgcttcgatgccatgttcggcgactacgattgcctcgggcacatgtcgaacggggagggcgtttacaccaagcgcgcggcttgagccgagctggggcgtagtactgtatgaggcatcggccttgcccctgccagtggtcagttccgaccgctcatgaactgtcgccatgcgagagaggccctgggccagccgccagtcttgcgcaacccggcttggtcgggcccgtgttggccttcgcccttttgggctcaaggcctgcccgcgccagcccgccaagccgggttccccctgaccggtgcgcaatcctgcctgaatgctggccctgacgggctctcgctggcgcagccatgagcggatgcgtcggcctcacgtcagtcaggaggataattccatgcatacgtcattcgccgatcaactcgccgggctcgatcttgccggcttttccatcggtcctgcgcccgtatctaccagcgatttcccggtccgcgatgcggtcgtccaaaccctcgaagcggtgtggtccgatcttttcgccatggtctccggcaccgcgctcgaagccgatgccgaagatctcggctgggccttcgtcaacatcttccaccgctctgcgacccgcaagtccaccgcgctcgaccgggcgaccgacgaggtccgcgcgctggttgcgaccgcagatggatccgaagtccatacccatgacctcgagacccaggtcgagcgggcacaatgcgccgagggcgcaatgctggcgctcgaagagatgcgtgaaattgccgcagccctgtacctcaacgagttcggttcctcctggaaaccggtctcgagctcgcgcttcaaccacagcgccatgctgacgtccgcgctcgtcgaaggtcgcgatttcctgcgtgcccgagcagaggccaagcgccgtgccgccatgcctgaaggaacgcctgtggtgttcgctggcggccgcacccgccatgcgaccgaagccgatgcactgaccttcggcaacaatgtctgggccaccctcgacaaggtccgcaaccgcgtgccggacatggtgctcatccacggcggcgacaccaagggcgtcgaccgtctggcatcgagctgggctgaacgtcgcgggatcccgcaggtcacgttctcgcttgatatgcgcctcggcgcccgtgccggtttcaagcgcaatgagcggatgctctccctcgacccgcgctacgtcatcgcttttcccggcaatggtgtccttgaacgtttggtgatcgaagccaaggcgcggcggatcactgtcgtcgatcgccgcggaccgctcggcacatccccgaaagctcagcccgggtgaggggggtggaatccagctggcctgcaactcctccgcaagaccacagcggctgcgatatgttgcgtttatttcgaataacccctagctggcatatcggcaagccggagagacccatgacattgccagcaagcgccttgccgttcggcaactggctgccatctgccgatgatcggcagatcgccaaccagcttcgccagattctggcggcgcacaaggctggcgaagcgcatctgcaggtgtccgatcctgcgaccaagacatcagtcgatatcaccctgacgccggctatttcggacctgtttcttgaactgctgcgctacatcggcagcggcgacgccgtcaccctgctgccgatccagcagatgctcacgacgcagcaggcggcagatctgctcaatttctcgcgcccatttctcatcaagctgatcgagaagggcgatattcctcacgcgatggtgggacgacatcgtcggctcaaggccgaggacgtgtttgcctacaagtccgcgcgggacatagcccgggcagaagcgctggatgagctcatcgcagatagcgcagacctttattgatcgacttttcgctgaatttgcaacagcccgatactgcgttgcgcctccccgaaggcgcgggagacctgccgcttgccggtgaccatgctgaaactcggcgatcacgcaggctcgatgtgatccgccgcatgcgatggcggcgcgtggggcaagtctaagtaaggcgatcaataggctcagccgcgcttggattgcagtcgggtcccgatgatcgtgtcgttactccggtccatcattttcaccaagtgacagctctggctcgggcgcacggcccataaagtctcaggatgagcatagcaccagacgtgctaccatcagcctcgaagacgcctttccaggcaggccggatacaagaacagccaagaaaagtcgtccacgccgggaggtgggtggggcacatcggccaacgggaacggactggatggcaagcctgctcaaggcatcctgatccacccggcttcaatgcaaacctgtccctgaatcaccccacgtcgagacgcgcaaccccgatccggtccagccgagttgccggtcacgtcatactgcgtgcccggctgcccgcaccacccgaaccggatcggggtttccctacggtgcgcttcgccgcggggcgcttctgctcgggttttgcagccgggatggacccggaatgctcgatcaggagaatacccatgaccaatctcgttatcctcgttggccgcatcgctcgcgaccccgaaacccgcaccacccagggtggaaccagcatcacctcggtctcggtcgtgaccgaccgtcccgcccgcaaggaaggcaagacctacaaggacgagaacggctacaccgccaaggacagcgaattccaccgcatcacctgcttcaacggtctcggcgagaacgtcgccaagtactgcaccaagggccagatggtctcggtcgaagggcgcatccactacacccagtgggaagacgaaagcggcaccaagcgctacggctgcgagatcatcgccgacaaggtcgacttcctcaccaagggccgctcgggcaacaacgaagacgcgcccgacatcgacgaggactgaagggccgaccttcgcgaaaaggccccggtggcagatgccatcggggccttcacttttgctctgcggctatgcggcggcgcggggcatcgaaccccttgctgcgcttacgtgggagcaatgcgcttcagcgtttcctcgatgccgagcgtcattgcggcgcggacgacctgccgcaattgcgctggttcgattctctcggcgccgcactcgatcagcaacttgccgagctcggttgcagcctcttgtcgaagccgtgcttcctcgatgtcgagcttcgcacgctgttcgcgcagtttcctcaacgcgtcgagcgccgagggtttggacctggccatagggacttcctttgtgttggccgttggtcccctccgcccatagtcatacgacccggcaagcgtttaggaaaatggtttctgtggtgcgggcggtgcgcttttcgccaagcgttggaggggtctctctcgcaggacaatcaagtctgatgcgggctttgggtctgcgtcaaggacgacagggccccaccattttcgtcgggcaagcccgacaaaaatcgttgcccccatcgccgcttcgcggccgctgccgcggtccctgacccagcccgtcacccacatcctcgcagctcctgatgcgacgcatcaaacatcaggaggaacgatcatgtacgcttcacacaataccgccgataccggttaccaggcagatcaggcagccttcgttgccgcactcgatcaggcccatgcccgatcctatcacagctacttcacgcagtacgtcctgaccgatgatgaggcagggtacatcgcggtcgatgaaggcgattacggggcattgccgaaggccttgcaggaccgtgtcatcgacacggtgccgggcaagctcagcgatgaattctgacccggaggttcaagggaggaagtccctcggggcttcctcccttggatttttgctcggatcccgcagattcgcgtcaaggtagaatccgccactgattgaaggctgagccggcgtgcccgacattgggttgcacgatctgcggtatggccttgccgcccgatcggaaactctgcccgtgatcggcaagctttagggccatgccaagctgcaatcgacttcgcgctccgccaacctcgatgacgccccgctgctcgatgctcccgattggatccgcaagcttattgatgaggctatgggcgataaaagcgttggatggtagaatggagtatggttcagattatccgctctgcagctgtcctgcactgcccaatggcacgcttcacaagcaagttttcggaacggccagaaaccaaaaaaggccgccccgcaggacgacccttatctggtgcagtctgactacttgctagcgatcaggccgcgatctcatgaatgaaggttggttagtccaaaacccttttccgtgcaagcacggtctcgaaaccgctgaaattcagagctagcggcttgaggcttgaggcttgaggcttgttctagagccccatatcgccaagggaagacggcatggcctacagactcgggattgacctcgggaccaactcgctagggtggtgcgcgttagatttgggggcggacggcgcgcctgaaggactgcgcgatggcggggttcggatctattccgacggacgcgaggccaagaccggagcctcgcttgcggtggatcgtcgcaatgctcgtgcaatgcgccgccgccgcgatcgctatctgagacgccgggcggtgctgctggcggaactcatccgcttcggcttgatgcctgcggacgaagcccaccgtaaggcgctcgaaaggcttgacccataccacattcgcgcggtggcgctcgaccaggcggtgccggtgcatttcttgggtcgcgcggtctttcatctcaatcagcggcgtggtttcaaatccaaccgcaaggcaaatcccgccgccgatgatgccgagcttggtgtggtagccaccggtagcgaaaacctagatgccgcaatgcaggctgcaggcgcgcgcacctatggcgagtacctcatgcgtcgccatgctctggacccaggcgattactcggccagcgcccgccgtacccggatccgccgccgcgatggggacgaggattacgccttcttccccgcgcgtcgccatctggaggaggaattcgccgcgctctggcaggcacaggagccgcaccacccggatatcctgacaccggaagctcgtgcccggctgcatgccatcatcttctaccagcgtccgctcaaaagccccccggtaggccgctgcgcctacaccgatgagccgcgcatggcaaaggcgcacccgctgttccagcgcctgcgattggtcaaggcgatcaacgagcttacgatcgaagaagtgggcgaggctccgcgaccgctgacacatgcgcagcgcgaacagattctccgcgcttggcgctcacccaccgagaccaagcgcagcatgacttggggggcactgcgcaaagcggcagggttgccgcgcagcagccggttcaggggtgaggatcggcgtggcaaggggctgtcaggcgacgaggtcgaggccgagctggtcaggctctatggccctggatggcgcgatctttcgccggacgaacaatggcgcatcattgagcggctgaacgaagaagaggatgaagccgcgctaatcgatttcctgcaagctgagatcggcctcgatgaaaccagcgcccacgccgtcacccgcgcgcgcctgcctgagggccatgctcgcatcgggcgcaacgccgctgctcgcatcctgactgagctggaagccgatgtaattcccgaaaccgaagccgtcgctcgctgcggttggcgccacagcgatgaccgtaccggggaagtatgggcctcactgccctactatggtcagatcctcgatcgtcagatcccgccggggtctcaagatccggaagacaggccggaggaatgctatggccgaatcgccaatcccaccgtccacatcggtttcggccagctgcgccgggtcatcaatgcggtcattgcccgtcatggcctaccgcacgacatcgtcataagactctctcgtgatttgaagctgtcagaagaccagcaagccgagatcaagcgcgcgacacgacggaacaccgatgcagcaatccggcgcggcgcgatgcttgagcagctcggcatcgccaacacaggccgcaaccgggtgatcctgcaattatgggaggagctgcaccccgatccccaggcgcgggtatgcatctacaccgggcaaccgatcagtatcgagatgctgttttcgggcgatacctgcatcgatcacatcctgcccatccgggttacgctcgacgacagcaatggcaataagctggtgtgtatggctgccgccaatcgctgcaagggcaatcgagcgccttttgaggcgttcggcaccagtgcggattgggatgcgatccttgcccgcgcgcagaacctgcccccgaacaagcgctggcgcttcgcccctgacgcgctgacccgctttggtgaagagagcgacttcattgcccgccagctcacagacacgcagtatctctcacgcttggcaaaggaatatctttgcgcgctctaccccgccgaccgcggcgaaggcagccagaaggtacgcgtgatcccggggcgacattccgaaatgctgcgccgcacctgggggctcaattccctgcttcacgatcacaattacgcccagaccgccaagcccaagaaccggctggatcaccgccaccacctaatcgacgccttagtcaccgcgctcaccgatcagcggctgatgcagaagattgccaccgtcgctgggcggaatgatgagctgggcatggcgcatatcttcaaggatatgcccgaaccttggccaggctttcgcgaggagctgaaggcactgctcgatcgcaccgtggtaagccacaagcccgatcacgggagcatcgccagcccagccgaccgcgccaagggtcaggatcgtaccgccgggcggctgcacaacgataccgcctatggcctgaccggcgagaccgacgacaagggcaatgacatcgtggtgcaccgcgtgcctttgctctcgctcgacaatgatcagaagatcgccgctgtgcgcgacgatcatctgcgcggagaactgctgcaggcgcttgccaggaagagcggcaaagaccgtgaggcggctctccgccggttcgcgacggaacacccggtttatcgtgacatccaccatgtgcgtgtgaccgagccgcttaacgcgttgaaaattcacgacaagcagggacgagtctacaaaggctacaagggcgacgctaactatcggtacgatgtctggcggatgccgaatggcaagtggaccggcaacgtcgtgaccatgttcgaggcgcatcaagcagcggcgggcgaggggcaggaatggcgtccacacccggctgcaaagcgggtcatccgcctgcaccggaacgatatggtggctctcgagcatcctgatgacgggtatggaatttaccgtgtcgtcaagatgcgggtggacggtcagcttacactcgcgaagcataatgaggcaggcgatctgaaaaggcgacatggtgccagtaacgatgaagaccccttcaaatacctcgcgaaggcagcgggcacccttcaaaaaatgaagatgcgccagatccgcatcgacgagacaggccgcgtttgggaccccggcccacgccaataacaccctattgatcatagcgagttaaaccagcgcgctcagatgctgacccatcaagctctggaaatgctcaagcaccgcacgggcttagccaatgcccgataagtcgggctcatggggcattggtattacactgcattcccgacccagaccctgctggaggggggcgcaaaagacacgcgagggcatcgtcgatatcacaagcgagggcaggcaccgctctttcgtccgatgatatctcgtcgtctcgtgtggtcacgaggaactgggccgcgtccggccagaagatatcgacgcggtgatggtcaagggtcttggcacgacgctcaacgctcatccgcttgccgcgctggcgccgccgcgctcgaactcccgacgccgcaacttccggtgcagcttgcgagccgttaccgtgccttaggttgattgcggcagcgcgcacccctttcgcctttcgggatatcggttgatgtggactgtctgagtgtttgacccgccggttcataccaaacctgaccgggaagccgtgacagcctttcccgaggaccttttcgactaagttttcgggatgagcgagttctcggcttatggccggtcatatgctggcaagggctctgataaggccgcttaccatagcattcatgagatcgcagcccaaccgcagcgcgaactgcccttctgcgaaaagcgctgcactcatagcacgcatgatcccctgcgccaagcggggctgcagtcagccgtcagcgcaggctagagcagtcatcgcactcatgagatcgctgcccaaccgcagctgtcggccctgcgactctctaacgcgacaagcatagcacgcttgcaatcgcggcccaaccccagccaggccgccaacacgcgatagagcgaaaccgccagggtcatccagtcgcattgcgagcgcgccagtcaaccgacaccgccggatgagccatggctcactctgccatacgaaaatggctatctgctgccagcgcaacacagctcgatacatatacctgctcattgcggtaaaggacgacgggagtggtgaaaagccagaccaaccaaccgggctcagatgatggcaagtcgagcgggtatcgctcgatcctgattttccgcttgggcgagcgggccatgttcatgtttgctttcaccaagagcaagaaggggaaccggaatgcgacagaattgaaagtctatcggaaggcggccagcatcatgctggaactgggcgatggtgagattcaaacggaagttaaagcaggccaattggtcgaggtgaaagacgatgagcaaggctcaggcaaagacctacaagagcgaggcgatggctgccgtccatgagatgatggaaggcctccacgacgcgcgcagtatcgacaagtgcaccatccgcatgttccatgaagcgtgccttgcgcctgcgtccgttctgtcgccgcacgcgataaggccatccgcgccccgttctgcaggctgacggctcccgcaggctgtggaaagcgtataatcaacacatagagaggtgctgctgactggaaaatccaatccaccccttaggatgggcaagtgcggtgcaaaaatggcgattgcagcgtccataagggctctgaccacgcctgtccttcaagcgccggataggctttcaaatccttgtgaaaccagggcctttgccatcagaaatcaggcgggaaagtggtcgatcacagcggtcgaaataggggacaacttcgcgcacaccctacgcgacgggtcgcagcacctattggtttaaaaagtcaatacaaaacagaggtgtaatgagcgcgcgctgagaatggcagcttcccaatcagatttggacaggcctgaaactgccaatcaattctgattgaacgcggggcggaatggcggaattccgccgttctcgatgttcttgacatgttctcatttctgaattagacctccgtctgcctttcgcagtgcgttccgggctcctcatcacaaggagtccgtgcatgacacggccaaaatctctccaagtccatgtctcgtttgcgcttgccgagcgggttcgcagtgcggccgagcgccgcgatatcagcgtgagcgaatggatccgctcgttgttgcagcaagcctgcgacgaggacgatctgaacgtcggcctcagcacctggttgaagcgtctgaaccaccatgcggtcttcacgatggtgggcgtggacgccctgctttccggtcacgtcgatcacggtctgcgtggccgcgtacatgaggcctatgtccgcagatgcaagcaacttggtctcgcgcaaagcaccgacgcgggaggtttcgatgaagcgtaacctcgccaatttcacgcgcggaagccagctcctcgggcatttcggtttcatgttcgcagcaggcctcaagggcccgctgaccatatccgccgtggtgatctcctggacctcatggtggacgctttcatcggcgctcaccgactatgaaatctacctcatctggatgcgcctctatgctgcggcctacggcttcatggagttcaatcccgacaagctggtgaccgtcaaaacagtctttggcggcacgatggaattgccgatcggcatgctcggttccttcccgccggttgtccgggcgtgggaccacatgaccgacctcgtcgccagcgccgcgtggcgttcggccctgtttctcgtccccgcgttcttgctgttctacggcttcgccgcccgctttggcggcaaggccaaggcacgcatattcgttcgcggcgcgcagcttgttgagcttcgtgaactgagccggcgccttcgcaggcataaccgcaaaaagcgcaattgcgaacgcatggccgcgatgggttggaagtggcggctatgcttcccctgggagctcgccaaggcctttccctatcgcccctcccacatcgccggggtggtctatccatggcggcttgaacagagccacaccatgctggtcggcaccaccggtaccggcaagtcggtcgccatttcggccatgatcgaagaggcccgcgccaagggccagaactgcgtcgtgttcgatctgaccggggccttcatcgagcagttctacgatcccaagcgggacatcattctgaacccgctcgatgcccgctgcccgcagtggagcctgttcgacgagtgccgcaccgaagctgatttctggaccgccgccgatgcgcttgtcccgcatgacgggggcggggacgcgcagttctgggtgctcggtgcgcgcgcgctgttcgtgaagttctgcgtcgaactcgtggcccagggcaggggatcgaatgccgcgctcgcgcaggaactgatgtctgcagacctctccaatgtccacgaactggtcaaggatacgatggccggtccgctcaccgcacccgaagctgcgcgaatggcagaatcggtgcgcgcggtgttcaatgtcaacgccaaggcgcttgaactcctgccgaccgaaggtccgcggttctcggtgcgcgaatggatcgaggagtcagccgcgcaccctgcgggacgaggctcgatcctgttcatctcctcccgctatgtcgacatgagcgtgacctcgcagctcctcaccttgtggctcgatacggccatgaacacgctcatgacttccgcgcgcaccaacgaggtcacgtgctggttcttcatcgacgagcttggcgcgctgcatcgtcttcccgcgctcgaaaacggactgcagaccgcccgcaatttcggcggggcgatcgttctgggcctccatgcctttgccaagctcaaggaggtctatggcgagaacatggccgcgaccctcgcgtcgcttgcccgcaccaagctcatcctctcggttgccgaccgcgagaccgcaacctggtgcagcgacgtcatcggtcacgaggaggtcatcgatactgatgagggatactcgatgggctacaacaatgcccgcgacgcggtcagcctaacccgccgcacgacgatcaagccgctgcgaatgcccgatgagctgatgaacatgaagagccttgagggctatatcaagttcccggaaggcttccccgcagcgcccatcaggcttcgtccggtgaaccgcccgaaggtggccgatgcctttatcgtgcgggggcccaatcggcttcctccgcctgcgcagctcgacgcttccgagcccccggggccgaagccgggagggcaatccggggagagggccagcacgcaggcttcgaccggcgatgatggtggcgggaagtcgaccttgcgccatcattcggctcccaggcagggcgaactggccctcgatcaggcacctggcgaggcggcaaagtccgatcgtgcaaaggcgccggagacagcgcgtctgctgggttcagatgcggcgggcagacttgatgctggcggctccgggcccgtcggcgcggaaggcgccaggggtgaccatggacctttagcgacggatcggcatgggcatcctgctgccccatccgagggcctgggcaaccttcgcggcagtgaccacccggcgcgcagatcggggtcgaagtcgggcgccaggtcgagcgatcctgcgggcaggcagaacccgtcagcaggtcggcagaagacgatggacagtgccgagaaaggcggcgagtccaaagccaactctggcggcgcaaaggtcactgagccaccctcccggaaaggcggtgcgccggcgagcccgccgggatcttcggatgcccggaggctgctgaacgagggcggggtccctgagcgaaacgagcctccgagggacgagcgcgacctcggcgatctggagatctgacgatggcagttcgtgacgccacccgaagggcagatgcgtgctgtcggtagccaatgtccgaaccgcgggcggtgctgccagctactttgccgccgacaattactacacccggaccgatgccgatcggtccggagcgtggttcggcaagggcgccgaagaattgggcctcacgggcgcggtcgatgccaagaccttcgaagctgtcctcaaggggtttttgccagacggaagccgcgttggcagcgaccaccgggcccatcgcgcaggcaccgatctcaccttctccatgcccaagagctggtcggtgcttgcgctcgtcggcggcgacaagcggatcctcgatgcctatggcgcagcggtccgcgagacgctgacctgggccgagaagaaccttgccgaaacccgcatggaggtgcgcgggagtgagcgggtggttcggaccgggaacctcgtagccgcggtcttccagcacgacaccaaccgcaaccaggagcccaatgcgcatttccatgccgtcatcgccaacgtcacccaggggccggatggcaagtggcgggcgctgcgcaacgacaatctctggaagcacaatacgctcctcaacgccatgaccatggcgaacttccggctcagtgtggagaagctcggctacgaggtcggcgagttcggcaagcacggcaatttcgaggcggtgggcgttcccaaggaggtgcgcgatgcgttcagctcgcggcgcgccgaggttctcgcagccgccgcacagatgaactcccagggaccgaaggcactcgacgccgcgacgctgatgacccgggcgaaaaaggaagccatcgaggaccgcgctgcgctggcccagcagtggaaggacaccgcagaaaagctcgggttcgatccggcgatggtcatcgcgcgggcgaacgcacgcagcgccaaggacctcggcaaggttcccggcttgggatcatcggtccgcaaggtcgccctgcaaggaaaacagatcgtccacgatttcgccgagcgtcttggcatcgcgaaaggcgaccccctcattccctcgcggctcggcaatcgcagcccggaggaagttgcagcgatccatggtgtcgcttcggccatccgccatcttggcgagcgcgaggcggccttcaccaaaaccgacatctatggcaccgcgctcggcttcggcctgccaacagcatttgccgatatcgagcgccgggtcgaccagctcatccgtcagggttaccttcaggcagggaagggcgccgaccgcgacatgctcaccacccgtgatgcgatcagcctcgaacagcggatccttgcaggcgtcgaggctgggcgcggcgctgcgcccgccatcgttcctgccttcgatgccggaaggcggctgcaagccgtctcgcagaacagatatggcttccgcctgaacaaggggcaggagggggcgggccgcctgctcttgagctcgcacaatcgcattgtcgcgatccagggtgtggctggcgcaggcaaaagcacggttctgaagcccgtcgccgacatcctgcgcaaggaaggcaagaccgtgctgggtctcgcggtgcagaatacgctggtgcagatgctggagcgcgacacgggcatcccgtcgatgaccgtggcccgcttcctggggcagcatcaggacattcttatgggcgagggcggtgcgcgcctcgaggccgcgcgcacggcgatgagtgggacagtcgtggtgctcgatgaggcatccatggtcggcaatgccgacatggaaaagctggtgcgtctcgccaatctcctgcagctcgatcgcttcgccagcatcggtgacaccaagcagctcggtgccgtcgatgccggcaagcccttcgatgtcatgcagcaggccggtatcgaagccgcgctgatggacaccaatcttcgcgcccgcgatgaagcgctgcgcagcgcgcagcacgcggcccaaggcggccacatcggcgaagcgctgacccatcttggtgagaatgtcattgccgcgggcgagaacgccgccgtcgatgccgccgccgcctggctttcgctcgcccccgctgagcgcgaggtgaccgcaatctatgcgtcgggccgggccttgcgcggtgaagtcaacgaggcggtccagacaggtcttaaggccaatggcgagctgggcccgggcgcgatgaagatcgaagtgctttcgcgcatcaatctgacgcgcgaggaactgcgctatgcgcgcagctatactcccggcaccgtgctcgaggttgaccgccggcaaagggggcaggggctccagaaggggagctatacggtggtggcaaccgatctctcccgcgagcgtgtgaccctgcagaacgagcgcgggcggcaattcgagtttcgtcccggccagctccgtccgcagggcgagcaggatccgttaaagctctacgaacgccgcgagatcgagatccatgatggcgaccgggtccgctggaccgccaccgatcacaggcgcggcctgctcaatgccgaccaggcgcggatcactgcgatcgacgccaagggtgtggcgctggtaacctcagtcggtgtgccgcaccgccttgcgcccgacgatccgatgctgaagcgcctcgatttggcctatgcgctcaatgcgcacatggcgcagggtctgacgtccgatcgcggcatcgctgtcatggacagccgcgagaagaaccttgccaaccagcagaccttcctcgtgaccatcacccggctgcgcgacggccttaagctccttgtcgacagccccggcaagctcgaggctgcggtcgagaacaatcccggcatgaagcgctctgcgcttgagaccgtgaacctcttgcgcgaggcggctgctatcggtgaggcgaagggcagggcgcccgcgcccgagatcaagccgcccgaactcgagcgttcggtgagcaagcggctcgattttggtctgtagggttcgcctgcattgtcccacccggattcagcggcaggccggacccttccagtagcggtcccagcgcagcaccgtgcgggtgcggatcattgcgcaggagaggtccgcaccgcttggcaggcggcaccaggccgccgtgcgattgcctcccgccgacccttcagagcgacatgagagcttcgggccattcaccagaacatggcctgtgggcgctgttccgcgtgcgccgccaagaagctgtaccaaggcatcacgtgcttcgatagcagagctgcgtgggcagggctgattggttcggcaagtgccatcaatctcgcgcgcggcaatacctgcgatcctaaggcgaggaccttcttcgcaccaaacaggtccatcgccgtcccagacatgggtcggcgtgcaagtgaacggttgcccggcagcaaccactgaggcggcaaaaagagtaagcatttcaatccagtcttagtgcactacgcggcaaaatcaaagcatgagggcgacaattctgagcgctcgcctatcgaaacaggggaaacttgaagacaggactgtcactgatccctcatgcgcgtttccactgcggctcggtcgcgccctgtttgacgctcaccatgttatccattttcagggcagagatgatttggcgtaactctgcagagcaaggattggtggcaatttcagttgtggcaagaccatgtggccgacggtcgatcagggcctgcttcgcccttacgagcgcggcaggctaagatcgacgatcgcgaccgaaaacaagtgcgcgctgctcaatgcccgtccctgtccgaagcgctcagtcctcgggacggttaaccttctccgccagacagccgccaaaggttcggggagtcgcagggcataagctgctgaaggcaaggcacccgaacctgaggacgcgatgtcagacggttcgacatgggtctgtgatcatgatcgctcaagcattgcagggcgccattgaggccacagcaatgaggacaacactacaatcaagagcggcagatcagtcaaataaaattgacatgcaaggacttcctttcggttctcctcgtagatgtcaaattgtcgtacccgacgaaagcgtgagcgcttcaatcacggtagtctggactgataccgagggtaacgcatcatgttcagcgatcaccaggctcaatgaccaatagtccaaagccctcatagatcactgggttgcgcgacgcgagcgtcattccatgacccgacgcaattgccgcaaggtatgcatctgtcactggcggtgctttgcccttgcgttttgctgcaattgcgatttccgcataggcaaaagcagcgactgtatcgaaggtcagcatgcggcccgaaaacgcgtcaagtatccgctccaacgctttggcgagctggtcttttgccttgccgtcgggaagcgatccaattccataaaggatctctcccacagtgacgctggcaatatacaggctctcagcccgctgcgaatcaagccagttgagcacgcgagcatcaggtgccggcttcatcgcctctgcaacgatgctcgtgtcgagcaggatcatccgaaccacaccggcggcgcaggatctgccaatcgcgccgcttcgagcgcatcaacatccgcatttgaaagaccactctgccgactgagctcggaaagagcactccccacaagcaggcgccctggcgggcacaagatctcttcgagaatagcgcacgcctcttcattcggctttcggccgtttgacagtgcgcggtgcgcgagcgcccggcgcgctgcaggagacagctggcttatcgtgattgagttcatcggcaccttcacaaagggatccctgctttgcgctgctagcctgatgacccggccctcgcaacccgcttcctgtcagtctgtttgtccgtacgagtcagtgccctcgatcacggcaaaaatattcggttcaccgcactgcctatgtccccgcgcggtatatgctgttgcctattgcatcgctcatcttcaggctgctcatcgcggcagacaaggccgcattcgcacgccactccttctgttcacgcaatgttgccgtcttatgccatttgatcttggatacccgccggctccctcacatttcccgcgaccgggctgggacgggaccagtcttcaagacgtggcacggcgcttccccacggacgatgcctgttttgatcatgtcttgaaagcgcggttcgggcacgagttcg

SEQ ID NO: 3028 - DNA, 22541 bp, synthetic construct
  misc_feature 1..22541: note = Synthetic
  source 1..22541: mol_type = other DNA
tcggtaacgatgaggggtttttgcgttaagggactatcatgacaaacatattcaccccaaaatgccaaaactgcgtcgccctatgctgcaccgctctggcattcgaacgcggaaagcagttcgctcacgataagagtgcgggtgtgccttgccattatctggctcaggacttcagctgctccattcatgccaagcgcgaacagctcggctatgacgggtgcgaagctttcgattgtctgggggccgggcagcgcgccagtgcaatctttgccggccagaactggcggcgcgatccggccattgcacgtcggctttacgccagcttctcaaatctgatgcgccttcaggaaatgcgccaggcgttcgaaaccgcttctgctctcgatatcgacgccgcattgcatgacgaacgcggcagcctgctcgaggcgcttgcagagctggccgagagcgggcgcgaggatgtgggcgatgcggcaagccatgttcttgccgaatgcaaggcgttcctgcgtcggctggcgccgcatcttacgcagtgatcaccgcgcgcccggtccgcgcctgacgccaatgggtcgagcttgcaattgtcatcatccgatgacttgaccttgccgatgcaacagccatgctacgcgcaacgatttttgtgcgatgatatcaatgcgtttgctggtcctgtttgccctgctttttctagtcgttccgattcaggcgcaggaggccgctccggcggctacgcccgccgatgagctcattcgcattcttgaggatgacactgcgcgtcaggcgctgatcgaaaccctgcgtcaggccgtgccggaagaggcagtagaggccgggcccgtggtgccgcccgatctcagtattgcgcggcaactggcggagtatacccgcagcgtggccgagggtgcttcggccagtgtgcgttcgttcggcaaggccatgtcgaactttcatgaggtctttaccgtcggcgtcagcgccgatgcggaagtggttcggaacctcgccattaatctgagcatcgtggttgtcgggctgattggcagtttctggttgttgcgcctgctgaccggcaggctgacccgtcgcattgccgaggatgccgagggaaaaggcttgggccgcaggctcggagctttgctcctggtggggctgattgatgttgcctccatcatcatcgcctgggctttgggctatgttctggcgctcaataccggcgttaatcccaccggacagatgggtatcaaccagtcgctgctgctcaatgcctttcttattgtcgaagccagcaagctggcgatccggcttgttctggcgccccgccatcatggcctgcggttcctgccggtgggggacgagaatgccgcctattggtcgttctgggcagcgcggctgatttcgctggtgggctataccttcatgttcgtcgcgccaatgctgaacagcgtcgtgtcgcgggcggcaggaggcgcggtgcagatattggtcatggccacggccgtcaccatcgccatcatcatcgtgctgcaaaacaagcaggatgtgcgcaactggctggccgcaatctccgagcgacggaaccatgacgggttgggccggttgctcgccgctttcgggcagcattggcatgtgctggccatcgcctatctggtggcgctgctggtcgtctggtttgccaatcccgatacggctctgcccttcatgctcggcgcgacgatccagtctcttattgccattggtatcggctcgctggtggtggggtttatcgggcgctttgtcagtgcgggcctcagcctgcccgatgatgtgcgccagcgtttgccgctgcttgaaagccgcctgcgggcattcgttcccggggtcatgagtgtggtccgctgggtggtcattgtcggtgtcattgtggccatcggacaggcctgggcgctgtttgatttcgtcggctggattggcagcgatgaaggtctggccgttgcggggtcggtcgtttcggcggctttgatcgttctggtggcgatcgtgctgcatgtggtggtcgcgtcctgggtcgaataccggctcaataccaaggtcggacgcgttccgacctcccgcgaaaaaaccctgctcaacctgttcaagaatgcctttacggttgcgcttgccatttttgccctgatgctggccctggcacagattggggtgaatatcgcgccgctgcttgccggtgccggtgttgtcggtctcgctattggttttggcgcacagaagctggtgcaggatattattaccggcattttcatccagttcgagaatgtgatgaatgagggcgatgcggtcgaagtggccgggcggtccggcacggtcgagaagctcaccatccgttcggtcaccataagagacatgagcggtacgatccatctgatcccgttttcgtcggtggatcaggtttccaatatggtgcgcggcttctccttctatgttgctgaggttgaggtggcctatgacagcgatatcgaagcggtgaaacagaccatgcgcgatgccttcgaggtggtgctggccagcgagcatgccaatgtcattctcgatgacctcgatccgccggttctggtggcctttactcagacctcgatgaaattgcgggcgcgcatcaagacgctggccggtaaacaatggggcgccgggcggctttactcggagacggtgtggcggctgtttgccgagcgcgatattcgcaagccgacgccgcgcgtgtcctatgtgcccggcctcgccgcgccttggggcgccgatgaaggcggcaattgaagccaccaacgctttcgtgatcgtcgccacggcgcggtcggctttgccttaaggcgatcttaattgaagcggttaaaatagagatacgcgctgtgggggcggtcgcgttcccatgtcggcatgcgggctgacatgaggctatttgtctttgcgtatcgagaggccgaaatgtttttgtcgacccgagctttcccccgtcttcgtcaaattggcgctgcccttgcgctcaccctgctgacaagcgcgccgagttttgcgaacacggctgatttcgtgcgcgggctctggccggaggctgagcgcgccggggtgagccggcaggctttcgatgccgcttttgctagctatagcccactccccaaggtgatggagctgacccgcagccagcctgaattcacccagaccgtgcagcaatatatcgagcggcgcgtcaatgcagcgcagaccagtaagggccgtgccatgcgcgccgaatgggcgcagacgctgggcggcgtgcagcaacgtttcggcgtgcagccggaaatcgtgttggcgatctggggcatggagaccaattttggcggctatatgggcggcaataacaccatccatgcgctggcaacattgacccagaatggctaccgcgaaagtttcttccgcaaggagctgctcacggccctgcggattctcaccgaaggacatgtgagcgccaataacatgaccggctcctgggccggtgcgatgggccatacccagttcatgccgacgagtttcatgagctacgccgtcgactataatggcgacggacgcaaagacatctggaactcggtgcccgatgcgctcggctccaccgccaactatctcaagagctttgggtggcggccgggcgagacctggggctatgaagtcaagctgccgcagaattttgatttcaatgccgcccggcaattggagaaagcgccgctcagccagtggcggggtttgggaattacgcgtgtttccggacgggatttcccccgggccggcgatattgcccggctctatatgcccgccggggcgagcggaccggcatttctgctcctgccgaatttcgatgtgatcaagcgctataataattccgattcctatgcgctggctgtagggcatctggccgaccggatcattggtggcggcgattttgccacggcctggccgaagggggattattcgctcaccaaggcgcagcgcgccgaagttcagaccctgctcaaccgcgtcggctatgacgtgggtacgcccgacggcgtggtgggaccgaagacgcgcgcggccgtcatggcctatcagcaaagagcgggtttgcctgctgacggacatgtgtccggtctgctgcttgaacggctgaagcgttagggtaaacgttaacagtctgttaaccaagtcggcgcagagttaccgcgcttaagcagagggcaggccagcgaccgacaaacggcgcgcctgccttcgcccattccggcgtcagaattccgtcggtttgatgctctagtaaatccatctatttcaacacttgcccatgtcgatccccaccatgattgcgcttcgtaacgcctttgcagttcttgccattcttgccgctatgttgcccgcaacggcccatggtgtgtcgatcatggacccgttcaacgtgcccgccgccatggatggcggtacgtccaaggtcggtaacgggatcgcctatgccgatggcccccgacacaggctggatgtctatgcccccgaacagcgcggcgctgccgctccggtggtcatgttcatctatggtggcggctggagccggggcgaacgcggtgagtatgaatttgtcggcagagcgctggcgtcgcgcggctttgtcaccgtcattgccgattaccggctggtgcccgaagtgcgctatcccggctttattgaagacagcgcccgcgcgctgcgctgggtgcaggataacattgccaattatggtggcgaccccaaccgcgtcttcctgtcaggtcattcggccggagcctataatgcggtgatgctggcgctcgatccttcctatcgtcaggaatatggggtcactatcccgatcctggccgtcgcagccctttcgggcccctatgacttctatccgttcgaatatttcgaggtgcaggaagcatttggacaggcggccaatcctgaaggcacgcagccgatcaacctgatcaccgctgcgtctccgcccatgtatctggtgacaggcaccagcgaccccatcgtgcgcatgcagaacacggatcgttttgccgatcgtttgcgggcccagggcgtgtgggtgacgacgcaatattatgaaggcttcgggcatatggagccggtgattgccatgggcgcgctgtggcgctggcgcatgccggtgctcgatgacatggtaaccttcttccagcgcttcggggcatttcccagcggtgtgccctatgtcgccgtggtcccggacgcgcctgaaatgctgcccgattcagtgatgccaaccgatgagatcgtgcggcagctcaatgcgatgttccagccgatcgaggagtaggcgcattctatgtttcgggcgtgatagtgactgactcggcagatcggcggctggggccgtgatagacggcctcgatattattgccatccggatcgagcacgaaacaggcataatatccggggtggtaatgccgttctcccggcgcgccattgtcggtgccgccagcccggatcgcagccttatgaaacgcatccaccattgccttgtcacgcgcccggaaggcaaggtgaatatgggttggaatggtgcgggcatcagccgcgtcgatgaacaattcgtcgacctgaagccagccctggcccttggcggtgattggaatttccagcacctcgagcacggcttcatagaaatatctggtgttgacgaagttgcgggcgcgcaaatgcacatggtcgaataaccggccggcatgaaattccataataacttcctgaaaagaaacgcccggatttttgatccgggcgcttctgaattattccgcttcgtcggcgggcgccgaattgagctggccgtatttttccgacccgatcttttcgagcaattcgagctgagtttcgaggaagtcgatgtgaccttcctcgtcagcgagcagttcctcgaagagatttttggaaacgtaatcgcccagttcttcgcagagttcgcggctggctttgtaagcggcgcgtgcgtcatactcgccggcaaggtcggcttcgagcacttccttgatggtctggccgatgcgcaggggggcgacgcgctgcaggtttgggtggccttcgaggaagatgatgcgctcgataagcttatcggcgtggtgcatctcttcgatggattccgcgcgttccttgctggcaaggcgcttataaccccaatcgtcaaggagccggaaatggacccaatattggttgactgcgccgagttcaagaaagagggcttcgttaagccgctcgatgacctgtggttcgcctttcacgacgtactccaatccgttgctttttgagcttttcaagcccggactggatgttcaccagctcagcgggctcatgggcttgctgtgcgtggtagttttcggtgacccgcacgataatgtccaccacattcggcacgcagccggagcattttgcgcgacgattgagctcggcatagactttcgccggtacgacaagctgccagggatcggctttcagcagatcgagtacgatatcctcgatctctttcgagctaatcatgttgcattggcagacaagcatggcaggggccgaaatagggtctcaacggcgcggaataaacgccgtccattcctgaatgtcaacgtcataaattgtcacgtttgggcgcatcggcctgcatgcgctggcgtgccgcaatcagtgcggcagaggctgcagtgcgatgggaggacgaaaagaactcccgatggacaatcacgagaaccgttacaagacagacggcgatactcaaccattccgaaacgaaccaggccacggtcggcacggaaaaataataggctctgataccgctgttgaagttcttggcgccaagcgcattcatccgcgcgatggagtcgatttcttcgtccgtcgtgtcccggtcgtgatcaagggcgccgagcatgatgcagaaatgattgaactggcgcagtgacagggtgaaggcgaaaaaggccagcacgaacattgtcagcatgacgccgagatggatctgcacatccagtacggaatagctgcgttcgagcgagagcgaatccagcgcttccatcagcgccgacaattgcccgaaaacggcaaagaccgcgagcaccagcagtacggatgtggaggcaagaaagctcaccgagcccatgatattgccggacaggatggcatcgaacgggctctcacggcgcgttgcatttgccacccagcgtcggcgctgcatgttcatgatagccgagagcgatggccgcagcttttccacctgcggcacgacgatattataggccagatagaccagaagcggaaaagccgaagtcagcaatgtcgtcacgaatgggctctccagcgcagggcaaatcgtgcccgactatatcgccgcgacgctgtttggctagggttcagatcgggcgtgggttgctgcgataaacagcatcgatgtcggccagcacttctctcgacagctgcagatccgtgccattcagaatgtgacgcaattgtccggtgctggtcgcgccgatgatcgttgaggccatgaagggacgattgcggcagaaggcaattgccatgtgcacgggatcaaggccatgcctgtgggcgagggcgtgataatcctgcgtggcacgctcggagtgctcattgagccgccagaagcctttctggtaatctttgcggctaccggcgggcgtggcgccgccgaaatatttcccggtcagcaatccgccggcaagcggcgaataggccagcaagccaacctgctcgtggtggctgagttcggccagatcgtgatcgaagaggcggcgcaaaaggctatattcgttttgtaccgaaacaaggcgcggcaagccgccttgctcggcaatacgcagccattgcgctatgccccaggtcgtttcattggaaacgccgacatggcgaattttgccttcgcggacaagttcgcccagcgtttcgagcatgtcggcgatgttggcgaggacatcgctcgtgtcctgctggctcggatcgtatgaccagtaattttcgaaatgataatggccgcggctggcccagtggatttggtagaggtcgatataatcggtcttgagccgacgaaggctggcttccagcgcctcccggatcgaggcgccgtcggcccgctttccgccgcgcaggaaggaggacccgccgccaccgatcttgctggccagaatccagttctgccgatcaccatttgcagcgaaccaattgccgatgatttcctcggtgcgtccgctggtttcagggcttcccggcacggcgtaaagctccgccgtatccatgaagttgatgccagcatcgcgggccatggcgatctgggcgtcaccttctgcctgcgtgttctggctgccccaggtcatcgtgccaaggcagatatcggtgaccttgaggtcggtgcggccgagcgtgttgaattgcatgcagaaaatccatgaaggcgatcagaagcggaaggaatatctagaccagcccgccgggtcgcggaagtcttccagcggtctttaccgatgatttaaggccgctcgtcggcagactttccccagcctgtcaaaaaactgtcgcagggggttgaggtctgccgcgacaccccctatatagccatcacaccgcgcggcaagcgcagtgtttgacgcgggatggagcagcccggtagctcgtcaggctcataacctgaaggtcgcaggttcaaatcctgctcccgcaaccaaaaaaccactgaccgagaaatcggtcggtggttttgccttttcaggcgttgtcgatattgtcagcacatttgatggggtggccttaatcttgctgacccagccttacgaaaacaaaaggcgcagcccgcaggctgcgccttatttggtgctgtcgaagcttgttaacagccagaccgcgatttctgaactgctaggcagtggttttttataactgagcttgcctagacggacaagctcccgcccgtcgtaaagccgtcttgcgtcggctcctttgaccctttgacgaagatgggccaaactttcggcgtcagcgcggcacttcaactgaacaagagtggataggtgattgctccttgcttaaggttgcagcatcgggcctaaaactaccgcttggtgtcgcgcttgcgctgcagccgggatgctctggggtaattgccgctgggccgcgatttctgaacggctaagctgatggcatctgctcaatgccatcagcgactttcgggggaggacgctgcgtgcagtccaaaacatcattcgccttcgacattggcaccaattccatcggctggtgcgtctttgaacttgatcgcctgaacgatcctgtcggtatccttgcttccggtgcccgtatcttttcagatggccgtgagcccaaatccggcacgtcgctcgccgagggtcggcgccttgcccgtggcatggcccgccgccgcgaccgttataagcgtcgtcgcaaggctgtcattcgtaccctgatcgaatatggcctcatgccggacgatccggccgcgcgccgggcgctcgtcgccgaaaccaatgacaagcgctccggccaggttgccagcgatgtttatgccctgcgtgcccgtgcgctcgacgagaagctgccattgcaccatatcggccgcgcgctgttccatctcaaccagcgccgcggcttcaaatccaaccgcaagaccgacaagcgcgacaacgatcagggtaagattgccgaaggtatttcccgcctcaaagctgagattggcaatgccggcgcccgcacgttcggcgaatatctccaccgccgccgcctcgcaggcagatgggtccgggttcggccctcccgcatgccgggcaaggacgacaagcccgaagacggctatggcttctatcccgaacgcagccttcttcgggacgaatttgacgccatctggatggcgcaggcggtccattatcccgacatgctcacccaggagcgccggcagcatctcgaaaccgtcattttctaccagcgcccgctgaaacccgttcaggtgggccattgcagcttcaacccagccgaaaaacgcctgccgcgcgcccatccgttgtttcaggagtttcggctttataaggaagtcaacgaactcgccattgtcgatcgcgcccagcacgccgaaaagctgacgatcgagcagcgcgacgctctggtcacgcaattgaaggcccaacgcgaagccagcttcagcgccctgcgcaaaacagcccgcgcgccgacgggcacccgtttcaacaaggaaaccgaaagccgtagcaagatgaaaggcgacgaggtcgccgccgaactttcggccaaaacccgctttggccagccctggttctctctgcccctcgacgagcgttgggccatcgtcgatatgctgcgcacgatcgaagatccgcttgaactgaccgcctggctagagcaaaactacactctgctgcccgagcggatcgacgccatcctggctgcgcgcttgccggaaggctatggacgtctgggcgaaaccgcgctcaccgaaatgctggctgaactcaaagccgatgtgattccggaggcggaggccgccaagcgcgtcggctacgaccatgccctgctcacccgtggcggcggccatgatgagctgcccaaatatcaggaggtcatcgcccgccgcataccgcccggcaccgaagccccggacgatccctatgatgtgcgcaagggccgcatcaccaatccaacggtccatatcggcctcaaccagttgcgccgcgtgctcaatgcgcttatctgccgctatggaaagcccgaacagatcgccatcgagctggcgcgcgagctgaaactcaacgaagagcaaaagcgcgaaaagaacatcgagatcgcccgcaatacccgcgccgccgagcagcgttcggcgaaactggttgatctgggcgtgccggataccggctacaaccgcgtcctcctcaaattatgggaagagcttgatcttcgtgcgccggaaaaccgcgtctgtatctattgcggcgaggccatcggcatcggcactttgttttcgagcgcagtggatatcgaccatatcctgccctggtcgaaaacgctcgacgacagccaggccaatcgcatcgtctgccatgtcgcctgtaatcgtcagaaggccaatcatgcgccagccgacgtgccgcaatggcagacccgctacgacgacatcctcgaacgtgccagtcgcctgccgctcaacaagcgttggcgcttcggccgcgacgccacgaagaaatttgccgacgaggaaaccttcctcgccaggcaattgaccgatacgcaatatctttcgcgccttgcccacgaatatatggcggcgctctatcccgacgaggagcccgacgcctggggtgagctcacgcgcaaaaaccatgtgcgcgtcatcaccggccgcatgaccgaaatgctgcgccgccaatgggggctcaattccatcctggccgaccacaaccagaagaaccgcaatgaccaccggcaccacgctatcgacgctgccgtggtcggcgtcaccacgcgcgccctgttgcagcgcatcgccaccgcagccggcagccgcgaggcgctggcgctcgaagagaccatcggcaggatcgatccaccctggtccacgttccgtgaagacctcggtgcagcgattgaccgcatcgtcgtcagccacaaacccgatcacggcaccttgccccgccccggaaagatgggccagaccgtcggccagttgcacaatgacacggcctatggcctgaccgatgaaatcgacgagcgtggcaatcccatcgtggtgcgccgcaagcccttcctctcgctcaccgacaaggacattcccaatatacgcgatgtcgaactgcgcacgcgactgcgcgccgccacgtcgggaaacaaagactttgccacggccctactgaccttcaagcaaaacgatctcaagtttagcggcatccgccacgtgcgcgtgacggaaggcctcaaggttatccccatccgcgacgcggccggccatgcctataaaggttacaagggtgacgccaactatcgctacgacgtctgggaaatgcccgatggaaaatggatcgccaaagtcgtcacgctttttgacgctcatcaatccggatttgattggagcagcttgcggccgcaccccgccgcccgacgcgtcctctttctccagcagggcgacatggtggcctacgaccacccccgcgacggcgagacgatcggcatcgtggtcaagttcggccagaacggccagattaccctggtgccgcacaccgcctccggtgatctgaagcgccgcgatgccctgcccaatacggaagaagaagccattgcgcgcaatatccgggaccgaaacggcgatccggtttttgatcccttcaaatattttgcgcccaccgctggcggcttgaagaaaatcaacctgcgcaagctgcatgtcgatgagatcggcatcgtccgccacctaaagcgtcgcggcggggaaggctagaaggggcgcggccgtccgccccacctaaaggtcctgtttgccgcaaagcagaattctccattttgcaggggcttgtgttgtccatgttaaggtaaatagtcgttcaatattggtgaaattcggttgataaatcatactccgatccatggatcgtgtagtcgacatagaaaccgataatcttttccttgccgtgcatcgcggattcttgaccgtgacttccggcagcgaagagcgcggacgcattgcgctcgatgatattggcgccctcatcgttcatgcccacggcaccacctggtccaccagcgtttttacccggctgagcgatcgcggtatccccgtcgtcatctgcggcaccaatcacgcgccggctgccatggtctggccgcttgagggacaccatctgcagggcgcgcgcatgcgtgcccagctcgccggttcgcgtcccctcgccaaacagctatgggcgcagatcatcaaggccaagatccgcatgcagggctacaccctcgcccgtcagggccatgaagctggcgccttcgatcttctggcgcgaaaagtccgctccggtgatcccgacaatatcgaggcccaggctgcccgccgctattggaaggccttgtttggtcccgacttctcgcgtgatcagaacgcctccggcatcaatagccttctcaactatggttacacggtgctgcgcgccattgtctcccgtgccatctgcgcagcgggtctgcatccaacggtcggcattttccacgccaatcgcgccaatgccttcgctctcgccgatgacctgatggagccctaccgtccccttgtcgatcaactagtactcgacctggtcaatgctgggcggtccgaagtcgattcagcaaccaagcagtcactcaccaccatcgccacgctcgatctgcccggtcccctgggtctctccccgctctcggtacaggttcagcgcttcgtccattctctggccgtcagcttcgaaaccaagattgcggcgctcgaattccccaatccgccaattcgcaccaatgttgctctggacgttaacaatgcgtgaacgaaaagcgaattcgggtgcgactcacctaagcggataccagctcatgtggatgctcgtcactttcgaccttccggtagaaaccaaagcccagcgctccgccgccaccaagttccgaatggcgcttctcgatttaggttttgaaatgagccagctttccaactatcttcgcttctgtagtggcaaagaacaatgcgagtcatatactcgaaagatcgaagcgaaacttcccgagttcggcgatgtatacatatttcaattcactgaccgacaatacgaaaacatcgtccgcttctctgatcaaggccgaagacctagtcagaaaaatcccacccaaatggctctcttctaatgcttaaacccattttgcaagcgccgacaccgccgaatcctcctgtaaaaacaaggggttcgggcggggtcgagcttagcagttcagaaatcgcggtccagcggcaacaacttgggtgaattgtgtttcgccgcgggtagcttagcagttcagaaatcgcggtccagcggcaacgcccgccgctctttatccaagtccagaagcagcttagcagttcagaaatcgcggtccagcggcaacctgcccctgtctttaccatcgtcaccgccgagcttagcagttcagaaatcgcggtccagcggcaactgcttggaactcagggtccatatcgttaagagcttagcagttcagaaatcgcggtccagcggcaaccgggcactgcttctggttattgctgtgcttagcttagcagttcagaaatcgcggtccagcggcaacgctgctctgcttgagcagataaaagagcgcagcttagcagttcagaaatcgcggtccagcggcaacgttcacacacccaggaacacgacaaacgcgagcttagcagttcagaaatcgcggtccagcggcaacgggtttagccgcgatgaagtagacgaactgagcttagcagttcagaaatcgcggtccagcggcaactgtcttacacagacctagcttacgagcgcgagcttagcagttcagaaatcgcggtccagcggcaactgaactccaggccgggcgcgggccttcctaagcttagcagttcagaaatcgcggtccagcggcaacgacctaaaaatgcggtgcgcaatctgcccaagcttagcagttcagaaatcgcggtccagcggcaaccttgctgcgatgttctctgacgaggcgacgagcttagcagttcagaaatcgcggtccagcggcaacagccccagcaggatgaagacgccggtctggagcttagcagttcagaaatcgcggtccagcggcaacgaaaaaatatgtcaaacgagtttgcgtgatagcttagcagttcagaaatcgcggtccagcggcaacctgtttgctagtgaaatggtgcgaacacatagcttagcagttcagaaatcgcggtccagcggcaacgcacggcggttgaggggcaagagctttcggagcttagcagttcagaaatcgcggtccagcggcaacccatggaccgacgcttgcgtgcaaaggtagagcttagcagttcagaaatcgcggtccagcggcaactgctcacccactcggccgcgacatcgaacgagcttagcagttcagaaatcgcggtccagcggcaactcgccgaggggcacacgcgcttcaacccggagcttagcagttcagaaatcgcggtccagcggcaacgaaagtgttttcaagtcaccggtcatcaatagcttagcagttcagaaatcgcggtccagcggcaacaagatgatgagcgcaagcagaaatacaaatagcttagcagttcagaaatcgcggtccagcggcaacggagttgaacgattgccaagagtaaggccgagcttagcagttcagaaatcgcggtccagcggcaactaggcaagtctggcatgagataacggggagagcttagcagttcagaaatcgcggtccagcggcaacaagcgggcgaagtgggtgcggtcttaccccagcttagcagttcagaaatcgcggtccagcggcaactgacgactacgactggcagcgcctcatcagagcttagcagttcagaaatcgcggtccagcggcaactcgttgatcacggtcccgcttggggtaaccagcttagcagttcagaaatcgcggtccagcggcaacggcccgcagggcaacgatgatgacgatgacagcttagcagttcagaaatcgcggtccagcggcaaccttgggaggtttcggcataaagctcattcaagcttagcagttcagaaatcgcggtccagcggcaacgcgttcttgtggtgatcaaaaagttcctgaagcttagcagttcagaaatcgcggtccagcggcaggctagctgggagcgggggtgagccgcgatctcgccccaggtgtagctgcaactgtatcgaggccttctacaccgaacccactgccacagacgtactggcggcgttcgtccggaggtagtcgaaaacgccgcggcgggaggctgggaaagggccgccaagccggcggcggtccacgccgtcccagcggtatgtaacgttgcctctgttcgaatgataaactggccgcctgcttcgacaggcggccagtttgcgtaatattctgctcagttcacttgagcagccgggcgcatcgcaggctaggcgagcttcacgcgcaccatctgataggaatagggcggcagggacaggctgagtttgccgtcatcaatctttgcgccgtctcccttgcgcggcttcacctcatcctgatttctggccgtgtttacggccttgagatcgggatgcgtcatgacctgatggtcgatgactgtaccagcgccgaagccttggaggctcacttctgtttcgatgctgtcggtggtgtggcgattgacgagaaagaagctcagcgtgccgtcctcgtcattgtgaacaccggagatatcgacgaatggcgtgtccttcgcatgggtggtttcatagcccggagaattggtcaccacctgcaatgccgtgccacgaccaaagatcgaggcgaaatagtatggatagtaaatggtttgcgcccaggctggcccgcccttctcagtcatgatcggggcaatgacattcaccagttgagcgatacaggcgattttcaccacatcggcgcggcggatgaaggtgttgaggatcaggccgaccatcaacacatcttcgaaattatagatgtcttcaagcaggcccggcgcatgtggccaaccgctattgccatccagaatttcacgatccttcttgttggaatggtaccagacattccactcatcaaaggagatatagacatcctttttcgatttccgcttggccttgacctgcttgatggtggaggcaacggtctcgatataggtgtcgagcttctcgctcaggccgagatagttcggtgtgttgtcgtcgcggttggcgaagtacatgtggaggctgatatagtccacatgatcataggtgtgctcgagcacgatgcgttcccaatcgggatagctttgcatatcggcattggatgatccgcagacgatcaattcgaggcttttgtcaaacatccgcatggcgcgggcggtattggcggcaagcttgccatattcggcagcgtctttgtggccgacctgccaggggccgtccatctcattgcccagacaccacattttgacgttccagggttccttgcgaccatttttgatgcgcaggtcgctccaataggagccgcccggatgattgacatattccaggaaattgcgggcttcatcgacgccgcgcgagccgaggttgacagcaagcatcatctcggtgccaacgctggcgcaccagtcggcgaattcgtggataccgacggcattgctttccgaagtatgccaagccagatcgaggcgcaccggccggtcctcgcgcgggccgatgccgtcctcccagtcataggccgaaacgaaattgccgccgggatagcgcacgaccggcacattcaggtcttttaccagcttggcgacgtcgccgcgcattccgtccttatcggcggttgggtgatcaggctcataaataccttcgtaaatggcgcgaccaaggtgttcgaggaacgccccataaacacgatcatcgatcttcgagatcgtgaaatccttgttagcgattgcagacgccttcaccacgtcctcccttgtatgcggattttctgatttatatcattaaatcggttgtacaagagcctccgacaggaaggcaaggtgctcgaaggtcttttgtatgattttttatcgcggctgagacctgccagctgagtaagcgccaacagcctgtgtgccttcgcctgtgccggcaccttaccgcgcggtctggagcctcatgatgatatcctgatcgtaattgccgaagcctcggccaaagatattgatgccgcccggatgcttcgcgtcgggctttacggcgatgcgcaagcggatcgagtgatggtttgagagatcaaggtccaccaacgagactggagagattttcacgccatccacataggtgccttcattggtgacgcgccagcttttcagcttgccatattggctgcccttgagcttccaccagtccggcgtgtagacgccgcgcttgtcgccaaaatcgcccggagaggtccaggtgccgatttccgtgctattgacagacagggtaatgtcgctgggccaatctgctgaagtcccgggcacttcagaactcaattccattgcaaattcaagaacttcaatagtgttctgcgccagtttggcattgttggggaactggtattcgagaaagccccgggtaaaccagatcagcccggccttcatgcggtccggctccagataggtctcgggcacatcgagcagtccaataataccctcggtcgagcagaggccgcagggggcggacacctcacaactcgtatagagcccgagcggcatggcgacctcgatgaagttggaccgcaagggggagatgtcctctttgaacatcacgagcacttcatcgaaggtggagtgacaaatcttctgattgcccttacgcgccttttgcgtctccgtgcggatcagaccggctgcctccaatatctggatattcgtggatacagttgattgcggcaggtccaggcgatcagcaatatcgttgccgttgagcggcccgtgaacgtgcagcagtttgagaattcgcacgcgaaccggcgatgccagccccttcaagacctcgatattctcctcggggtcgacgactagaaaattgcggctcatcttggtccagcaccagtttttcttgtcgtatcagataatctgatatgatcaaccctgcttctgggtggacatcaccgtgctggcgcgctgcagtaaccggccagaaatcgacagcaccctgtcgctgagcggcttgccatcgaccagttcgctcagggctttttcggccatttcgagatagggcagggtaatgctggaaatgcccatgtccttggcaaattcacggtcgtcatagccgacaatggcaagatcgctcggtacattcaggcccatttcggatgcggcctgcagggcgccgcgggcgatgatgtcattgtgacagaagatggcatcgggaggttccggcaggctgagcaggcgcattgctgccgcatatccactggcatgcccccaatcgctgacctcttcatactgggcgcccagattgagcccggccttgttcagatcccgatgataaccggcgaggcgttcgcggctggcaaactgccatggatcacctacaatcgtggcaatacgcttgcgacccagttcgatcagatgttgcgcggccaacccgccgccgtggcgctcggctggcagcactgaatggcccgtccggtcctcgcggcggcaattgagcatgacatgccggaaggccgccaagcgctcgggtggcgatacaattgccgagaaggtgctggcatagaccactcccgccacgccgatccgctcgaacaggtccagcgcggccatttcgtggtcggccacgccgtcgctgacctgaatgaggagctgaatgccctgtgcatcggcccagttctgcatcccatagatcagatcgacagggtaagcggatgagatttcattgatcagcacgccataaacacgcttgcggtctgggtcgagggcgctgagggcggggcctggcgtatagccaaggtctctggccacctgcagcacgcgctgccgcgtcgcctcggcaatgcgcacccccgggacctggttgaggatcagggagaccgatgtgcgcgagacatctgccgcccgcgcaatatcaaccatcttgacccgctttttcatcgcgcgacccctcgctccattggcattcttgacaagctaacgacagtgaagcagtttgctaaacaaatttagcaagcaggctctcgaacgcgaggaggcggccataaggccgttgcgttcgggttcgtcagcaaagctaacgcgttatcacaccttacgccaagcgaggaaaaccttgtctatcgccaatagctcccttgccccgaatccgcaatttcgccgcgccaattgggtcgatctctgcggtgaatgggactttgctcacgacgacaataatcagggcgtgagtgagaattggtggaacagggccgaagtcttcaaccgtcggattctggtgccttttccgccggaaagcgagctttccggtctgcgcgagaccggctttcatccagtgatctggtatcgccgcacctttgccgcgcctgtgctggaacagggtgaggcattgttgctcaattttggcgcggtggattatgccgcaactgtctgggtcaatgggcaatgcgtgggctcgcatgaaggcggacatgtgcctttttgtctggatgtgacccatgctctggttgagggcgagcaggtactggtcctgcgtgctgaggatcagcctgaagatgtgcgcatgccgcgcggcaaacaggattggctcgaagcgccccatgccatctggtatcaccgcaccagcggcatctggcagccggtctggctcagcgtcgtaccgaacctgcatcttaccgacctgcattttacgcccgatatcgccaattatcgcgtgcgctgcgatattcgcctgaacaccgtccccatggcgccggtagcattgacgatcaagctgagcgctcatggaaagttgctggcgcagcaaagcattgtgacctctgacgcggaactgcgcttcgatatatcggtgcctcagctcgaaaatggcgtgcacagggattatctgctgtggacaccggagcgaccaaatctggtcgatgtcgaggtgacgcttgccggcgacaaagaggatctggttcagtcctatctgggcctgcgcagcgtcggcgttggcgcacaacgcttcctgctgaacggccttccctattatctgcgcatggtattgggtcagaactattggccggaatcgcatctggctgcgccgagcccggaagccctcaagcgcgaggtcgaactgatcaaggcgatggggttcaacggcgtccgtatccaccagaagatcgaggatccgcgctttctgtattggtgcgatgtgctcgggctaattgtctgggaggagatgcctagcgcctatggcttctcaaattcggcgatcgagcggttgtcgcaggaatggatggctgcgattcggcgcgacaagagccatccctgtattgttgcctgggtgccgcttaacgaaagctggggcgtatcccaaatcgctgatcgacctgatcaggcccattatgccagcgcgctctatcatctcacaaaggcactcgatcccagccggcccgtaatttccaacgatggttgggaactggtcgaaagcgatatctggtctatccatgactacgctccagatggggcgggactgtcgagtcgcttccatgacagcgcagacctcgaagccatgctcaagggcatgggaccggcacggcgcaggattgtgctggatgagcgagagctcggtgacaaacccataatgctgaccgagtttggcgggttgagctatctgcccaagcagggcgagaaatggcacggttattccaccgtcaacgatcccaaggattttgaagacaggctgcgggacattttctcggccattgccgccatgccgcatgtggcgggctattgctacacgcaggtcaccgacaccgagcaggaggtcaatgggcttctcacggaagaccgggcgccgaaactgccgtttgaaacattgcgcgatatcatgaccatgccggctgcttccgtgccgcatgagcagatcgacaatgcccgacgcaaggcccggcaggccgcagaggatgccgagcctatcgactgagccccttcggggggcatgaatgatcagaatgtcccgacgaccggcatgggcgtcgggcatttcagcgcgcattctgatatttatcaaaaataatgatgttaaaataccgtgatggtcttgactgcatctgcgttccatctgaaaaataatacaaatgactggccagcccatatgacgggaatgaccagcaatgatgcgacttacgcgtcggggagaggtgcatgtcagatatcgtcctgaatgaggtcagcaagtcctatggcgccgtcagcgttctggacaaagtttcgatgcatatcgaatctggcgaattcattgtctttctcgggccatctggttgtggcaagtccaccctcttgcggatgatcgcaggtcttgaggaagtgacggatggtgaaattcatcttggcggtcagcgcgtcgaccaattgccgcccaatgagcgcggcgtcgccatggtgtttcaaaactacgcgctctacccgcatatgacagtgcgggataatatgtcgtttgggttgcagaacattggcacacccaaggccgaaatcacccgccgcgtcgacg

SEQ ID NO: 3029 - DNA, 22172 bp, synthetic construct
  misc_feature 1..22172: note = Synthetic
  source 1..22172: mol_type = other DNA
gcaagaaggcgcgtgcggcctggcatggccggttcgacacttcggaactcagggacgaattctcgcgccggatgcggggcgatctgccggaaaatttttcgctcgatcatcacatcgcctcgctattggacgcgccgcagaaaaccgcgacacgcaaggccagcgagaatgctttggcccgcatcaacgatatgctgcccgaaaccatcgggggttctgccgatctgaccgggtcgaacaacaccaaggctggcggaatcgagcctttcacggcggatgattacagcggacgttatgtctattacggcattcgtgaatttggcatggccgctgccatgaacgggatggcgctgcacggcggcgtcattccctatggcggcaccttcctggtatttaccgattactgccgcggggcgatccgcctttctgcattgcaggaagcgcgggtgatctacgtcatgacgcatgattccatcggtcttggcgaagacgggccgacccatcagcctgtcgagcatctgcagagcctgcgcgccatgccgaaccttctggtaatgcggccggctgacgcggtggaaacggcggaatgctgggagatcgccctgcggcagaaggatcgcccgaccgttctcgcgctcagccgacaggatctttcgcaattgcgcaccgaaccgagcaagcacaatcgttgcgaacggggtgcctatcgtctgaaagctgcggagggagatcgcaagatcatcctgatcgccaccggttcggaggtgcagctggcgatggaagttgccgcgaagcttgaagagcaggatattggcgccgatgtcgtttcgatggtctgtacggaactgttcgatgcccaaacggcggaatacagggaaagcattctgcccaatgaagatccggccagcatcctgcgcgtgacgatcgaagcaggaacgaccttcggatgggagcgctacaccatgccgaacgggctgaacatcggcctcgatcgctttggtgcttccgccccgatcggcgacctgatggaaaagttcggcttcaccgccgatgccatcattcccagaattctcgagaaaatctgacaacttaccaggagtatttcacatggcgacgaaagttgcgatcaacggtttcggacgtattggcaggttggtggcacgcgccatattggagcggagcgatcacgatctggaactcgtcgttatcaacgatctggccgatgccgaggcgaatgcgttgctgttccagtatgattccactcatggccgctttccgggcgaggtaagcaccgacggcaagagcatcacggttgacgggcgcgagatcgccgtgacttcggagcgcgaaccgggcaagctgccgcatggggacatgggcatcgacctggtgctggaatgcaccggttttttccagagtcacgaagcggcacagccgcatctggacgcgggcgccaaacgggtgttgatctccgcacccgcgaagaacgtaacgaaaaccatcgtttacggcgtgaaccatgaaacactcacagctgaagatgtgattgtctcgaatgcaagctgcacgaccaactgcctcgcacctgttgccaaggtgatgcaggacaccgtcgggatcgagcgcggcttcatgaccacgatccacagctataccaatgaccagcgcatgctcgaccagatgcattccgacatgcgccgcgcgcgcggcggtgcgcagaacatgattccgaccaccaccggtgcggcgcgtgccgtcggcctggtcctgcccgaactgaacggcaagctggacgggtccagcgtccgcgtaccgacgccgaatgtcagcctgatcgacctggtgttcacgccgtcgcgcgacacgacacgcgaagaactgaacgatgcgctgaaggccgcgtcacaaggtgcgatgaagggcgtgctggacttcaccgatcagccgctggtgagcagcgacttcaatcattatccggcaagctccaccgtcgatagtcttgaaactgcggtgctcgaaggcaagctggcgcgcatcgtgtcctggtatgacaatgaatggggcttctccaaccgcatggtcgataccgcaggcgtcatggcgaagctgatctgatcgcgatgagcaacttcaggactctcgacgatctggaaaccgacctggggagcgtggccggcaaggtcgcgctcgtcagggtcgatctcaatctgccgatgcgtgaggggtcggttaccgacaccacgcgcattcgcgccagtgcgccgaccattctcgaactggccgatgcaggtgcgaaggtcctgctgcttgctcatttcggcaggcccggggggcagcgatcgtcgaccctgtcggtcagcatgactctcgacgccgtggaggatgtgctggggcgcgaggtcatgttcgtgcccgaggtgggcggcccggtcgtggcacaatccgtcggcatccttgggcatggcgatattgcgatgctggagaacacccgcttctggcctggcgaggaagccaacgatccggaatttgccgcgcttatcgcggaaaacggggacttctacgtcaacgacgccttctccgccgcgcatcgcgcccatgcaagcacggaaggtctggcgcatcttctgccatctttcgccgggcgctccatggaaagcgagttgaaggcactggaggctgcactggacaggccggagaagccggtcgccgcggtcgtgggcggagcgaaagtttcatcgaagctcgccgtgcttgaacatctggtcggcaaggtcgatcatctgattatcggcggcggcatggccaacacctttctggccgcgcgcggcgtggacgtgggcgcgtcgctctgcgaacatgatctgcgcgatacggccaaccgtatcatggacgtcgccgatcatgcgggctgcacggtccacctgccctatgacgtcgtggtggcgaccgaattcgccgccaatccgcccggcgtgcgcacctgcaatgtgcacgaagtcgccagtgacgagatgatcctcgacatcggtgcggcagctgccgagacgctgggtgacgtgctgaagacctgccggacgctcgtctggaacggcccgttgggcgcgttcgaaacggaaccgttcgatgccgccactgtggcgctggcccgcacggccgctgcgctgacggcggagggatcgctggtgtccgtcgcgggcggcggcgatactgttgccgcgctgaaccacgcgggtgtttctgaggatttcacctatatttcaactgcaggcggcgctttcctcgaatggatggaaggtaagaggcttcccggtgtggctgccttgcgcgcctgaccgaaccaatcgcaagaaccagggtgatgaaatgacttacgacgaaatgaagcagaagatggccgagggaaacggcttcatcgcggcgctcgaccagagtggcggttcgactccgaaggcgctgcggtcctatggcgtcaaggacgatgaatggtccggcgacgaggagatgttcggtcagatccacaagatgcggtgccgtatcattaacgctcccagcttttccgatggacgtgtgatcggtgcgatcctgttcgaaaagacgatggagggctgtagcgaagatggctcgcccattcccgaactgctgtcgcgccgcggtgtggtcccgttcctgaaagtcgacaagggcatgcacgacgccgaaaatggcgtgcagttgatgaagccgatccccgatctgaacgcgcaatgcgcccgcgcgaaggaactcggcgttttcggaacgaagatgcgcagtgtcattcatgaggcggaccaggccggcatcgaagcggtggtcgcccagcagttcgatttcggcaagcagatccttgacgccggtctgatgccgatcctcgaacctgaggtatcgctcgagagcgacagcaggccgcaggcggaaaacctgctcgtcgccgccattctcgacgagttggaccggcttcaggatggccgtcagatcatgttgaagctgacgatcccgagtgaaccgaacctctacaaaccgctggtcgatcacccgaaagtcctgcgcgtcgtcgctctttcgggcggctattcgcgtgaggatgcctgccgggaactggcgaagaacgatggcatgatcgccagcttcagccgcgcgcttctcgaagtcctgcaggccgatatggacgagggtgaattcgatagcgcactcggccgtgccatcgaagagatcagctgcgccagcacgggccgcgagattaaggcggcctgacagggcaggaagggcggatcaggtccgttcttcaacttcgaaggcgaaacgatagtcattcggcctcgtttcgccttcgacctttgtaaccggcatgactgccgccagggcaacaatgtagccgcggacaaattgcggctcatccagcacgagatcgactgtctgctgccagcctggtcctgtaatcagcgccgtaaggacgaaacggcccgcccagacgcatgtggtccgcaccgggcaacggctgtcctccaccacttcgatcggcaagatggtgagtgaccgaattgctgcgctctgctgcagggtgacaaaccgcatctctgtttccgccgtctccagccgcgcatcaggcgcagccgaacaggccatgagtgtaccggcgagcagggtggttgaagcggcgcggtacgaaaatttcggcatggcttccctgtcctggtaaatgagccggcaagacgaccgccttgctggcgatcccaccttggcgtttgcctgctggcggagtagagcgcgggcatggccgatacacaagaatttccgcgcaccccctgccagctttacctcatcagcccgcttgaaacagggggcggattccctgcccggctggaaaaagctcttgaagcagacaggactttcggcctggtcactgcgtttcagttccgcgtaaaagggctggatcagcacgaggcggcgcggcttgccttgccgctgcaggagatttgcgcggcgcatgaggtaggcttcgtcgtcaatgacgatgtcgctcttgccaggcgcctgcacgccgacggtatccatctggggcagcaggatgcgtctccgcgcgatgcacgcgaggagcttgggccggacgtgcagatcggcgtcacctgccatgccagccgtcacttggcgatggaggcgggtgagcagggtgccgattatgtcgcattcggcgcattctaccccagttcaaccaagccttcggatcatcgtcccgaaccggaaattctggactggtggcagggcatgttcgaacttccctgcgtggcaatcgggggcatcacccccgccaattgtgcgccgctcgtgaaggccggtgccgacttcctggcggtatgcggtgcgatctggaacggcgatgaggcggcggcgatcagggaattcgcgcgtgcaatgcgcccggcatgataattcgatagcgcctgcgcctgtccgctctatagtccatggtgacatagcaaaagcgggggtatgtccctcctgcctcgcgaaccgctgaaggccaaggtgaatgacaagaaaatggcgctgaatacgaccgatcggatattgaccgtcgttgtcactgcgacattgacgtccgccgcatggatcatcgcgggcggcagcctgatggaaaacgcggggagcgaaggccagatcgcgagcacccgccccgcgcattccgcccccagtcccgtaccgcctgccgacggtccgtccgatcctgcattagccaacactgctgcaggcgatgcggcgaaagcgctggacacagtggcggcaagccagccgctgggcgcggaagggcgcaatctgataatccctgttctcaatgtacgaagcaccgacctgaccgatactttcaccgatgatcgtaggggagggcgccgcctgcatgaagcgatcgacatcatggcaccggaaggcacttcggtcgtcgcggcagcgcctggtaccgtcgagcgactattcgtgtcgcagcagggcggcaacaccatttatgtccggtccgccgaccggttgacgatccattattatgctcatctggcggaatatgcgccggggttgaaggaaggacagcgggtgcgccgcggacaacggttgggctcggtgggcagcaccggaaatgcgtcgattgatgcgccgcacctgcattattccatcctccgcacgactgcggatgcggagtggtgggaaccgtccaatgccatcaacccctatcccctgctgacgggcgacgcggctgcaagctcggccgcttgacgtcctggcggcgcgtgcagccgcactcctgcgagccttgccgccgcgtccatcctcggctaaggcccgcgccaacgaagcggctccctgcccatgcggcgggcctcgtggtcgcctcattctccagcgaacaggcagtttcatgaaaatcagcggcgtcgatatccgtccgggcaatattctcgaatatgagaaaggtatctggaaggtcgccaagatccagcatacgcagccggggaagggcggggcctacatgcaggtagagatgaagaacctgatcgacgggcgcaagaccaatgtccgctttcgcagcgccgatacggtagaaaaagtccgcctcgatacaaaggattttcagtatctttatgccggggatgaagcgctcgtctttatggataaggatactttcgaacagattaccctccccaccgatctgctgggcgatgctgcggcatttctggaggatgggatggatgtcaccctcgaactttatgacgaaaggccgatcagcgtcgctttacccgaacaggtcgaagccacgattgtcgaagccgatgccgtggtgaagggccagacagcttcctccagtttcaagcctgccgtgcttgagaacggtgtgcgcgtcatggtgccgccgcatatcgaaagcggcacgcgtatcgtggtcgatgtctacgaacgcacctatgtcggcaaggtgagctgaggccgatggttgcgatttcaggcctcattcgcgtcatggaacgtgccgcgcgcaaggcgggcaatcgtctgcgccgtgatttcggcgaggttgcgcatctgcaggtgagccgcaagggtcctgcggatttcgtttccaaggccgatcagaattccgaacgcaccctctatgacgaattgctcaacgcacggcccgactgggggttcgagcttgaggaagggggccggatcgaaggcgcgccgggtatgccgcgctgggtcgtggacccgctagacgggacgagcaatttcctgcacggcatcccgcatttcgcgatctccatcgccgcgcaggaaccgaagccggatggcagcggatggggcgatgtcttcgcggcctgcgtctatcagccggtgaccgacgagaccttctgggcagaaaagtcgcgcggggcgtggttgcaggatgcgcggcttcgcgtgtcatcacgagggcggctggccgatgcactgatcgctacgggcacaccgttccacgggcatggcgatttcgatgaatggtcacgcatctccggtgccatcgctccgcaggtggcgggtatccggcgtttcggtgcggcatcgctcgatcttgcctggctcgccgcaggccgtttcgacggttactgggaaagcgatctgagcgtctgggatacggcggctggctgcctgctggtgcgggaggccggtggcttcgtcaccgattatcgtggccgttcgctgccgatctgcgaccggcaggtgctggcggcgaacgatacgctgcattccaggctgcacaaatcgctcgccggggcgctgaagggcacttcggagagggtggcaacgaaaaagcctgcttgaagcctttgcggcagggcgctatcgcccatgtcgcagtgagatgcccctgtggtggaactggtagacgcgctcgactcaaaatcgagtttcttcggaagtgccggttcgagtccggccaggggcaccacttctggttaaagatgggaacactcccctccagtgggggagacccttggccaactcgcgctctccagcactgattttgaaccggaaatctggatgccctttttgcttacagacacctcggaggcagctgcgaaaagctgttcggtgatagcgatttgagtcaaacctgtgactcgatgggcgtttcgatcgacggcggctgattgaattttggtgcgcatcgccgttccgaccgcgttgtcgcacatatctcgaaccgcttgctcttcggttccagtgtagacgatgcaccttacctgcgtatctatcttgttgtgatggacggttcgaagcgcttgcacgcggcgatagccgtcttcgacccgcatagtttccatcgtcgcttttgatgacctcgatgggaggcaggaattcagggtcgaaggccgattcgagcaatcccgcgtcagctgcttccgactgctgcgacattgccgcacagtggtaaatgcaatcgaccagatcgaagataggaagggtagtttcgccagccactctcggcggggcatcgaaatgtgtcttgccgggttcggcgaatgatcgctgatggtgtcgatttcatcgaactcgacggaattcgctctgccattctggccgctttgcgccccaatctctgtcatagcgacttcatctcgcggtgcccgaacagacagacattcgcgcgatctcgtcggttacagatcgcgtcaactgccaaccgaggcggcaaaaaagagtgccgaatttctgtgatcaattgcgcgacttgggccgagacgactggcaaaatcgcaaagcaccatcgttgtcgttcaaaagccggaaaacaaaaagggccgccccgcaggacgaccctgatttggtgcagttctgactacttgctagcgatcagaccgcgatttcatgaatgctcttgctttgcgtccgcagctgacagaagtcaagccgaggaggaactgcatgacatatcggcttggcatcgatctcggcacgaactcgctgggatggtgcgcattgaaactggacgacgatcacaacccggtcggcgtgctcgacggtggcgtgcgaatttacgcgaacggacgcgaagcgaagactggcacttcgctggccgtcgatcgtcggaatgcgcgagccatgcgccgccgccgcgaccgctatctgcgccgacgcgaagttctcctgcaggagcttgtccgtttcggtctgatgccggaggacgagaagaatcgcaaagcactcgtttcactcgacccctatcacattcgcgcgacagctctcgacgaagctgttccgccgcactttctcggccgtgccttgtttcacctgaaccagcggcgcgggttcaagtcgaatcggaaggcaaaccgcagcgcgggcgacgccgccgagcttggcgtcgtggcaagcggacacgacaatctcgactcggcaatggcagccgccggagcgcgaacttatggcgagtttctgtggcagcggcaccggctcgatccgcaatcgcgtacgcctgaccagcgccggacgcgcatcaggcggaacgatggtcaggatggctacgattctatcccgcgcgcaggcatctagaggcggaattcgatgcgctgtgggatgcgcaaacgcgtcatcaccccggcctgctgacggacgaagccagagggcgcctgcaccacgtcattttcggtcagcgtcccctgaagcccccgcgtgtcggtcgttgcagctatgtggacgaggaaaggatcgcgaaagcgcatccgctatttcagcgcttccggctcgtgaaggcggtcaacgaactgaccgtcgaaaggctcggtgacgagacgcgtgcgctgacccgcgaggagcgcaatcagatcctcgccgcattcagaacgcccgccagcaccaagcgcagcatgacctggggtcagttgcgcaaggctgcgcggttgccgcgcgacagcggttccggggcgaagagcagcgcggcacaggcctggttggggatgaagtcgaggctgagatggtcagggtgtacggacctgcgtggcgcgacctttcatgcgataaccaatgggctctggttcgccggctcaaggacgaggaagacgagagcgccttgcgcgagttcctcgtcaaggagaaaggctttgaacccgatgtggcggatgcgctcgtgaacgcgcgtcttcccgaaggtcacgggcgcatcggaccgaccgccacggccgctatcctcgagcgactgtcaaacgaggtcgacgcggatggcgccgtcatcgccgaatcgcaggccgtgtccttgtgcggatggcatcacagcgaccggcgaaccggcgaggtgctgggcgaactaccctactatggcgagatcctcgcgcacaacatcccgcccggctcgcaagatcccgacgacgacgatgccgaacggtatggccgcatcaccaaccccacggtgcatatcggccttggccagctgaggcgcgtgctcaatgccctgatcaagcgttatggcagaccgcacgatatcgttgtggaactggcgcgcgacctcaaactgtccgaggatcagaagcgccaagtcaacgcagccaaccgcagaaaccgcgatgaagccgagcgccgcgggacgaggctggacgagatcggtgttcgcaattccggcgccaaccgcgccttgctcaagacatgggaggaacttcaccccgatccgaaggcgagggtgtgcatctataccggcgcgcccatcggtgtccgcatgctcttcgatgccagcaccgatatcgatcatattttgccggtgcgcgagacgctggacgacagccaggcaaaccggctcgtttgcatggctgctgccaatcgccgcaagggcaataggtcgcccttcgatgcgttcggcagcacgccggaatgggaagcgatactggatcgcgcgcaaagcctgccgccgaacaaacgctggcgcttcgcccccgatgccatgacccggttcggcagcgagcagggttttcttgcacggcagctgaccgatacccagtatttgtcccgcctcgcgcgcagctacttggaagcgctctatccggaaaaaggtgcgggcagccagcgcgtgcgtgtgatcccggggcgattgaccgagatgatgcgccgcaattgggggctcaaccagttgctttccgatcacaattacgccgatgtcaccaagcagaagaaccgcctcgaccatcggcaccacatgatcgatgcctttgtcatcgcactgaccgaccagtcgctcctgcagcgcgtggcgatcgccgcggcacaggccgacgaggagggccgtgacaatatcttccgcgatctgcccgaaccgtggccgggttttcgaggggatttggaaaccgtcctgaaccgcgtgacgatcagtcacaaaccagaccacgggagccgagcctcggaggggcagcgagcgcgcggtgacgacaccacatctggccagctgcacaacgataccgcctatggcctgacgggtgagacggatagcaaaggcaacgcgatcgtcgtccgccgtgtcccgctactctcgctcaccagcgacgccaagatcgccgccgtgcgcgacgaccatttacgcaacgaactggagaaggcagtggacgataccagcggaaaggctcgagaagaggcactgcgcaggttcgccaaggagcatccgatctatcgcgggatccgtcatgttcgcgtgctcgaaggtctgaaaaccgtgaagatcaccgacaaagacgggcgcgcctacaagggctataagggcgacgccaactatcgctatgatgtgtggcggctacccgatggcaagtggcaacacgatgttctgaccatgttcgaagcccatcagcccgactttgaccctgaagcgcgccgcccgcacccggcagcgaaacgcattctgaaacttcatcaaaacgacctcgtcgctcttgatcatccgcaacttggcgaatgtatctgtcgggtggtgaagtttactcgaaacggtcagctgaccttggctcgccataccgaggccggcaatctgaagaagcgagatgccgatcccgacgatccgttcaagtattacgcaccctcggcggggggattgaagaaagcgaatgcccgacaggtccggatcgacgagttgggcaaagtctgggatccgggtccgctcgagcgaggctgagaaattcttcataaacttgtgacagatagcgtccctgccatgcggagaacgctcaatggggatcgaacgggtcgtcgatattgccggggaccggcagcatatctcgctgaaacgtggcttcctgctcgtcagccgcgatggcgaagagcgcggtcgggtgccgctcgacgatgtcgcagcgctgatagtccacgggcacggatcgacctttagcgcgaacctggtgtcggcgctcgccgagcgcagcgttttcgccgtcttctgcaacgccaaacatgcgccgaccgcatgcctttggccactgagcggccatcacgcgcaaggcggcaggatgcgggcgcaggtcgcagcgaaactgcctctacagaagcgcctgtggcagcaaatcgtcatcgccaagatcgaaacgcaggctgcggtcctgagtgctaccggcggcgagggcgagcggctgcgccgccttgtgagccaggttcgctcgggcgatcctgataatcgagaagcgcaggccgcccggcactattggccgcgcctgatggggaacagcttccgccgcgaccgcgacgcggacggagcgaacgctttgctcaactacggctacaccgtgctgcgcgcctgcgtcgcccgcgcgatcgttgcgagcgggctgcatccaacgattgccctgcatcaccgcgcggcgcataatgacatggctctggcagatgatctgatggagccgttccgtccatacattgatgtcgttgttcgcggcctagtgatcgctgaacatgactccgtctgccccgaagcgaaagagaagctcaccagcttgcttgcgatggatctggatggacctcagggcatcacgactctggccgtcagcattcagcgagcagcgcactctctggccgacagcttcgcgaatgctcgaccccaactggttcttcccgccccaccttcaccgagccagttggcgagttttggacgggcatgatggcgagacacgaaacatattttctatcaggatatcgtctgatgtggataatgtgcatgttcgacttgccggtggacaccaagcccaatcgcaaggccgccacggatttccggcacttcctggtcgacgagggcttcgaaatgagccagctctcaatttatgcacgattttgttcaggcaaagaacattacgacacgcttgcgggtcggatcggtcggcatttgccgccgcagggcgatgttcacttggttggcttcaccgacaaacaatacgagaatatcgtccgattctcatcgcaaagacgtttgcgagcgcgaaaaagtcccggacagctcgcgctgttcgattgattcgcgccgctttttaagcgggggagctatagaaaaactatgccgatcaatcagttaccgatccacaggcatagcattcatgaaatcgcggtccaaccgcagcttctcccgcagcttcgccttgtctgcttcaggcatagcattcatgaaatcgcggtccaaccgcagccgagtatctgacgcaccgtttcgagatgctggcatagcattcatgaaatcgcggtccaaccgcagcggcgcgctgaccaaccgcctgatcggcatcggcatagcattcatgaaatcgcggtccaaccgcagccagctggcccgcgacgtcatcgagacgatcggcatagcattcatgaaatcgcggtccaaccgcagctttatgaagaacccgtcgaagagttcgatggcatagcattcatgaaatcgcggtccaaccgcagcactggtgccgggaagaccatgacggcatccggcatagcattcatgaaatcgcggtccaaccgcagcgaaatcggtcccatcgaattgccgcgcagggcatagcattcatgaaatcgcggtccaaccgcagcgaaatcggtcccatcgaattgccgcgcagggcatagcattcatgaaatcgcggtccaacctatcccaggtgattgaccgctgggtaggattgcgtccaaacttgcacccgtgcagcaattcgcgtttcgtgtaacaagtcgattccagtgctagggagcccccgaatgaagaacccgatctgcgacttgttgggcatcgaatttccgctgcttgcgtttagccattgccgcgatgtcgtggctgcggtcagcaaggccggagggttcggcgtgttcggcgcagtcgcccatacgccggaaaccatacatgaggaactcgactggatcgaccggcacgtcggtggcaagccgtacggcgtcgatgttctggtgccagaaaacctcgcgacgaagggtgaagcggatacatcatcgcagagcttgaaacaaaagatccccgcgcaacatcaggcattcagcgacggtttgctggaggctgcggggatccttgccgaaaataccgcgccaggatcagagcatcacatgcgtgatcatcagcccttcgatcctgacaacgcgctcaagacattggaggcggctttcgaccatccgatcaagctgatcgcgaacgcgttgggtgtcccgccaaaatcaatgatcgatatgggcaaacggcatggtgtcccggtcgccgcgttggtcggtgccaaggaacacgccctgcgccaggtcgaggctggcgtcgacatcatcgtggcacagggcacggaagggggcggccattgcggtcaggtcagtacattggtgctgatttctgaagttctgcaggcgatccggcctcacagtgatattcccgtgcttgccgccggcgggattatgaccggccagcagatggccgcctgcatggcgctgggcgctgcgggcgcttggaccggttcggtatggctggcgaccaatgaatcggaagcgagcgacatctttcgcgaaaagatgatcgcggcgaccagcagggatgccgtacgggtggcgagccggacgggcaaacctgcgcgccaattacgttccggctggacggaagcctgggaaaacagccctgacagtcctggcgctctgccgatgccttacatgagtctcatcagcgaacccgcgctgcaagcggtcgacaaggcagcgcagggtggaaacgagcaggcgcgcgatctggttacctacttcgtcgggcagggcgtgggcctggtagattcggtgcgcggcgccagtcaagtggtgcaggatttcaagatggaatatctggaagcaatcgaaaccctgaacgcttcgatcgaggattgaacgtcaattctccggggtcggttgtcagtcgggcaaggcgtcctcgccgcgaacttcttgacgagcgaggccgccatttacatcgacgataatgaagcgaagcaggttcagcgaagagcacaacatcgcggtttcgaaggaacaggagactgggatgccgacggcggaagtgtgccgccgccacgggatcagttccgccacgtcgtgcaagtggaagtcgaagttcggtgggctggaggtgtctgacgcccgtcggctgcggacggtcgagcaggagaacggccggtattccgttgaaaaactccgcttggagaagggctgacctgctgattcagtgattgtcacgggcaggagatatgctgatgataggcgagcggacggtgaacgttgcacgccgaagctgccggcaagcaagatcatgcggtctgtccacgaacgcgctcgcggcctggcccgcgatatcgccaccagtcacgcctgtctcgactcgcgccgccagcgccaacaacaacttcttcaacagaatagagccgggtgcagtcgctcagtttgattattgccgccaatgctttcgtgcaactgggaactctcaagggttccggaaatgcttcgagatatcgaaagacgcctcttgagatccttattcaacccaccgagagcgctgcaccattgcaaattatatcacctgatatatatttgcgggtgaaaggacctctcaccatgaacgatatggcattccccaccaggacgcaaaaggcgcatttgcgcccgaagcagcggatcaggccacgctcattcccgaaatctacgccagcattgattttgcggcacagcccgaacgattcacgaccgatccgaacgccaagaccgaaatgcctgagcggtttctcgacatgcgcgaggcgctcttgcagaatgaagagctggtttcgctcattcggcgctatactatgacgggggatcgcacggcggacgcctacgccgcattgatgccgaaacttgggttccggccgcttgtcgatatgctcgatctggcgtgcgacaaaggtatcgaggcggttgagaatgcacccgacgagctcaaggccttcatagcggaaatggaagttctgccggaatggcttgatcgcgaattggtagagcagggcgcgcggcaagaattgctacattatgtccatctcgcgccgcttgcgctgcggggaggattgctggcgacctttatcaataaatactctgccctgcccatggcgctaaccggtacgctcggcggcaagcagagcgcaaggcgatcatttgaaaccgcgagtttctttggctccacgatcatgcccggcgcgcttgaacgctacggcgcagggttcaaagcctcagccaaggttcgcctgatgcactcgatggtgcggctcaacctgatgcgcggcaaccgttgggacgccaaagtttacggcatccctatcccgcaggtcgaccagatgcctgcgggaatgttcggcatgtatctgatgtcgttggcagtccttgatgaagggcgcgaagagtttacgccgcaagaacgcgcgcgtgtcgaactctcccgttatcgttgctatctgctcggattgcccgagacattgctggccgaaacgccgcgttccattcgtgatatctggctgacccgccaggcgactttgcgatcggaatgggacgatgccacctgcggcgaactgctgcgcgccaccatgaatgcagaattgttcgatcaaacggagatcgggacgagaatacatcgctggtatgaagccggtttttcgcgcctgttcctgatcaagaatttcttgaatggcagcttcaggcgcgcgcagtccctgggtgttgatgttacccgcacgcataggattgccgccctgatcggttttgcctttgccaatgggcgcacaaggctgtttcaggccattgatggcgtaccggtgataggcaacatcgcctatcgaagccgggtgcgcaaattggcgaggcaactggaatcctatggtcatgccgacttcgtcacggatgcctcgaaatacacaccaagcgcgtgagatcggtgacaggattatcagcacaagccgagggacggggcgaatacgccaagtcgtctctgacccgcgagaatattgtcgctgcagcaattccgatctttggcgctcgcggacttgatagcgcggggacgcgtgagatcgctgaagcagccggcgtcaatcagccagcgatcaattaccatttcggctccaaggagaacctgtatcgggcatgtgcagaggcgattgtcgacagatacaggcaacagatgggctcgctcagcctcaatgcagcaaaagctctgtcagatggatgctcggctgatgaggcacgcgagcagctcaccacactgatcgaaagtcttaccgagttcctggtagccgatgaacactcgcaaaactgggtggggttcattgtgcgcgaaatgagcgagcagggtgacgctgcgcgcattctccacgagaatatctggcaaccaggcacagaattggttgctcagctgatccaggcagcgtgggacaattcaggtgagatgctatttgaagaggcctgcttggaagctctgctgctcgtctccaatctggtcgcctttaccaacggtcgaactgtttctatgcagatactggactgggatgcgatgggtccggttgagctcagtaaaatcaagcaggcgatggattttcgtgtgaaagacattgttggccggtcaagcagataacgtaaaaatacccaaactttttagaggtccgcttcccaactccagtttcaaacgctgcatatttcgccgaatttcagcccacttccgtgaggttcgccagccgccctctttcttgcaaaggccaccagcatgcaggtgaagcgaaaacgcaaagctggatgcagttactttcccttatagtatcatacaagatacgcacgctagttctgcaaatctgaaatccaactctcgataaggcatgctgcaaaagagacaagaatggcccaagtgacactcatcgagcacccactttcaccgtatgcacagaaggtgaaaatcgcgctgttggaaaagaacattccattccggattttggcgccaatgggtgcatctgaagacgagcagaagatcctccattctgccaatcctcgtggcgaagtcccggtgttattggacggtgagctttccatctacgactcaacgatcatcttggaatatcttgaagaccgctggccagaaacacctctgctgccagccggtgccgctgagcgagcccatgtcagaacccttgaggaggtggtagatacgcaccttgaggccaatagctggggacttgccgaggtaacaatttatcgaagagctactggtgagcgagctaatgcgctcattcaatacggcaagaagcagatcatgggatggttttcctggcttaaccgagagcttcgtgaccgccaatattttaatggtgagacattcggttggggcgacatcgtagttgcgccctatgtaaacgatgcagcccggttcggcatcgctcccgatccgcaatccaatttggccgcttggctggcacgtatcaaggagcgcccatcggttacgcagacctttgctgaggccaaggcaggcgagctcaaccccgcttttatgaccgctgcattggcggctggcttcaagcgtgaatatcgtgatcatcgtctcgaatggatgatccgcgcgggcgcagtagatatcgtgcaagcagggttggcccacgagaatatccgcttcaccgaaacattctgggaggagtaatccatgactccgattctgcaccactatccccccagcctcttttcagagaaagtgcgcgttcttttcggatatctcgaacttgaatggaaatcggttatcattccgccgatcatgccgcgccccgatcttgttccgctttcaggtggttatcgcaaaacaccaatcttgcaggtcggggccaatatatattgcgatacggagattatttgccggcaccttgccaaaagggccaatgacgcaaccgtctatggtcatggtttcaatgccgagcgggtcgcgcgctgggccgacactgaacttttccgcattgtcgtggcgctcaactttcgccccgaagcgatacaagcgcagatgagccagatgtcggctgctggtatgaaagcattccaaaaagaccgtgcggaactgtcggctggttcgcaacagattcggttagacccttctgctgctgaagcgcagttcaaaggattgttgcagaacctggaaaattctctggcggccaaattcctgtctggcgatattccgtgcattgcagatttcagcctctatcattgcctgtggttcgtcggtgagaacatcgcaaatgcgtcgattctggaatgctggcccaagatcaaagcgtataggcagcggatggcaaatttcgggcatgggaagtttacccaaatttcctcccaggaagcgctcacagaaggcaagaacactgagcccgctgtaccggccaacgcagaagtcgaccaaagcatcgctggtgatctgcgtgctggcgattccgttaccatcgctgccaatgattatggccgcaatccaatcgcaggcaatcttgttagctggtcagcgaatgaaatcgtcatcttgcgagaggatcccgaagctggagcaatcatgattcatgcaccaaatagcggctttgaagttgctgcgagggttaattgagaatcgccaggatgcctgcgctgtaatttgtgcattccgcccaaattgatgaaggtgtcccggcccaaagcatccgatttccagcactgatgcgacagacattgtagtcggcgctgcccataagtgcattcatgccgttgagtgaggcgatactgatgacctgccccagccctgttcgcgcatctgtcggcggcaagctggatgtccgcttccaggagctttgaactttgccgctaacgtctgaaagtgggcgcgaagcagtcatcaaggtagttcgatcaaaactgcccaagggttcgagttttcatcttcatcctttagggggcaccaaagaatttccatgatttctgcgccctgcaatccgttctgcctcctttatgacgaacttggccggttgaagtctgccgggcggcggagagtgttgcgtcgggcggccgggatcgatttctcttccaacgattatctgggattggcggcaagtccgcgcctgcgtgaaacggcaatcgctgccttgcgcggcggtatccccgtgggtgcgggcgggtcgcggctgcttcgcggaaaccatgcagcccatgaagcgatcgaggcgcaggctgcacagtttttcggcagcgaggcggccctgtttcttgccaatggctatgcggccaacatggcgctgttcgcggcccttccgagggctggcgacatgatcattcacgatgcccttgttcatgcgagcgcccatgacgggatgcggctgtcgagagcggaccgtgccagcgcgaggcataatgatgtgcaggcattcgccgatcatatcgcagcctatcgcaaagccggcaagaaaggcacggtctggatcgccgtggaaagcctctacagcatggatggcgacaaggcgccgctgggcgatctggcagagcttgcggatcgtgaaggcggtgtgctcgtcgtggacgaggcgcatgcgaccggcatcttcggggacagcggcagaggtctggcacatcatctggacgggcgcgccaatgtcatcgcgctccgcaccttcggcaaggcgctcggctgcgaaggggcgctgatctgttgcccgcagatcgtgaaggacgcgctggtcaatcacgcaaggcccttcatcttctcgaccgcgccatcgcccttgtcggcccatatcgcgggtgaaagtctgaggattgtggccgaagaaccgcatcgccgggcagaactgcacaggctgatcggtcatgcctccgaacggctggtgccactgggcgtgacagacagcggatcccccataatgccgctgatcgtcggcgatgatgccgcgactatggacatggccggacagctgcaacatgcaggattcgacctgcgcgggattcgtccgccgaccgttcctgcgggcgaggcccgcctgcgtatctcgatcaccctcaacatcactgcggcggatatcgacagactggccgacaggctggagcaaatcgcatgagaacattggttattgcgggaaccgataccgatgtcggcaagaccgtcttcgctgcggggctggcggcggcgacagggcgcttctactggaagcccgtgcaatccggtaacgatgatggcggcgattccgccacggcgctcagtctgggcgtccccgccgatcgcatcctgcccgaagcctacagcctgaagacaccggtctcgccgcaccgggcagcggaaatcgaccgcgtgacgatcgagcaggagaggctgaaactccccgaactgccctgcatcgtcgaaaccgcgggcggcgtgctggttccgctcacgcgcgatacgctgttcatcgaaatcatggcgtggtggcgcgcgcccgtcattctggtcgcccgcaccgcattgggcacgatcaaccatagtctgctatcgcttgaagcgctgcgggcgcgcgacattcccgttctcggcatcgctttcatcggtcctgcacatcaggatagcgagagcaccatctgcgacatgggcaaggtgaagcgcctcggcagacttccgtcgctggaggatctgacggccgaaacgctcgggtcggctttct

SEQ ID NO: 3030 - DNA, 19412 bp, synthetic construct
  misc_feature 1..19412: note = Synthetic
  source 1..19412: mol_type = other DNA
ggctttcaagacttctgcagcactttccccggcctcttcatgatccgtcatgcgcagaaagaaagggccgggggttccaatgtcgcggtccgaaacgaacggcatccattcaatctgttcattgggttgagtgagcgcgcgccacactttctcgggtggatgggcgaggttgcgccggaaaatcaaagttgcttcgccgtcaccggtctcccggctgacctcggccagtgggccacacttaaaatccttgcgccccattcgatcagtcctccatcgtgtcgagatgccgctccagggcatccaacgattttgtccacattgcccgatagggggccaaccattcgtcgatggccctgatccgctctggctcgagccgatagatccgccgttgtgccgcaaccttgctgctgacgaagccggcctcgcgcaacaccctcaggtgcttcgagacactgggctgcggcagatccagcctgtcgacgaggtctgtcacgctggtttctcccaaacgcagctggtcgagaatgttgcgtctcgcgggctcggcaagaactgagaaaggatcttggtgcatcgctgcaatatgccgatcaaggtatatacctgtcaaggcatacgacaggcatcgcttcatgaatgcgcgagaggaagcccggttggctgttccactcgtccttcggcatcaataccgccagaaatgatccgaatccgcgctgaggggcgggtagacccagtggtcccccagaagcctgcatgattccgaacggctgtgtgtcacttgatggcgattgcgcggacgcgtggcttaatccgcaagcttggtcagaaggttatccccggttgcacggctgatcagaaagctggccttgttcgatggaaggctgaggcgttgagcgcttttccacgctgtctgtttcgaccggttcacgctgaaagcgcttgctcagcgcaagggcatagcgcgcgggctggcccgcgatttcggcccgcgcggcatccctgtcaacgtcgtgcagccagatccgatcggcacagacgtgaacccggcgaacgggccgttgaaggatctgctgcacagcttcatggccatcaaacgtcattggaggccggaggaagccgccgggcttgccgcctggctggcgaggcgggattcgcgtcccgtgccatgcatatgatcgacggcgcattcggcgcctgaccccgcgcaaccggctggcaggcaaacgagacgatgaatggtttggatcgcgtgcccccgaaaaggggtgggtttccatttgtgtctcatcgcacgaaccattgccctggacgcaaatcaagttcggcatgacgcacacgcacccgagcagacctctcgtgcccaatctcaagcttgcgccattattctgctttcgcagataactttctccccatatctaaagctgagtgtttgtggccatctgctgtgagagcccaatgccatatctgcgagctgacacccactcgtcataggtgatggctgcgccgcctctccaccttgaacaggaggatgagggaagccgtcagcaggagagccgcattgaacggatgaaaggcaagtgccgctggtccccccgcgccgagcagaacctgcaggatatatagccccgcgaccagggcggcccaccagccgaacccgcgcagatgacgaaaggctgtggccccggcggcaagaacaatcacgggcagagcagcaaggccacccaacgtgccatgcatctcccaggaatggccaccaaagagggcttgtccggcaagcaggaactgccctgcaatcattacaggcagaagccgcgccgaccagagataaaccgcaggtgtgccacggccgaggtgctgaagtgtatcgtgcgacagtctggtcatggttcagactccctcattttgcaggattgaaggtgaaaccgcgaccggcgccggagcccacgcggcaaaacgcttcagcgccgtgacgtaatgtgcggcagcgtccgcaagggccccgtctgacaggtgccccgctgcaaacaggatgtgaggcgcatgccagggcagaccgcaccggtgggccatggctttcagcggcgtcatgatttcgctgatcgtatagtggttctgcccgccaggcccataggcttcggccacgttacctgcagtcgccgcaatcatcagcggcgtcccggccagccgggctccctctgtgctggccttgacataatacatgcgcgtcagaaccgcatcctgccatgccttgaggagcgcaggagacgagtaccactggatcgggaactgcagcacgatgcgggaggcgccgagcagcatctcagcttctgctgcaccatcggtaaacatgccaacctgacctccgggatagcgcgcctgcatgtcgatgacttccgtatcaggcagttgccgcgctgccgccgcaagggctgcattcgccctcgatttggtgatgtccgggtgaaagagaagaatgagagtcctgttcatgtctgcctcctttgtgtctgtgacgacttgagggtagaggcagctataaaatcactgcaattgatgatcgatatatgtcattatttgttccatgaatttaagatccatcgacctcaaccttctggtcattctcgacgccctgcttgatgaggcgcatgtctcgcgggcggcgcaaaggctgaacctttcacagcctgccgtttcgagtgcgctgcagcgttgccggcatctcttcggggatgaactgctcgaccggggaaagggcgggatgcagcgcaccccgcgcggcgacgccttgcgtgctccgctgaagtctgttcttgccggggtgctggatctgctcgcccccggtgatatccccttgcgggatgtggagcggactgtccgcatcacgaccgccgatcatccggcggccatgatgacaggcccgttgctggaagcattgcggcaatccgcgccggggatcacggccatcatccagccctggcatggatcggatgcagcggtctcggctctgatgaatggtgatgccgatctggcgatttccgtgttcatgtccgagccggaggacatcatgcgcgttacgctgctgcaggagacctatgtggttgccatgcgcaagggccatccggccgaaggccaactggatctggatacgtggcttgcctggcctcatgtcacggtttccggcaggggggatcggcggaccccggtcgatgcacaactggcagccatggggaggagccgccgggtcggccttgttgtgccaaccttccagcttgttccggatctgctgatgcgaaccgattttctggcgctgctgcccagccatagttttgcctggcagaaggatggcagccttgtcagcgcaacgccgccgattgccgttgatggctttccacttcatctcgcctggcacaggcggcagaacggcgatcaggtgctctcgcacgttacgtcaacgatccgccagattttccgcgggattgctgccggctgaagcagggcactcaggcttgttgtcttgccgcggatcccggccggccttatccggcccgctccatgccatccgtatccagctgcaatgccgcctgccacaggggtgttttcgtgaagacggcctcgctgaagcggaagtttccggcgtcttctgttttctgcaaaagccctgcccagcaaagcggacgcagaacgttgatgtagaggccgctcatcacgtagtcatgctgccaggcggggcctgattccggttcgccgaaaaacacgcggcgcagctcgccgccggcggcgccattttgtgtctcgacattcagaaggttcagaaacacatcccaattgaccagaggaacagcctcttcattgcgggcggacagactggcgtgattgaggtggaacaggaagaccggaaccatggtgcagaagatcagccccggacggcccgtgagatcctgagcggccttcgtcagcctgaattcacccttgtaatgacggccaagccgcatggcgagcatgaggccgtgcagcatatgcaacggcatgaaatcggcctcattcagcaccttgcagacggcaaaaagctcatctgccgtgtgccccggccaagcaaactcagccgccgcccaatgcacgaaggagcgcttgaaggccttggccggcgtcagcggaatgccgccgtgctccgccatccacccaagcgtcttttccaccccgcgcaccagcggcgacaggctgagcgccgggttccggtcgtccagatcgcaaaacgtgatcatgccggatgcctcccatgcctgctttctcgcagcatttggcataccacgagccggaatggaaacagcccaaatgaaaagcggccccggaggagccgcccagttctgctgcctctcgcgtttcagcgtacacgaatatgaaaatttcgtcttttatttcaaataattgtgaggatgccggcttatcagctcagacgcttcggtccagccgcccccctgacgggcacacctgccccgcaccatgcccgcccccgcgttcgcgcgggcgggctcgctgtgtcactcggcaggtgccgagaagagcaggccggaggagctggagcgggcggcaagggccagagctgcgaccagcagccatcccgcagaaatagccccaatccaccagagcgagccggagggcgcaatgacggctgtcaggcccagcgcgccgatgaccgcccgtgactgaagcgacagcggccgtccgcaccagccgccgaaggcaatggcccatagcgcggtggatgcaaagagcgccagaccgcccagaatgatctcggccgcagtgccctgccacaggattgccggatcaaagatgaagctaaagggcacgaagaaggccaccagcgacaggccgaaggcagagaagctggttttcatcaccggcgctttgcccacggcagcggccgcaaaggaggcaagagcgaccggcggcgtcaccatggacagcacacagtagtagaagatgaacatatgcgccgcgaggggcggaatgccgagatccttgatggccgggacgaacagcaccgcaccgatgatataggccgccaccgtcggcaggcccatgcccatgatgatgcagcccaacatggccagcagcagggaagcaaacagggagccctcagcgaccgatgcgagggaaccggcgaacttcagtgccagattggactgcaccgccacggcaatgaccacgccgatgaccgcaatcggcacggcaacctccgcagcctgccgcggcgcttccttgagcgcctcggccacagccttccagctgtagcgcgtgttcttgcgcaggaacggcaccacgaagcaggatgccgcggcaaccacggccgaataggcagcggaaaacccgctcatcagcgccccgatgaggatcagcggcggcagcagcaggtgcaggcgcgggccgatggccttggttgccgcaacctcatccgccgtcatcgcccgcaggccatcgcggcgggccatcagatccaccaccagaagcaatgcaacatagaaggccagggccggaatgagcgcagccagagccacctgtgcatagggcacattcagcatctcggccatgatgaaggccgcaacgcccatgaccggcggcatgatctgcccgcctgttgacgcgatggcttcgatgcccgcagcgcggtggtccggaaagcccgtcttcttcatgagcggaatggtcagaacgcccgtggagaccacgtttgccaccgcgctgccggagatcgaccccatgagggaggaggaaatgatcgcggccttcgcggtgccgccattggcccggcctgccatgcggatcgccagatcaatgaacagctgaccgccgccaaccgccgcataagccgcgccgaacatgatgaaatagaagatgaagttgaccgatgtcgacgtggtgatgcccagaacaccggctgtcgtcatggtggtgatttcgatggccgcgtccagatcaaagccgcggaaggacagccagcccggcagaagattgccccagaaggcataggcgatgaaggcgagcagaacccagaccagcaccatgccgaccgcacgccgcgccccttccagaagcagcagcacgaagacgcagccggccgcaatatcctgcggcagcaccggtgacacattttccatgcgggtggtcagccggtcatattctgcgaggtaataggcgccaacgcccagcgttgccaggatcagcgctgcatccacaagcgcccttggaaaggtgctgcggccatccctctgcaagggcgaccagaggaacaggaggatcagcgcaatgcagacatgggccggccgctcgaacagcggctgctgcggcacaagaatgatccagagctgaaacaggatgaagaagacacccaggacgaaccgggttgaactcacgaccgagcggacagacagggcttgcatttttcggacctcctcccagggcgcgaacagacaggtggccggtgccgggggcggcaccggctgcggcggacttacatccagccgcgttccttgaagtagcggacggcaccgggatgaagctcgatcccgaccgcctcgggcttccaggccgtctccggcttgaactgcgcccaggccgcgtgggatttcgccagaacctcggcattctcgcagagggtcttggtgatcagataggccttctcctcgtcaagcgaggcatgggcgaccagcatggtgcccaagttggcgccggccgttgcgccggtctggccatcgaaccacgggccataggtgcccgccgtcatgccgctggccgccatcacctccagtgccttctgcgggatgtcgaggaaggccatcggcgtggtcagggccacttccgaaatggtcggatgtcccttgaccacggtgtcgatgtagatatcggcaccgccgttgcgcagcacatcggggatctgcggcgtatcgagctgaacaatgtcgccgccatccgccttgattttctgcgcactggagcccagcgcctccaggatcatgtgtgccgcgggcaccgcgctggaaccggccggcttcatcaggatacgaaccggcttgccggaggcgagaatggcctccagatcgcttgtgcccatctggtccacaaaggccttgcgtgcgatcacgccgatatagacatcgttgagcccgcccaccagcgcccggatatccggtgcggaggcaccttcatagaccggatgcccgtcgcgggcccaaaccgccgaggccacattggatagggcgatctcggctcttccggcctgaaccaccatgggattggccacgccgccgccacgcgccacaacctcaaccgaattcggcccaagcaccggctcgatcatctgttccagagtggctgcaaagacataccacgaggtgccttcgcgcatggcgccgatgcggatgtcctgaccctgggccagcgatccgaaaagaaccgcggcggcgagtgctccggcaccggccttcaggtgcctgctgacaaacttgatcatgtctcctcctcccttgctcccctgaggcaaagcccccgcgcctcaccgcgggggctttgtaccttattctgccgccagaagctgctgatcgacgcggccgatgccggccgcctcgaaggctgcgaagatttcctgctccgccttttcgccaaggtccttgagcggctcgcggatcgtggcgtgatcgagaacgccgcgatggacgaggccgagcttcagcgccacggtgccttccatatgcgaaccgcggtgatagacggcacgggtgacgggcagaagctgctcgaagatcttgcgggcttcggggtagttctgcgccttgccggcctcaatcaggtcgatgagaagttccggggcgatgttgccatagccgaccagcaggccgtccacgtcgaacatggtcggcagcagccattcgtcatggcaggacaggatctgcagatccggattggccttcttcagctgcggaatttcgacgtaccagcgcttcatgttgcgcacgccgttcttcgtggcgacaacgccttcctgcgtggcgatttccagctgggtgtccagatcatagctggccttggtggcatcgggatattggaacaggatttcctgcaggccggactcctcccagatggccttgtagcggctctgcggagcacccttctggtagccgaaacgcagccagccatggttcggatacaccagcgcaccggttgctccggcggtcttgcacttgcgggcctcggctgccgccaccttggtgccttcgccggtgatgccggcaatgatggggatctggccgttcacggcttccacatagacttcgatgagcttcaggcgctcttcctcggtcaggaaggtgccttcaccggcatggccaaggatcaccaggctcttgacgcccttcatcgaggccagccaccgggcaatgcgggcattggcggcgtagtcgacgttgccgtcacggtcaaacacggtcacgggggcggggctgaggccgcgcagatccatcgggttcattgagtttctcctcctcagactttgccgcagacagccgtccattagcaaagggaacgatattgggaacgttcccaatatccatttgatcgccggtgctgtcaagtggtagaacgtcaaaatcccggcgcgagggacagagggcgattcgatgaaaagtgacagacgcgatgtgacttcccctgtgcgcgtcacgattctggacgtggcgaaggccgctggtgtgtcgaaatccagcgtctcccgcttcctggatgagcgcatgccgaagtcggacagcgagacggcccgaagggtccggcaggtggcagcagaccttggctatgtgcgggatgtttccgcctcatcgctgcggcgcggcaagaccggcatggtgggtgtgatcgttccgcggctgacggatacggtgatggccatggtctatgaggccctgtcccgtgccgcggcaagagccggccttttcaccatcgtggcaacaacagaggacgagcccggcgccgacaaacgcgccgccgatgccctgctgcggcggggcgtggatggcctgatcctggcgacagcgcgcgatggggaggagctgaccggcgagctgatggaccggaacgtgccctttgtgctcaccctgcgcaccaacgggctgtgccggtcctccgttggcgatgacgcccttggcggctatctggccacgcgccacctgatcgacctcggccaccggcggatcggcctgatcgctggtccggcctttgcctcaagtgcaagaggccgcaccgaaggctaccgcagcgccatggcggaagcgggccttgaggtgaaccccggctgggtgcgggaatcgaccttcggcatcgaatcaggcggggaagcggcccgtgcgctgatgcagctgagcgactgtccgaccgccatctttgcgatcaatgacaacacggccatcggcgccatgtcggccctcagccgcatgggcctgtccgtgcccggcgatgtctcacttgcgggctataacgacatccccatcgtcagccacctgccgacgccgctgacatcggtcaaggttcccttcgaccagatagccaccgtcgccttcgagcttctggccgccgaagacctgaagccccaggacctcatccgcatggccacccccaccctgatcccccgcaagtcaaccgcaccggcgccgcaaagcggcaagtgaaccgccgtcagcaccggcggcggaagcctccgcagttcaggccacgctgcgatgctctgcacccatggttgcagaccgcccggggtaggctgctgcgcaaatgaaaaagcggcccccggaggagccgccttatttggtgctgtctagagcgtgttatcgaccagaccgcgatttctgaactgttaagtgtgctcaagttgcaatcagatctacagattgtcaagatgcaatgatgattcatgggctcatagaggttgaaattgcagcgtctgctcttctccttcgacatcggcacaaattcgatcggctgggccgttctggctctcgatggcaatggcgacccggtgcggattgccgatgccggggtgcggatcttttcggacgggcgcgacccgaagtccaaggcttcgctggctgaagcgcggcggatggcgcgggccatgtctcggcggcgggaccggaccttgcggcgcaagcgggcgacgctgcgcacgctggccgagattggccttatgccggacacatcctccgcacggcaggcgctgttgcgggagacttctgatccgaagtccagttcaggcctgctctcccgcaatccctatgccctgcgcgcccttgcgcttgaggagaagctgccgctcttccacattggccgtgcgctgtatcaccttggccagcggcggggcttcaagtccaaccgcaagacggaccgcaaggacaacgacaagggcaagattgcccttggcatcgaggagctgcacgccgccatgcggcaggacggggcgcagacctatggccagtggctcgcccggcgccatgcgctggggcagaccgtgcggctgcgctccggcgcgctggatctggagggggaaggctatgccttttaccccgagcggcagctgctggaggacgagttccaccgcatctgggaggcgcaggcccgtcattatccggacattctgacacccgaacggcgcgatcacctgttcacggtcatgtttttccagcgcccgctgaaaaagccgaaggtgggcaaatgctccttcaacaatcacgaagagcgcctgtcgaaggcgcatccgctgtttcaggagttccgcctctacaaggaggtcaatgagcttgagatcgtcgagccggacctgtcacacaagaagctgacgctggatcagcgcaatgcgctggtgaagaagctgcaggtcagccgcgaggcgagctttgccgcactgcgcaaggtgctgaagctgcgccccgaccagcgcctcaacaaggaaagcgaaagccggacgaagctgaagggcaatgaggtctatgccgtgctgagcgaccagacccgcttcggtccgcgctggggcaccttcagtcaggtggagcaatgggccatcatcgaacggctgaaggaggaggaagaccccgtccgcctgtttgcctggctgcgcagcgcattcggcattgaaggtgaacaggcggcggccattgccaatgtccacctgccggaaggccacgggcggctgggcaagacggcactggaggccatgctggaggagctgaaggcggaggtgatcaccgaggccgaggcggcgaagcgttgcagctacgatcatgcccgtctaggcggcggcagcgacgaaggcgaggacgagctgccgccctatcaggagatcctgcagcaccgcattccgccgggaaccaacaacccggatgatccctatgacattgaaaagggccgcttcaccaatcccacggtgcatatcgccctgaaccagctgcgccacgtgatgaacgcgctgatccggcgctatggcaagccggcgcagatcgcggtggaactggcacgtgatctgaagctctctgagcggcagaaggaagaggtcaaccgcaccattgcccgcaacacccgcgatgcggaacgccggggcaaaacgctggaagagaacgggattccgaacaccggatataaccgcaccctgttgcggctgtgggaagacctgaacccggctaaggttgaagacaggtgctgtatctacacgggcaagccgatcagcatttccatgctgttttccggtgaggtggacatcgaccacatcctgccctggtcccgcacgctggatgacagccatggcaacaagctgctgtgcctgcgcgaagcaaaccgggtgaaacgcaaccgggccccggctgatgtgaccgaatggcgggaccgctatgacgagatcctgtcccgcgccgcccgcctgccgaggaacaagcaggagcgcttcgcccccgatgcgatggaacggttcgagaaggctggcggcttcctcgcccgtcagctgacggacacgcaatatctctcgcggatggcgctggaatatctcgcctgcctgtttccggcagaagaagccggtgaggcaggggaactgaagcggcgcaaccatatccgcatctcaccgggccgcctgaccgaaatgctgcggcggaactgggggttgaacagcattctggcggacagccagctgggcgaaacggcgcaggagaagaaccgcaaggaccaccggcaccatgccattgatgccattgtcattggcgtcactagccgcagcctgctcaaccgcatttctaacgctgccggccggctggaggcgcagcagctggaaacgctggtgaaggcggcggctgcgacgaacaaaccctgggacggcttccgggaggatgtggcaaaggtggtgggcggcatcatcgtcagccacaagcccgaccacggcaccgctggccgcaaggccaaggacccggcccgccagcagacggccgggcggctgcacaatgacacggcctatggcctgaccggcgaaaccgatgcacgcggcaacaccattgtcgtgcggcgcaagccgttcctgtcactcacctccaaggacattccgtccatccgggatgaggccctgcgggcggtgctggagcaggcgctgcgcggcattcccgatggcaaggcgtttcaggcggcgcttgatgccttccgcaagcagaagggcttccaccattatcacggcatccgccatgtgcgcctgacggagccgctttccgtcatcggcatcaaggaccgggacggcagagtctacaagggctacaagggcgatgccaatcagcgctacgatgtgtgggaaacgctggacggcaagtggcatgcggaagtcgtgtccatgttcgacgcgcatcagccgggctggcaatcccgcttccacgcggaaaaccccaccgcccgccgggtgctgaggttgcagcaggatgacatggtggctttcgagcatccacgtgacggttataccatcgcccgtgttgtgaaatttggtctgagcggccagatcacactggctgcgcatgccgaatccggtgatctgaaacggcgggatgcgctggcggatgatcctttcaaatactactcgccgaccgcagggggcttgctgaaagtgcaatgccggcagatccgcgtcgatgcagccggcaaggtgtctgaccccggcccgcaggaccgggcctccagactgcaaaggcaatcaaagcgataaattttgatcttgtcgcttacaggttgatttacttgcctgtgccagccttggcgcatgaacagggtgttagacatttccagcgatggactgcacctcgcggtccatcgcggttttcttacggtttcggacagtggctccgagattggccggatcgcgctggatgatcttggcgccgtgatcgtgcatgcgcatggcaccacatggtccaatcatgttttcgtgcagatggcggagcgcaatgtgccggtggtgctttgtgcgcccaatcatgcgccggtttccgtggtctggccactggcaggccaccatgcgcagggcgggcgcatgcagacgcaggccgccgcttcaaaacctctcaagaagcagctctggcagcaggttgtcgccgctaaagtgcgcatgcagggccatgtgctggcctgcaacgggcaggaggccggagctttttccctgctggcccgcaaagtgcgctccggtgacccggacaatatcgaggcgcaggcagcacggcgctactggcaggcgctcatgggaccggacttccggcgcgaccagaacgcggaaggcgccaatgccatgctgaactatggctacacggtgctgcgtgccatcgtctcccgctccatctgcgcctccggcctgcaccccggccttggcattttccacgccaaccggggaaatgcctttcccctgtccgacgatctgatggagccctaccgccctctcgtggatcagctggtgctgaacctcatccggcaaggcatcaccggagtggaccgcgcggccaagcagcggctggctggactcgcgagctttgatctgcacacgccggacggcaccagcccgctgtccgtgcaggtgcagcggctgacccactccctcgcggtcagcttcgagaccggcctccccgttctcgctctgcccgccctgccccagcccggcgagttgcagacactcggcaggcctcaggagccagagccagatgctgaccgggaggacgtggaggagacatgaacaagcggaacctcagggccaacagcggcgcaacccatttgagcggatacaggatcatgtggatgctggtgacattcgacctgccggtcgagacgaagaaacagaggcacgcggccaccaaattccgccagtttctgctggatattggcttcgaaatgagccagctttcaaactacctgagattctgcagcggcaaggaaaagtttgacagctatgtccgccagatcgagcaggcgctgccggaatggggcgatatctacatcttccagttcacggaccgccagtatgaaaacatcgtccggttctcggatcaggcccgcaagaagcggaagaaaaacccggaacagctcgccctgttctgatggttctggccgttttgcgcacaggggactgcccaattccccttttgtttcaaggaattggacaggcacctagcttatcagttcagaaatcgcggtccagccggaacggatatcggatacgggaattgcggttggcgagcttatcagttcagaaatcgcggtccagccggaactgcgcatcgggtcgatgttgtccccgctctagcttatcagttcagaaatcgcggtccagccggaacataatcagccatttaccgtccccgtgccgtagcttatcagttcagaaatcgcggtccagccggaactatcctccagctcggcccacgcggggcgcaagcttatcagttcagaaatcgcggtccagccggaacggctgaagaagtcaagagttattggattaaagcttatcagttcagaaatcgcggtccagccggaaccgtcgccagcgcagtgtattcggtgccataagcttatcagttcagaaatcgcggtccagccggaacagcaacacactcacggaaataccctttcccagcttatcagttcagaaatcgcggtccagccggaactgttaggaaggaacccccctcggaaatatcagcttatcagttcagaaatcgcggtccagccggaacggcgctgcagattgccgactatctgacgcaagcttatcagttcagaaatcgcggtccagccggaaccgccgcccgcaaagcccttgaccttacccaagcttatcagttcagaaatcgcggtccagccggaactggaaccacgtcaagaacagaagccattggagcttatcagttcagaaatcgcggtccagccggaacgtctggagttatcgacaagtacgaaaaaagagcttatcagttcagaaatcgcggtccagccggaacgcaggactataaacgccgctccggcattctagcttatcagttcagaaatcgcggtccagccggaactgttcagacgtttttgagccctcaatcctgagcttatcagttcagaaatcgcggtccagccggaacaacgtcaaggatgttgacctggtggccagcagcttatcagttcagaaatcgcggtccagccggaacctgtccgcacccccttcacgcgcccgcgccagcttatcagttcagaaatcgcggtccagccggaacgtggcagcattcgtggcgcggcagtttggcagcttatcagttcagaaatcgcggtccagccggaacctggcaatgcggtgccgggctccacctcgaagcttatcagttcagaaatcgcggtccagccggaactggacaaacggcaacccggccaccggcgagagcttatcagttcagaaatcgcggtccagccggaactcgcacgtgtggccgcagcggatgctgtacagcttatcagttcagaaatcgcggtccagccggaacacaactcagcagtcggagacacaacctcagagcttatcagttcagaaatcgcggtccagccggaacaggtggttgccacgccccgcaaggtgcgcgagcttatcagttcagaaatcgcggtccagccggaacggcaggcgggatttgcggcgcaatatgggcggcccgtttaaatctggctaaggaaacgtaacggggctttcctgtcctgagggctcaacaataaccatcgggtaacgctgatgtttgattcacgccctcaatatgtcgctccgccacctcgccggatgcacttcaccgcccgggccgaggccttgaagatgcttgaccttggccgcacgatctttcacaacattcttggtgctccagcgaagagcggggtgatctgaagagaacatcacgcatggagcgcatctttttacaatccggacaggttccggacaggaaagatgcctaatgatccggagccttgccgggctttggaggagataccaagcgcggtggcgcgctcgccacgggccatgtccggcagcgctgtaacgcatctacgggaggactgaatgatcaaggaccttaacatcacgcgccgtatggctctggggctggcggctggcgccatggctcttggactggctggcccggctgcggcagaggtcaatttcgccggcaagacgatcgagtggatcattccgttctccgccggcggcggctccgacacctgggcccgtttcaacgcaccgctgctgacgaagtacctgccgggcaacccggtggttgtcgtggtgaacgagccgggcggcggctccaccaagggcaccaacctgttcgcagcccgcggcaagccggatggcctgatgatcctcggcacctccggctcgacccagttcccctatctgctgggcgacccgcgcgtgcgctatgaatacaaggactggaagatcgccatggccggcccgaccggcggcgtcgtctacaccacgccgaagctgggcctgaagggcccggaagacattgccatgctgaaggacaaggatctggtctatgccagccagggcgcgacctcgctcgaccttgtgccgctgctcggcttccgcctgatggacttcaaggtgcagcacgtgttcggcttcaagggccgcggtgatggccgcctcgcctttgagcgcggtgaagtgaacatcgactatcagacctcctctgcctatctgaagaacgtgcagccgctggtcgatgcaggccaggccgttccgctgttcagctggggcgtcctcaatgaagcgggcgacgtggtgcgtgacccgaccttcccggacctgccgtccttcgtcgaggcttacgagaccctgaccggccagaagccgtccggcccggactatgacgcctacttcgccttcttcaccgccggcttcccggcccagaagatggtgttcctgccgaagggcacgccggacgagatcgttgccgcctaccagaaggccttcgaggacatgaaggctgaccccgactatcaggccaatgcagaggccgttctgggcacctacgagcaggtcaccggccagttggcccaggctctgttcgagaagggcacgaccattgctccggacctgcgcacgcaggtggccaacatgctggcggccgactacggcgtgaagctgggcgccgaataacgcctcccctcgccttgcatcagacgggccccttccggggtccgtctctcatctttttgtggatgccgcttccttggcggcagcgcggcccctgacggggctgtatgagcccggcgcaccgggcattgctcaggcctctcttgccttccgggcgcctgcagcctgagcctgccggggcatgatacgcccgtattgctgcgccatggcataacacggaagcacccgccgtgattgacacgttactgtctgcgcttggcacgcttttgtctttccagcatctgttctacatgctcatcggcgtgtcggtcggccttgtgatcggggtgatccccggtcttggcggcatcgccgggctgtcgctgctgatcccctttctctatggcatgaacgagatcagcgcgctggcgatgctgatcgggcttgtcgccgtgatcccgacctcggacacgttctcctcggtgctgatgggcattcccggctcctccgccagccaggccaccgtgctggacggctttccgctggcccggcaggggcaggcggcgcgggccctgtcggccgccttcatctcctccatggcggggggcatcttcggtgccatcatcctgaccggctttgtcgtcatcgcccggccgctgatcctctccttcggctcggcggagctgttcatgctggcgctcttcggcctgtccatggtggcggtgctggccgggcgcagccttgccaaggggctggcggcctgctgcatcggcctgatcatcggctccatcggcggggcgccggccaccggcgagttccgcatgatcttcggcttcgactatctgtatgacggcattccgctggtcatcgtcggcctcggcttcttcgccattcccgagatcgccgatctcctgcgcaagaattccgccatcgcctcgggcaatgcccttggctcgggctggttccagggcctccgcgactggtggggcaacctgtggctgtccatgcgctgttcgggccttggctgcatcatcggcgccattcccggccttggcggctcggtcgtcgactggatcgcctatggccatgcggtccagaccgtcaagaaggacccgcagttcggcaagggcgacatccgcggcgtcatcgccccggaaagctccaacaacgccatgcagggcggcgccctgctgcccaccatgctgttcggcatccccggctccggcgccatggccgtcttcctcggcggcatggtcctgctcggcatccagcccggcccctccatggtgggcgcggacctcaacatcacctattcggtgatctggtcgctggcgctcgccaatgtcatgggcgcgggcatctgtctggctctggccattcccatcgccaggctgacccagatcccgttccagcgccttgcgcccttcatgatcgtgctgatctgctttgccgccttccaggccacccgctcgctcgccgatctcgtggcgctgctgtgcctcggcgttctcggcgtgctgatgaagcgcttcggctggccgcgcccggcgctgctgatcggctatgtgctcgccccccaggccgagacctatctctatcaggcgctgcagttcaacggctgggacttcgtcttccgcccgggcgtcatcgccatcgccctgatgacgctggcctccatctggttcggcctgcgcaaccgcatcga

SEQ ID NO: 3031 - DNA, 18749 bp, synthetic construct
  source 1..18749: mol_type = other DNA
  misc_feature 1..18749: note = Synthetic
ccccgcctctccagaccgctgcatgccgcgcggaaatacccacagattcgtcccgacatccgtcttccagtccatggagcgcccagtgatcacctgatcatcgacgccatgatagacaaagcgcgtacacgcctcggctgtcgaggaaaccagcatgccggtggacatgagcgcggcgatccaggtgatcacgcgcgaacgcttcttcgaaatcatgactttactccatcaattgcagtccgatattgccagacgattttagctggggaagtccaaccgactcaatgagttgattgattgttacttgatgacataaatagcggcgaacgcgaagggagcatgtcttgccgattcgtcctggtcggaaataccagcacctgatccacggccggggttgtgcctgccataacccgcaggcgcagcaagtgttggcgcgaatcgaccaggggttgtcgcgccgctccgttctgagtggaatcgcagcgagctttgctgctcccgcccttggccttgtcagccccgccttcgcgcaaagtcccgcaaaaccactgctgctccggaacgcgaatatcttcgatgggacaaacggcaagcttgtcgaaggtcaggacgtgctggtcgatggcaagttcatcaaggccctggtcgcatcctcggacccggtcgcggatgcggacgtgatcgattgcgacgggcgcaccctgatgccgggtatgatcgatgcccactggcattcgatcctcgccggcatttcgcagatggcggcgatgaccgcggatatcccctacgtccatttggtggcggctcaggaagccgagcgcacgatgttgcgcggcttcacgacggtgcgcgacgtcggcgggccgtcattcgcgctgaaacgcgccatcgacgaggggcgcatcgcggggccacgcatctatccttccggcgccatgatctcgcagacgtccgggcatggcgatttccgcatgcgcacggaactgccgcgcgcgccgcagagcgacctcagcacggcagagcaggcgggcatctcggcgatcgccgatggcgaggcggaggtgctgcgccgggtgcgcgagcagctcatgctcggcgccagccagatcaagatcatgggcggcggcggcgttgcctcaagctacgacccgatcgatgcgctccagtattccgaagccgagatgaaggcggcggtttctgcggcggcggactggggcacatatgtgtgcatccacgcctacacggcggccgccgtccagcgggcgctttcctgtggggtcaaatcgatcgagcacggccagcttgccgacgaagagacggtcaagcgcatggcggatgccggcgcctggtggagcatccagccttcctcgccgacgaggatgccaacgtctacccatctccggaacagcgggcgcagcagcagcggattgccgaaggcacggctcgggcggccgagttgggacgcaagcacggggtcaacatggcactcggcaccgacatattgttcaacccgaagggaacggcgacacaaggcaagcaactcgccaagtttgcccggtggtacgacaatgcggaggtgctgcggcttctgaccagcggcaatgccgagcttgcagccctgtccgggcagcgcaatccctatccggcgcggcttggccgcatcgaggccggagcttatgcggatattctcgtggtcgatggcgatccgctcgaagacatctcgttgattgccgacccggaccggacgatgaagctcatcatgaaggatgggcgcattcacaagaacacgcttgcggcctgatagaggagagggtccttgaaccgatttgctactgtcgtcgttctgtccctgtgtggtttgcgggcagcatatgccgccgacactgttgcgctggaagaaccggcgctggaggtggcgcgcccggcctgggcgctgcagatcacgccctatatgtgggcagccggccttgagggggatatatcgccgttccggcgcgctccgacgattcatgtcgacaagccgttttccgacgttatcgacgatctcaatttcggcggcttcgtcaatgtgtgggggcgctatgatcgcttcgtcctctcgggcgacatgatgtatgtcgatacgaccgacaaccatggcagcggcccgttgccggcgctgcagattccgggcctgggcatcacgataccgccgggcgccagagtcgatgcgaaggtcgacacgaaacagttcatggcaaccttgcagggtggctaccgcatcatcgatacgccgcagttcactctcgatgcgcttggtggcgtgcgcttctggcacatctcgaacgacgtcacggtcaccgcaagtcatcccgccatcggcagccgttctgcgacccatcgcgagagtttcggctgggtggatccggtggtcggcgtgcgtgccttccttccgttgacggaaaagctgtctttgcaggcgcaggcggacgtcggcgggttcggtgccggatccgatctcacctggtcagccctcgccaccgccaactatacggtcaccgagcacctttcgttgtcggcgggctacaagatactgaaagtggattacgatcgcggcggtcatgtctatgacaccagcttgagcggaccggttctgggcatgacctggcgcttctagggtcagggccctgttaccacgcccgaagggcggtgctatgtcttcgagacgatcagaggcaaactgatgctcgccgaaaggttggagacgaaggcgtttctggtgacgggttcagaatgcccccaatcccggcgcggcttatttcccggccatccttcaccacagctggagtagcagaaagtgattccatgtccgcaattttacggcctgccccaaaagttccaggtttgttctttcgcgttgttgcagactggcaatagtataacgcctgatgcaagttcgggcggtgtcgcgtcgagcgccaatgtcacgtttcggggccgctgcgcgtaatgtcgcccggagctgcgcaacttgcagcgaatcgtggttgcccggcaggatgacccagcgaatctacgtatgatgtgccatctcggtcagagcctgacgctttacatcaggtgcaggggtgtccgtgtcgaacgtgtcgcgcgcaagcaggatcgtctgccgttgggggcatgggcatgttctgcaagcttgccgatcacggcatgtcgcgcctcgcgcagcctggcgggcaggtcgctggtgaaccacccgaaaacgcttgctcagatacaggtctcccgaatggatgaaccggaacgtcatgggacacttgtacccagtttcgccatatgaacgcgagcccgctcgatagcttcatcgagcctggcgcgcgctgtcgctgcgagccgctcgacaccgagcattcgcgccatgtcgcgcgcgggatcgggtatgtccaccaaagctggattgtcgacaaccaccgaggcaagttcggccaaggggatatcggcgatcgcacgccgcgacgcttcgttcaccgacggacgataggccagaacgtccacaacgagtccccttttccagatgaacgcgctgctggactcgtttgtggtgtcgtagccgcgcaggtgaaggtcgatccgttcacggatgcgcccacccgtccgcagccagccatgcgctcgcgcaatgcgttgcgccagcacatcggccggcagcgggctctcagcgtccatcaccgcctcgatcattcccttgagcgtgtcgcgataggcgaattcatagaaaagctccggttccgccttgaacgtagagaggtcggctacacggtatccggacctatcggctggcatgcgttcctctgtggaggtttgcgatggtcggctggccgctgcgttcagggacgaaagatcaggcgatgaaacgagttcggtttcatctgtgatcggcgacggcgcgacctcatcctccggcggcaaatgcgcgtcgcggatctcttcggtttcccccagttcgtggcccatgtcccaatgcgtctcggctgccgtttctttggcagcgtgtcgctcgcgactttgctggagcaaggactcgagatcgtcgtgcaggcggtcggcacagcccttcgcgtcgaaccaccagtccgtcgaccagacccgcaggatgttccaccccaagcccctcagcacctgctcgcgcaccttgtcgcggtcgcgcgccgtggcggagctgtgataggtcgcgccgtcgcattcgacgcccgccagataggcgccaccaagatcggggtgcctgatgccgaggtcgatgcgcaagcccgagatgccgacctgcgggacaatcatccacccgcgtcgttccagttgcgcggcaaccgcttcctcgaagggtgagtcgaagccgccgaccgaccctcgatcctccgccggtagcgcgatcgccccgcgctcggcgtagtcaaggaaggccttgaggtgctggaccgctatatacttcgacttgctcggatcgacctgatcggcagtgaaaccggaaaatacgaccagttcctgcctggcgcgcgtcaccgccacgttgagccggcgctcgccgccatcgcggttcaaggcaccgaagctcatcggtggaggtttgcccgaggcatccttccagaaagcgatcgagaacaggatgacgtcgcgctcgtcgccctgcacattttcaagattcttcacgatggtcggctcgacccggtcctcggcgaagaaccattcgagttccggcttgtcccgccgggcagcgtcgagcaggtcgaggatcagcgactgctgctgcgcgttgaaggtgatgatgccgagcgtcgggcgctcccgctccggcatcttcagccagcgctccatgcgctccgccgcctctgcgacgacagcttccgcctcgatacggttggttctgctcttgcccttgtcgtagaccccgtggggaatcttgcgcaggctgaccgcccgatcctcgactgccggcgacgggaaggtcaccaatcggttctggtagtagtgatgattggagaaggcgatcaaggattcgctgcggctgcgatagtgccacctcaagtcgcgcaccgggatgccggatgctcttgcctcgtcgaggatgctttccagatccttctcgtagtcggcgatatcctcttcgtcctcgttgcggccgaagaaattggtcggcggcaactgcttggggtcaccgacgatgatcgtctggcgtgcacgggcgatcgcaccgactgcgtcccaggtcgtgatctgggaggcttcgtcgaaaatcaccacgtcgaacagtgactggtttggcggcaggtactgggcgatcgacagcggcgacatcagcatgcagggcgcaagcttcggaaaggtttccggcatcttgccgatcatgtagcggatggactggctgggcctttgcagttccatctggtggcgcagcaggccgagttcggagtgccggggaacgccggcgaccggcaggccgtgcgcaaccgcgctgatcacgcggcgggtcgcatgggtgcgcaccatgtcatcgatctcgcggaactccttgatcgcgttctcatgctggaagcgcctgaaattcctcaacaccggatcggtatccagaaccttgggcagccaccagcgggcgtaggccagcctgaatgcctggcgcgtctcgtcggccgcgaccgacccggcttcaagcatttcgatcaaggagccaagtccgttgtggacggcacgccgccgcgccatgcaccaggcagaccagtcacgcaggagattgcgcgcctcgaccagacccgtcatctgcccggcgatctcgccggggctggcctgcaggctgatcgcccggcccgcaacttcggagaaccgcttttgggccgcttccatgccctgcattgcggcaagcaaccgcgtgccgacttgccgcaattgatcgtgggggccgccacgcaggctgggtgcaacgacgcgcagcatcggcttgatttcttccgcgctcagtccgggcaggcgaagcgcgctacgcaccgcgcctgcaaggtcgagtatctgcgaaaccccggctatgtcggtcgccagcccctgcaccatcaatcgcttgccggctaacggcgtaccgtcgatgcttgccagatgttccttcatgcgacgcaaaagaggcaggtcgcgggccggatcggaagtgccgccgctggcatggccttgcagcagcttctggacctttcgcttccccagcatcgcgttcggccagaaggatgcgtcggcatctcgccactgacgttccagggcttccgcatcgatatcgcacacggcattctcggaatagaatgccgccgtgcctgattccgcctgccggtaggcttcgatcgcgcggcccagttccgtaagggcctcccccattaccgagaaatcccgatcgaaggcgatggacaggtcgaggccgctgcctcgatgcagcgctgtcgcgagcttcgcaagcgcggccatctcttccggtgaggtctcgttctgtcgcgtgagaccgagacaagtccggtagacggagccggtatcgcgcagcaattccgcggcgttgcgtagtgactgcgcagcggtcatcagagtatcctgccagcccgacgaccagtcctgtgcgtcgatgagatccagcgcgggatgacgctcgacggaggcgtagaccagcccggcttgcgctgccatgtcctccagcgcccgcagcgctgcggcatcgtgagcgtcccgctccggccaggatagttcgggtgacggagcgtcgcccgccttgagcgcgatgccgagcgcgagatagggcgtccagccattcggatatcgcttgtgcaaggcatcgacataggcgttcagctggtcgcgatgaatcctcagccgttcgttcacggccacccattcggaggtgtccatgccgcttccctgttcccatgccgccttgagctggctcaggaaatgcttgcggtccgccttgctggaatggagctcgatacattgattggcaaggccatgctcgcggaggcggcgataaacaacatcgagcgctgcggtcttctcggcgacgaagagaaccgtcctgcctttggcaagacagttcgcgatcatgttggcgatggtctggctcttgccggtaccgggtggaccgacaacgacgaaatcgagaccctctgctgcggctatgctcgccgcagtctgggacgagtcggcaggaagcagggatatgatgtcggatggcgcataggttagatccagctcgcgctcgtcgcgaaacgaggccacacccacaccctggttgaacgactgttccggcgtgtcgatcaggtggcgcacgacccggttctgacgcagtgcatcggtgcgctcgacgagatccttccacatcaggaatttcgcgaaggaaaaggtcgagagcgcggtctcgtcgatcacctccatgcccggaacatcccgaacggcggcgcgcatggaggcgagtacctgcggtacgtcgatgccgttatcgtcaaccggcaggtcgccgatgaattgcggcagcttgagttcgaaatcgcgctcgaggaactgcaacagggtggcattgaagcgcggttcatcctcatggaagcgaatggtaaaacgcgaactggcgctgcggcgctccaggcgaacgggaaccaggaggaggggtgcgcgatagctgcgttcgtcctcggccttcttcttccagcgcaggaagcccacggccaggaacaacgtgttggcgcccccttcggcgaagtcgttgcggacctgccggtgcaggtcgacaagccgcgcttcgagttgcctggcgtcgagcggtgagggaagctcgtcacgaagcaaggcttcggccgcgaagttgcgctggatatcgcggccatgcacgtcgcgatagagggccgcgtcgcgctcaccgagagggttttgctccggcagggagatgacgcggattgcagcgccttgcgcaagccggtcttccagataggcgacatcggtgcacaggaatggaatcgtcttcttcgagtccgggaaattcaggaggcgattgcgcagcgtcaggtcgagaagctttttctgccaccggtcgatgcgccccgcagccgtggtcggcttctgctcgaccatttccttcggcaactcattgaatgacggcggcaccggcaggggaagatcagcaatcggctgcgtttcttccttcagtacggcccttcgcagcggttcatgcgaggcgagcggcgtaatgccgccgctgcgtgcccggcgcacgtcgatggcggcgacgaagcaaggtgcctcctcctcggcaaggcgcggctcgagcgcctgttgtgccgcctccagggtcatcgccgggcggtgcgtcacgccggtcgtctcgaagacgatcaattcgcgcgatgcgagcgccttgcgcacttccatctggtccgtctcgatggcgttgccgaaggtgcgcttcgtcagccagacccccacggcagcatgcccgtcgaacatcaggatgacgggatgcagtcccgccgcctccagcgcggcggcgaaaagaagcgtggtgtcgaggcacgtcgccagcttgtcctcggcgatagtcgccggtcgcctgaccttctgcccccggctctcgaaactcgccggaggctccgcatagtggagccccatcgaagcaatcgccgaatagaccgaggcggccagcatgaaggcgcgtttcgggtcctgcgactgatagccgtcgagccccgaaggatggccgtgggctaccagtctctcggcggccttccgcaatagggaggagaccgtgggatcgttcggcatcacgaaggccgggagcaattgcgccatgtcggcaacaccgccccattcgtcacgtgcgagcaatcggacggcatatttatgctcgtccagaatatcggaaccggcgacaagccgaagtgtgatctcaccgcgttcagcttcgttaagtccagcaagatagccggcgtcgagttcgatcttccgatcgccgagcggaatgtgatcgccgggaatgacgcgatcgatcgtccatgtcttggggcgcaggaaagcgggagcagacgaaagctccaaccggagcgcctgtacctgacggtccgactggttttcgacgcctatacctcgaagtacggggatagcgttctgataggaagcataggtgaagctggatgcaatatcggcgaagattttcggtgactgcggtttctcggcttccgttgcaaaagtagttacatgtggttgatcttcagatgtcatggcgcccctcccgccacgcactatcgccactttatcgggaaaacgaaagttgcaatctgcttgggcgtagtagccacgatagaacgcagacgttcaagccggtgaagtctaagtttcacactgccttgcagatgatagcagaaatgccggcgtgcaagcctgtcttcacgcagttaagcggatatgcgggaaatcgcaccaacgtttcgcgccaaataaaaagcccacgccggagcgttggccttatttgttgcaacagtagttagaccttatcttgttaacggctgggctgcgtttttctgagcagagaaatattgcaaatttatacataatttacaatataaatctgcgcaagccaaatacaactatagactcttgcacgcaacagtctcgatgattgttgactacaatgcctgtaatcgccagcgtatgtgtggaccacccgccggacttcgcttcggatttttcgccatggactgcccgtcttggctagccggttctcggcgggtttggaccctgcctatcgcatgatatgtcgtgagaagtttagcggcttatgaaaactctgggactcgacctcggaaccgcctcgctcggctggtgcatgttggagaccagtggagagcctttgttccgcaatgaagggcgtatcattgacatcggcgtccgcatctttggggacgggcgcgtgccgaaatagggcgcctcgttggcggtcgaccggcgggcggcgcgcgccatgcggcggcgacgcgaccgctatctttcgcgccgggcggcgctgctgagggtcttgaccgactacgggctgatgcccgcggatgaagacgcgcgccggcaactggtgatggaaacgaacgacggcaagagcaaggatggcggaccgaaggcgcccggcaagcccggcgacatttcgaccagcgtgcacggcctgcgggcgcgtgctctgacggaaaggctgatgccgcaccagatcgggcgtctgctgttcagtctcaatcagaggcgcggatttaaatccaatcgcaaaacagacaggcgcgacaacgatcaggcaagatcgaggccggcgtcaaccgactcgccgacgcgatgcgggtggctggcgccgcgaccttcggccagttcctgcatggccggcggctggaaggcaaatccgtccgcgcccggctgcgtccggaaaaccggagagaacgcgaaaggagacggctacgacttctatccctcccgcgcagaactggagcacgagttcgatctggtctgcgaggcgcaggcggtgcatcaccccgagcttctggacgatgagcgcgttgcacatctgcgctcgatcattttctatcagcggccgctgaagccggtcatcgccgggcggtgcagctataaccagcacgaagcgcgcctgccgaaggcgcatccgctgtttcaaaccttccgtctctataaggaggtcaacgaactggcactggtgggcgaggaccagcaggcacgcaagctctccgtcgaccagcgcgacgccctgatccgcaagctgcgctcggcgaagacagctaccttcctaagcctgcgccggacgctcaaacttggatcggaattccgcttcaacaaggagagcgaaacccgcaccggccttctcggcgacgaaatccacgtctcgatgagcgatccgaaatgttttggcagccgttggttacagttcagtgtcgacaggcagtgggagatcttgtcgcggttgcgcgaggaggaagactcccttgaattgcacaaatggctgactgaaggctgcggtctgtccgacgatcaggcgaaagccgccgccagagtgcagttgccggatggcttcgggcgattgggcgcgacggcgctggaggtgctgaccgacgcgctggagcgcgagacctgtgacgacggcaccgtcatcaccgaggcggaagcagcccgccgctgcggctacaatcattccgacaagagcgacccgaactttcccggtcacgatctgctgccgaactatcaggaggtgctggagtggcacattccacctggcaccgggaatcccgacgatgtctatgacgtcttcaggggccgcatcaccaatccgtcggttcatatcgcgatgaaccagcttcgtcgcgtcgtgaacgcgctgatccgccgctacggcaagccggaccggatcgccatcgaattgggacgcgaactgaaactgtcggacaagcagaagggggagatcgaccggaccatacggaagaacacgcaggatgccgcaaagcgatccgcaaaaatcgaagagcttcgggcgtcggaacccagactcagtatgctctccgacaacggttataatcgcctgcggctcaagctctgggaggaattgaataaagatcaagctgagaatcgggtttgcatctattgcggaaagccgattgcgacgcgtttaatttttgatcagacccaagtcgatatcgatcatatactcccctactcaaagactctcgacgatggtgaaggcaacaagatactgtgccatactcactgcaaccgccagaagcgcaaccgggcgccggtcgacgtgggggaatggtccggccggtacgatgacatcctcgcccgcgccggcatgctgccgaagaacaaacgctggcgtttcgcccgcgatgcgatggagaaattcgcggacgaggagggatttctcgcccggcaactgacggacatgcagtatggcgcgcgcatggcgctgacctatctcgcctcgctctatccgacagaggaagcggatgccgagggcgtcttgcgcaggcacagtcgcgtccgcgcccttcctgggcggatgaccgagatgctgcggcgcagatgggggctgaacgaactgctgccggaccacgacatcgccgggagcgatacggtgaaggaaaagaaccgcaaggaccatcgccaccacgcgatcgatgcttgcgtgatagcctgcaccagccgctcgctaatccagaagatcgccacggcgtcggcggcgctggagcgcgaaggggccgagcgcgtggtggcggcgctttccgatccctggcccggtttccgggaggaactgcgcgcgaaggtgaacgcggccgtggtcagccaccggcccgaccatggcaccgtatcgcgcgccggctatgacatgggcaagggacagaccgccggcaagctgcacaatgacactgcctatgggttgacaggggagagggacgatagaggtaacgaccttgttgtcagccgcaggccgctctcggccttcagggcggcgaaggatttcgtcggcattcgcgacaggcagttgcgcgaagcgttgcaggaggcgacatacgggctggcaggccgcgacttcgagcaggcggttcataagatggccaggcaggaaaggctcggtggcaaggacaatccgttccggaacttgcggcgcatccgcgtggtagagccgctgaaaacgattcccatacgcgacaagactggcaaggcgtacaagggttacaagggcgattccaatcatcgctatgacgtctggaggctgccggacggcaaatgggtggcggaggtcgtgacaaccttcgacgcccaccagtcgagttggcaatcagcgatacggcaacgctatccaacggcgaagaagattctgtcgctgaaccaggacgatgcagtggcggcagacggcgacgacgggcggatcatctatcgtgtcgtaaagttcaacgcctccggacagatatacttcgctccgcataacgaggcgggtgctctgaaagcccgggacaccgacccgaacgatccgttcaagtatgtctcgaaggctgccagcgggctgcgggcgatcaatgctcggcaggtgcgtatcgacgagatcggccaagtattcgatcccgggccgcgcagttaacgaaaggtgaaatatttttaggattgcatgacaagctgtgcaatccttgatgcatggcgtagtcaatatttccaccgatgggctgcacttggcggtgcatcgcggcttcttgaccgtgcacgaaggccatgaggagaaaggacgcgccgcgctcgacgatgtcggcgcgagattgtcacttatgtcttcgcaataaactgttacccatatctccagggcgtacaaaaagatcgatggcgcacccgacaggattcgaacctgtgacctctgccttcggagggcagcgctctatccagctgagctacgggtgcctcgcggaaatatggagaaacttccgcgcaatcgggcaactggccgaccgatcccgcgcttcatagccgatgcgtcgacggtcatcaatgactgatttcgggtaaggatgacgttggtccgatcttgcggagcgcgatgttgcgtcggccacagcggtccagtcgggagcgacgcgttcaggcgatgatcgtcgaggcatcacctcaaaagaaaaaagcgcccgccggagcgagcgccttatctggtgctgtcttagcttgttaacggccagaccgcgttttctgaactgttacatatatgaaagttccacagtaactctgctttgtcaagcacgcttctattggagtttttggggtgaggtgataggtgattattgggggaatttactaggggaggggtggttatgcctttcaggcagccagtttcttacgcatttgacatgggcaccaattccattggctggtgcgtctttcggctcaatgccgcaggtcatcccgtggccattgctgatgccggggtgcgcatttattccgacgggcgcgatccgcaatcgaagacctcgctggccgttgcccgccgtgaggccaaggcagccgcacgccggcgcgaccggaccaagcgtcgccagaaggcgaccctgcgaacgcttgccgaatacggcctcatgccgggcgggaaggacgagcgtgaacggctgctgcgcgagacggccgacagcgccgacagaaatgcacccgccaacgacccgctcaacctgcgtgcccgcgcgctcacggagaagttgccgcttcaccacatcggacgcgcgctgtttcatctgggccagcgtcgcggcttcaagtccaaccgcaagaccgatcggcgtgaaaacgacaagggcaagatcgccattggcatagaccgcctgcgcgacgccattcgcgaggcgaaggccgaaacgctcggcgtgtttctggcatcgcgccgcgcccaggggctgcatgtgcgcctgcgtgcgggcagcagcgtcattcttgacgatggttatgatttctatcccgtccgcagcctgctcgaggaagagttccggcacatctgggacgcgcaggcggtgcactatcctgatgttctcaccgaggcgcgcggcgagcatctgttcaaggtgatcttctatcagcgtccgctgaagaagccgcgcatcggcagttgcaccttcaacccgctcgaacagcgtctggccaaggcgcatccgctgttccaggccttcaggctttacaaggaagtgaatgaactggagatcgtggcgccgtacctttcccaacgcaagctgacgttggatgaacgcgatgcgctgatgcggaggctacgcggcgcgaagacggcgaaatataagacgttgcgcaaggacctgaagctgacgccggacatgcgcttcaacaaggaaagcgaaaaccgcgtggatatggccggcgacgaggttactgcggcgctttcggccaaggggcttttcgggccgcgctggaacacgctcgccatggatagccaatggaaggtgatcgagcgtatccaggaggaggaaaatccgtttgtgcttcaccagtggctggtggaaacgcatggcctgtccgacgatgcggccgaggccgtggccgcctgccatctgccggaaggctacggtcggctgggccacaccgccttgtcgatcatgctggaggaactcaaggcggatgtcattcccgaggctaaggcggccgagcgcgccggctacaaccattcctatttcggtaccggtgaaattttcgatgaactgccgaaatatcaggaggttgttgcccgcagcattccaccggggacgggcgatctgggagacgagtacgatgtccggaaaggccgcatcacaaaccccacagtccatatcgggctcaatcagctgcaaagactggtcaacgggctgatcaggcgtttcggcaagccggccgaaatcgcagtcgaactggcacgcgatctgaagacaaacgagaagaaaaagacggagatcaatcgccgtatcggcgaaaacacgcgcgcggcgcggcagcgctcggaaaaaatcgcggaactccggaaggatactccagctctcgtcgacaatggctacaaccgcttgttgctgaagctctgggaagagctcaatccggcaaagccggaggatcgctgctgcatctataccggcaagccgatcagcatttccatgctgttttccggtgcggtggatgtcgatcacatcctgccctattcccgcacgctggatgacgggcagggtaataagctgctgtgcctcagggaagccaaccgtgtgaagcgcaaccgcgcgccttccgaagtgacggaatgggctaatcactacgatgagattctcgagcgcgccaaccgcctgcccaagcccaagcgctggcgctttgcgcgcgacgccatggcggatttcgacgccgatagcggctttctcgaccggcagctcacggacacgcaatatctgtcgcggctggcgcgcgaatatctttgctcgctctatcccgagaaacatgagcagtggcgggtgcgtgtcattcccggccgcatgacggaaatgctgcgtcgtaactgggggctcaacaaactgctgcccgaccacatctacggcgatgcgaaaaatcgcaatgaccatcgccaccatgccatcgacgcggcggttgtcggcgtcaccacgcgttcgatgttgcagagaatttccacggaggccgcgcggcgcgaggagcaggaactggaagatgtggtcaagggcattccggtgccgtgggagcacttccgggatgatttgcagcaggcgctcgacaacatcgtcgtcagccacaagcccgaccacggcacggttgggcttgatgacaaaggcaagtggcagacggcaggcaagctgcacaacgacaccgcttatggcctgaccggcgaagcggatgccagaggcaacaccatcgtggtgcgccgcaaaatgctgctttcattgaccgacaaggacattcccgcgatccgtgacgatgaattgcgggcgcggctctattcggcggtcggcgggctttcgggaaaggaattgcagcaggcgctgctcgattttgcacgcaaggatccgaaatatcgcggcattcgccgggtgcgggttacggaaccgctgacggtgattcccatccgcgacaaggacggcaatgtctacaagggctacaaaggcgacgccaactatcgctacgatgtatgggaaatgaaggatggcaagtggcaggccgaggtcatctccatgttcgatgcgcatcagaaggggtgggaatcgccggtgcgcaaggcaaatcccaccgcgcgcaaggtgctgagcctgcagcagaacgatatggtggcctatgagcatccgagcgatggctacacgattgcgcgggtggtgaaattcgccagttcgggtcagattgtctttgcccggaacaatgagggcggcagtctcaaggcacgtgatgccaatcgggacgaccccttcaaatatttctccaaaacgacaaatggcctgcgtgagataaaggcgcggcagatccgcatcgatgaaaccggcagggtttacgatcctggaccgcgtgatcgggaaagccgcatgataagcaaccaaaaattgaaaaccattgcaatttaggattgttttacctccgtgcgccagacttggcgcatggagcgtgtcgtcgatatagcgacagacggtctgtatctggccgtccatcgcggttttctcaccatcagcgatagtggtgaggaaaagggccgtgttgccctggacgatatcggcgccttgatcgtgcatgcccatggcacgacgtggagcaacaccgtgttcacgcggttggcggagcgcaatgttccggtggttttgtgtggctcgaatcacgcgccggtttcctgcgtttggccgctgcaaggccatcatgctcagggcgcgcgcatgcgggcgcaattggaggcgtcgcgaccgctgaagaaacggctctggcaggttgtcatcgtcgcgaaaatccgcatgcaggggtatgtgctgacggcgaatggtgccgaaggcggcggcttcgaccttctggcgcgcaaggtgcgctcgggcgatcccgacaatctggaagcgcaggcggcgcggcgctattggaagacgctgttcggcaaggagtttcaacgcgacaccgatgccgatggcgcgaatgcgctgcttaactatggctatactgtcctgcgggccacgctctcgcgtgcaatctgcgcggccggactgcatccgacgccgggtatattccactccaatcgcgccaatgcctttgcgctggctgacgacctcatggagccgtaccggccgctggtggatcagatcgtgctcaacctgatgaagcagggcgcccaaaccgtgacaccggaagccaagcgcgcgctgacgtcgctgacgacgttcgacctggagacgccggtcgggctttcgccactttcggtgcaggttcagcgcttcgtgcattctttggccctgagcttcgaaacccggcaggccgcgctggaactgcctggcatgccgccgccgcttgcccttctgggacttggggcaccggcgccatgacggcgccagccaaagcaaatatggggcccgctcatctcagcggatacaggctgatgtggattttggtgacgttcgacctgccggtggagacgaaaaagcagcgcaaggcggccacgaaattccgtcagtatctgctcgacatgggcttcgaaatgagccagctttccaattatctgcgtttctgcagcggcaaggagcagttcgagacttacctgcgcaagatcgaatcacacctgccggaatggggtgacatctatgtctttcagttcacggacaggcagtatgaaaatatcgtccgcttttccgatcaggcccgccgaaggcaaaagaaaaaccctgatcagcttgccctgttctagggccatgaggcgctttttctgcgccgtgaccgtcgatttttcctttgaaatcaggaagatcgacggtcatcggcttagcagttcagaaaacgcggtccagccgcaacgacccggcacgtgcagagcatctaccaggtgcttagcagttcagaaaacgcggtccagccgcaactgcgagcatgatcgacaacaacgagtccatgcttagcagttcagaaaacgcggtccagccgcaaccgcaggccccattcgccgatgaactcggcgagcttagcagttcagaaaacgcggtccagcc

SEQ ID NO: 3032 - DNA, 16238 bp, synthetic construct
  misc_feature 1..16238: note = Synthetic
  source 1..16238: mol_type = other DNA
cgtctcgcgcgtcccctcggtttccgaggggtccggcgtcggccaatgctcgataacgggcgcttgcagtccgcgcgcctcgaccgcctcgcgcgcctcttgggcaagggtcacgatgacatcgaaatgggatgccatcaactcatccatggtatggggcgtatggaccgacatgtcgacccccacctcgtccatgaccttgtggacgaagtgatcgaccttgcccgatctcacccctgccgagcgcgccaccagctggccgggaaaattcttgcgcgccagcgcggcggcaatgggcgagcgcaccgaattcatcgaacagacgaacagcacggtgggtaactggctttcgtcttccggcacgcgcgaggcatagggctggaccgcgcaaatgagggtgaacagccggcgggcggtttcaaggtccatcaccagcttgttgtcgagccgctcgatcaggagctgggcggcctggttgtgcagcccccgccgccccatgtccaccgcctcgatctgatgggtcgaggcggaccggatcgcctcgtaatagctttcgcggatgcggaaatagtcgcggatgaggctccggaacggggtcagcgaaaggtaatgcgcggcgatggggttgaaggtttcgggatcgcgcacgtcgagcacgatatggttgtggacgatcgaaaggtgcagcgcgtaaggccctttggccgtcacccgcgcggggtagaagcggttggaatcgatgaggtcgtaaatggctacgcgccactcgtggacctcgtcggggtcgaccgagatgatggtgttggggtcgagcgttaccgtgacgatcctgtcggtcttgggatcgaaaggccgtttgctcatgggtggttgagccttatcgagacggaccggccatgggcctcgaggctttcggtttcggccagtgtcaccgttgcgtcggccagttcggcaagcgatgctggcgagcattgcaggatcgaggtgcgcttgacgaaatcgagcacgcccagccccgaggcgaaccgggccgaatgcgccgtcggcagtacgtggttggacccgccaagataatcgccgatggcttcgggggtgtgatggccgacgaagatggcgcccgcattgcggatcttttcaagcacctcttggggcgcgtccagcgccagttcgacgtgctcggaggcaaaccggttggcgatgtcgacggcttcatcgagcgaggcaacgacgatgaccgcgccaaattcttcccagccggcgcgtgcgttttccggggcgcgcaatatggcgagctggcgctccacctcgcgcgttgccgcgtcggccagatcctgactggtcgtcaccagcacagattgcgcgcccgcgccgtgttcggcctgcgccagaagatcggcggccacccatgcggggttggcggtctcgtcggcgatgatcagcacctcggagggaccggcaatcatgtcgatgccgaccgtgccgaacacctgccgcttggcggtcgcgacataggcgttaccggggccgacgatcttgtaaaccggttctatcgtttcggtaccataggcgagcgcggccacggcctgtgcgccgccgacgcgatagatctccgtaacgcctgcgattttcgcggctgcaagaatcgcagggttgacctcgccgcgcggcgtgggcacgaccatggccagccgctcgacgcccgcgacccttgcgggcaccgcgttcatcagcaccgaggagggataggaggcgagcccgccgggcacgtaaaggcccaccgcctcgatggccgtccagcgcgcgccgagcgttacgccgatctcatcggtatagctggtgtcggcggggcgttgtttttcgtggtgcgccgtgatgcggcgatgcgctaactccagcgcggcgcgcaccttttcggggattgcggcgtaggcatcctcgatctcgtcttgcgaaaaccgcagcgtttccggggtgagcgtcaggtggtcgaatttttcggtcaactcgataagcgccgcatcgccccttgcgcgcacatcggcgatgattccggcaaccgtgtcgccgacttccaccgatgtttcgcgcttggaccccaagaggtcttcaaaggcgcgcgcaaaaccgggatcggcggaattgaggaaaacgggcatggatgtggaatcgggctctcagtccaaatcgtggcggggctgcgctttcgccgcccagacgccaccgagatcgcgcagccgggcttcgaggcattcaacctccagccgcaccgtgccaccaccggcaaaggtgagcaagacctctccgcccggttccgtacccgaaatgaaccgcacggcaagcagttcgagcacgccgtccttggcgttgaggtcaaagccttccgcctgggcggtttcgacgaagtcgaaatgcagccccgcgcgccggcgttcgccccgcccgcgcgtaccgcccgcctcccaggcatagcggttgatcagcatgacgaagcgccggtcggccttggcaaagcccatatcgcccacccgcaccactgcatcctgcacgtgggctgaaacgatatcgagatcttcgctgtccagtgccagcagcttgaggtcggtcatggccgctttcgcgatgtcttgagctttcatggcacacatctgggcatttgcgcgccaaagtgcaagcctgaaattgggcggagcgagcgtcgatccggagggacgggatggaggaccgtctatcccgcgatccgttcgatctgcgcgccgcagcggctgagcttgtcttcgagccgctcgaaaccacggtcgagatggtagatgcggttgaccaccgtttcgccgcgcgccgccagccccgcgatcaccagcgagaccgatgcgcgaagatcggttgccatgacctgtgcgcccttgagctccggcacgcctgttacccgcgcggtctgtccgtcgacgctgatgcgcgcgccgaaacgggccagttccgccacgtgcatgaagcggttctcgaaaatggtctcgcgaatactcgaaactcccgtcgagcgcgccatcagcgccatgaactgggcctgaagatcggtggggaaaccgggaaagggttcggtctcgatatcgaccgggtcgatgccgctcccgttgcgcacgatgcgcacgccatccgtctcggtccgcacctcgaccccggtccgcgccagcacatcgagcgctgcctgcaacagttcgggccgcgcgccgcgcaggagcacgtcgccgccggtcattgcggccgcaaaggcataggtgccggtctcgatgcggtcgggcagcacctcgtggatggcgccgccaagcgtttcaacgccttcgatcaccagcctgtccgtgccgatgccggagattttcgcacccatggcaacgaggcattcggcgagattgcccacctcgggctcgcgcgcggcgttctcgatgatggtggtgccctgggcgagcgttgccgccatcatcaccacatgggtcgcacccaccgaaaccttgggaaaggtgaccgtcgcgcccttcaagcgtccgcccggcgcgcgcgccacgacatagccctcgtcgatatcgatttccgcgccgagcgcgcgcaggccctcgagataaaagtccacgggcctcgtgccgatggcacagccgccgggcagcgagacgcgggccgtgccctcgcgcgccagaagcggcccgatgacccagaagctcgcgcgcatggtggagaccagctcgtaaggcgcggtggtatcgacgatgtcggacgcggtgaacgtgatccgctgcccgcccatatcggcatcgccccggcggcggccatggacggcgatgtcgacgccgtggttttccagaatccgttcgagctgcttgacgtcggcaaggcgcggcacgttgaccagaaccagcggctcctgggtgagcagcgatgcgatcatcaggggcaacgcggcgttcttggcccccgaaatggggatttcaccgttgagttcgtggccaccgacgaggcggatacggtccatgagctactccttggggccggggatcggcgtggatcgggaattgatcgaaagcgggtccagactggtaacgcagcgggggaaatgccgcaaggcgccgcctatcgcggttcagtcctcgtcatcggcctcgggccggggacgggtcttttgggggtgatcgggttcacgcgcatcctccatcgcggcggcgggggcatccttgcgggcccgcgcctgcatcttgcggcgcttgaggttttcacgaagctttgcggccaatctttgatcgcggtcggattttgccatttttacgaagttgcgtgaggcttgggaggattgtccaatgccagctttttgcccttgcgtccacagatggcctgtggcagtaacggcccgcattcgccccatctggtgcgatttcgcctttcgctgctgtagctcagtggtagagcactcccttggtaagggagaggccgacagttcaatcctgtccagcagcaccattcctccctattgattttacataacaatttgtgttttcagggtttttaggtccgcttgtggtacacacaggtggcgcacatggtcaaagctatgcccgcaccatacaaacacaagcgcaccggcgtctatcagtataggcagcgaactccgcgcgatatcctagaggatgctaggggcaaaaaggtttccgtcacggttgatggtactgtgcgtcaattgacgataggaggtgagcttaaggtctcgttgtccaccaaggacccccgagaagccaaggaacgtgcccgggaggttcaggaccaatatgaccttatttgggatagctttcgctccaatgaaataaccttgacgcataggcaggcggtggccttggccggggaagtttatcgtgattggtctgttcttgaagataaccccgggtccccggagctttggtcgcatattcgcgccttgaatgctgatgccttgattggcaggccacatctccatctgttgacgattcgccctgtggtggtggacccgttggaggaccgcttcggcccgtttgttgacgttgttttggagcggcatcatctacgggtgaccccggaaagccgtatggcgcttcttaatcaggtggccattgcggtccaagaggtctcgggcttgttagaacgccgtgccaagggggactatcgcccagacacgaatgctgaccggttcccctcatttgagccgccaaagtcctctgtggaattccgcccctcgaccgccatcaccttccaccaaatcatcgatgctgaggcagaacaccgtcgcttaggcttgggggcaaaataccagccactcgccacccgtacccaaagacagtacaaaacttacaccacagagtttgctgtgtttcgtggtgatgatggcgacagggcagacacggtgacccatgctgaactgaaggcatggaaggtgtctctactcactgacccggagcggccaaacgggccccggaccgtcaatgataaagtgggctccatcaaaacgatgctggggtggggcgttgaacgattccctgagagtagtgggctaaaacgtgctcttgccgcagttggcccgttagaacttcccgggtttacccgaaagccatctgatatcagtgcaattcggctcgatgaagcggcacatgtattgcgagcagcccgccgggaaactgactcaaggacccgctggctcccttggttgtgcgcttacacgggtgcccgcatcaatgagcttactcccttggagcggaaagatttctttgaaacagagggatattggttcttcaagatacgcaccaccgatacgcgtagtgtgaagaatgcgaacgcaattcggtatgtgcctgtgcattccgcgcttcaagctgagggattccgggcgtttgtcgaaggttccccccgggggcgtctctttggtcctaacgcggattcctatgtagggcggtggtttcgccatgagaacggtgcagggatcacacgggagggtgtctcccctaatcacggatggcgacatctatttgaggacctttgccgccgttaccgcgtatcagacagtgccgcgcggtatatcacagggcgctcgggcggcgggtccagcgaggaatacggtaaaaccttcgccatgctccccgggttagctcaggaaatcgaaaggattgaaccgttcatcatcgactagccagtcctagagtctatcggtataggccccggcaaaaaatgtgggatcgaatccacacccactttcatcatccctcccatctaaccagcatcctttccgcacccgccatatcctcccggagcctctggactgtcgggcgggttaacccggtggccttggcaattgccgatgccccggctccctgagccagcatgtcccgcatggttcccaactgctcccgcgtgaagctaggctttctcccccggtacttctgcggctccttggccctagtatccgctattccggccctctgagcctctttagtggcttccgcctgtgcctgtgcggttgcggccataaagcctatcagtgcgtctctaactgccatttgcacggggtctgtggtggcaccatcgaacgtcatgttgttgatgacggtgcgaacaataatcccttggcgcatgaactccctgatggtgtcggttacgtcctgatagttccggcccagccgatccacccagcggaccacaagaacatctccgtgccggagtttatcaaagaggcgcttaccctcggggcgctcggccagcttggtgctgacaccggataccccgtggtctgcgatgacttcatctatggcaaacccggcggcttccgcttgggtcctttggtggtcgagattttggtctgcggtggacacacgggcataaaggatagtgcgggacatggtggggttccgttcataagggttgtgcccatatgaattcatgcccacaacgcaatgtcaacccttatgggcacctttccagctatcaccggtaatgcccataaaggtataccctgtgggcaggcactccgttcccttctcaccttgatcaccacggtagtggagtctccacgctagcgaagatttattagtatttacaatggcttagatcgtgtgcaatgatcgcggcataggaatgaacgggtcccatctgacgggtatcggggggattccgatcaccagccctataacgaatatcgtcacacaggttttctcaaaaattcccaaagggtccccctagggactcctctcaccggaaacgagaaagccgctctataagaggagaaagcagcaatgtatgagaccgcccccgccatcccttatcggatcgatttctatggccctaatgggtcaatcgttcgcattgccaccgttcgcgctacggatgatctggacgcttgcgatcgggggtgggatagcttacccgaaggtgcggacgatttccaagtgaccgccttggatgatggtgccccatagaaagccctgtgactccaagaaatgtagtttcctatgatctcgccagtacaagcaagggtaagctggaaacacctgctggcgggacttgacgatttagtcaaaccgggaaatatcttcgggatgctcaggaaggggaaagcatgacgaaggtatacttggcatccaaccagattgaaataccataccaaacaatgaaagagctatcacaggcgggcaaactacggctgggtatgagcgaagacattgcgctcaaacttcagatggcgggaataaagccgaaagggaccacgtctgctgcctttagtttttacaagtggcttgccatcatcgccttttttgctggtatgtatttcgcgttcacaagtgggtggtggtggggaattgtcggtttccttgtgatggtgatgatttggaatggaaataaagcggggcacagggataatttgttggacgctggccagaatgatccgcaattttatgaacgggtcaggttgaagggcggatggatgtaccagatcgatgctgatgctgctgaggcacttcgcagcatctgattaagactgaagtgagagcggcccagagtgtccaaaatggacattctatagtggacactccggggtctctctttaggtcaatactcggcgtctatcgggtcttcctcaaagtcatccaccgggttccccaaatccagaatgccccggtatagggccggtgaaatctcttgcagtgccatcgtgactgcctcggctttcatatgaggtttatgcccgaggatcggcccgatggcctgcttgatctcattggttaattttctcatttcaccttcataatcgtaatcactctcggtctccccacgggccatctgctgaatttcataccaagacagtcccagtagttcctcccgtgtgtgccctaagtcgatgaccttgctgaccgcctttttcatctttccgacattggatttgcccactccgcccattgccgcaatctcccggagagacttgccagggaactggcagacatagaacacggcaaggctgttgcgttcctccagtgtcatcggcagttttccccgggtgttgaccctaccgacatgctcaagggcttcatccaaggttcccgtaatgaccctgacaggcacgttcccggtgaacctcaggctctcataggcgagaacccggtggtgtccgtcgagcatataccagccatcaccgccccaccatatgtcgagcggttccatggtgccgggggaatcctgaatggcccgcttgaggtcccgaatatgttcctcccggccccggcgattgccaaaggtgtcccgacgctgaaacacggtttcacacaccatgatctctcgaagcggcatccccttggcaggcactgccggttgcccggggttttcctctagcgcctttcggatatgggcgagaccatcggccacgctgtcaaacttcaatcgaacggtcttcatcagcatggcccgccgtcatccatgaaagcttctggacacaaccggcgcatatcctctaggtcaccactatagaccccggcggcagcatcattcgcgatcatgtctgccatttcattcaaaggattgcccgagtgccctcgggtccactcccagtgaacctcaaggtcttgcctgagggtatcgagaagttcccaaaggtccttgttcatcacaggcttccggtcactcttgcgccatcccttggctttccagcccgggagatattccaaggcacccttggcaacgtactggctatccgtgacaatggtgacggcggtataggaaaggtccttggcaaccctcagggcttcaatggcagcctgtagttccatccggttattcgtggtggtgttgtccttggcgcatccggctatagcagagcgtctaacaacggcatcacctacacattcttggatgatgacggcccatcccccgggtccggggtttccaaggcaagcgccatcggtggccagcacaaggtgcagaccttcgttttcgttatcgatcatgtttgatgattatttctccgggggttactcaggggtactcccggcatgttttcaaagtggtctatgtgtgagtgcggtggtggccgcttagggggcacagacggatgttggtctttcatccccttctatggggacacaatctaaacttggggttttaaataggccacataggtggtacacacgcaatgttagcggatggaaaaaaccctttaaaatcaatggtaacttggtgaaattcgacagttcaatcctgtccagcagcaccattttcccccgcttgccgacgaaaacaaaaagcgcatcccggaggatgcgccttatttggtgctgtcgaagcttgttaacagccagaccgcgttttctgaactgctaggcagtaaaataaacgtaacgcaatcttctcctgaaatcaacaagtaagcgctggttgcaaaattcttcaaattccgtgagtatttcatctcgggagaatttgactcgatgttcatgagcaggctgggggagctatgctggatagaacgcatttttccttcgatatgggcacaaattccatcggctgggccgttttcggactcgatgcggatggaaatcccaaccgcatcatcgattccggggtccgcatcttttccgatgggcgcgagcccaaatcgggcacctcgctcgccgaggggaggcgggtggcgcgggggatggcgcggcggcgggatcggtataaacggcggcgcaaggcggtgctgcgggttctggccgaatatgggctgatgcccgatacgcccgaagcgcggcgcaggctggtggccgagaccaatgaccgcaaaagcggcgttccgcaggacgtttacgcgctgcgcgcgcgggcgcttgatgaaaagctgccgctttttcacgttggccgggctctttttcacctcaaccagcgcagaggcttcaaatccaacaggaaaaccgacagccgcgacaatgaatccggcaagatcgccaccggcattgcggaactcgacaaacaactcgcgggccgcaccctcgggcagtatcttttcgagaaacgcggcactgaccggcaagatcacggccgggtgcgcgtgcgtcctgaaccgcgcgtcaatgaaaagggcaaggaagtcgaggtttacggcttttacccccagcgggcgatgctcgaaaaggagttcaacgccatctgggctgcgcaggcgctgcattatccggacgttctgaccgaggagcggcgagagcatctgttccgcgtcatgttttaccagcgccccctaaagcccgccctcgtcggcaaatgcagcttcaaccctgccgaaccccgcatcgccaaggcccatcccctgttccagaccttccggctttataaggaggtcaacgagctcaggatcgtgacgcagaccaattcccaaggcattccgctgaccctcgagcagcgcgatctgctggtcacacttttgcgcacggtaaaggaaagcagctacaaggccctgctgggcaagatcgtcaagggccagcccgatgcccgtttcaacaaggcgagcgatgcgcgcgacaagatgaagggcgacgaggtggccgccgaaatgagccacaagacgcgctttggccagcaatggttcgcgttggacgagaccgggcaatgggccgtgatcgaaaagctgcgcgagacagacgaccccctcgaactcaacgcctggctggaggccgaattcgggttcgagcccgaacggcgcgatgcggtggccagcgcaagattgccggagggctatggacggctgggcgagacggcgctgcgttcgatgctcgatgaactcaaggccgacgtgatttcggaggccgaggcggcaaagcgcgcggggtatgatcacgctctggcccggctgggcaagggtctggaatgcctgcccaattatcaggaagtgctcgaacgtcgcattccccccggcaccggcgagcctgacgatccctatgacatccgcatggggcgcatcaccaaccccaccgtccatatcgcgctcaaccagcttcggcgggtggtcaatgcgctgatccgcaaatatggcaagcccgggcagatcgccatcgaactcgcgagggacctcaagctctccgaggagcagaagcgcgaggtgaacgccaggatcgcaaaaaatacgcgggacgcccagcggcgggcagaaaagcttctggaaaccggggttgaaaacaacggttacaaccgcgcgcttttgcgcttctgggaagaattgggcgagcagccggtcaaccgcgtgtgcgtttattgcggtggcgccatcggcatcgaaacgctgttttccggggtcgtcgatatcgaccacatcctgccgtggtcgaggacactcgacgacagccgcgccaaccgcattctggtgcacaacacctgcaatcgcctgaagcgcaattttgcgcctttcgacgtgccggaatggaaggccacttaccccgaaattctcgagcgcgctgcaaagctccaccacagcaagcgctggcgtttcgcgcccgatgcatgggagcggtttgacggcgaagaaagctttcttgcccggcaattgaccgacacgcaatatctggcccggctggcgcacgaatatctggcgtcgctctattccgacgaggaatcggacgaatggggggtcttttcccgccgcaaccacgtccgcgtcgtgcccgggcggctgaccgagatgctgcgccgcgcgtggggcctcaattcggtgctggccgaccacaaccagaagaaccgcaacgatcatcgtcatcacgcgatcgacgccatcgtcgtaggcgtcacgacccgcgccatgctgcaaaggatttctcacgaggcggcgcgcggtgccgatgtcggctccgaggacgcgctgcggcgcttcgatccgccgtgggaggattttcgcgaggacgtgcaggcggcggtcggccggatcaccgtcagccaccgccccgaccacggcacgctgccaagcaaggacaaacccggcagtacggcgggccagttgcataacgacacggcctatgggctgacgggtgaagaccgtaacggcgtgcccatcgtcgtgcggcgaaagcctttcctttcgcttgaaccacgggatcttccctcgatccgggacgatcagttgcgcgactatctggagcacgaaacctatggcctgaccggcaaggatttcaccgaggcattgcagcggatcaaggaccgggaccccaaatacaagggcattcgtcgggtgcgcgtgaccgaagtgctcaatgtcatccccatcaccgacagttcgggcaagccctataaggcctataagggcgacgccaatttccgctatgatgtgtgggaactgcccaacgggcgatgggttcatgaggtggtgtccatgtatgaggcgcaccgttcggactggacctcaaagattcatgcggaaaatcccgcggcgcggcgcgtcctcagcctcaagcagaacgatcttgtcgcctatgagcatcccgaaacgggcctgacatatggccgggtcgtcaaattcggccagagcgggcagatgacctttgccgcccacaacgaggccgggccgctcaaggcgcgcgatgcggacagggacgatccgttcaaatatttctacaaatcggcgggcgcgatgaaggatatcggcttgcgtcagatccgcgtcgacgagatcgggcaggttttcgatccgggcccgcaggacagagcaagccgaaaggcaagggcgcaggggccgttaaggtaaacaaacgataaatctgtggacggcccgcccatcggctattctcgcgcccatggacaggatcgtcgacattgcaagcgaggacgtgttcctccacgtgcaccggggctttttgctggtcgagcgccagggcgaggaagccgggcggatagcgctcgatgatatcggcggggtcatcgcgcatgcaccgggcctgcgctggtccaacaccgttttcacccggctggccgaacgcggggtgccggttgtcatctgcggcaccaatcacgcgccgtctgtgctgttgtggccgctcgaaggacaccatctgcaaggcgcgcgcatgcgtgcccaattggccgcgccgcggcctttgcaaaagcagctctggcggcagatcgtttctgccaagatcatgatgcagggcgccgtgatcgagcggcacggcaagccggctggtgcgttcgagatgctcgcgcgaaaagtgcgctcgggcgatcctgacaatgtggaagcgcaggcggcgcgccggtactggaaactgctgtttggagaagcgttcacccgtgaccgcgcggcgggcggggtaaacgggctgctcaattacgggtacacggttttgcgcgccatcgtctcgcgcgccatttgcgcctcgggcctgcatcctacccttggcgtctttcacgccaaccgcgccaatgcctttgcgctggccgacgacctgatggagccctaccggccgctggtcgatgatttcgtccatgaactggctagcgaggggatcgaggcggtgacgccggaggccaagcggcgcctcgccacgttgggcacgctcgatctcgtgcacgaagcacagacgaccccgctgggactccatgcacagcgcctcgcccatagtcttgcaaccagtttcgagctcggcaagccgcgattgagcctgcccttcacgctggcaacggcatctgccgaatcacgggatttcgaggacgcatgagccgcaaagccaatgcgccggaaacgcgcgatacgcatttaagcggatacagactgatgtggatgctcgttacgttcgatctgcctgtcgaaacaaaaaagcagcgcgctgcggcaacccgattccgcaacgatctgcttgatcttggctttgaaatgagtcaactttccaattacttgcggttctgcaaggggcgggagcaattcgatgcctatgtgcgcaagatcgaacgaaaacttcccgagctgggcgatgtcttcatcttccagttcaccgaccgccaatacgagaacatcgtccgcttctcatcccagggccgccgcgcgaatcagaaaacccccgaccagatcgcccttttctgatttttcgatgcatttcatagcgccccacgccgccgatttctccaataatatcagagagatcagcggcgatcgagcctagcagttcagaaaacgcggtccaacggcaaccccccgctcgtcggaggtgaagccgagaacagcctagcagttcagaaaacgcggtccaacggcaacagctgttaggcaatgtgaaggtgttggatgagcctagcagttcagaaaacgcggtccaacggcaacccaccggcgaggtgaagggccttggcggcgagcctagcagttcagaaaacgcggtccaacggcaacgttgggagggcgctggccagcgtatggttcagcctagcagttcagaaaacgcggtccaacggcaactgcaccgaaacatcccaatcgacgttgttaagcctagcagttcagaaaacgcggtccaacggcaacttggcggctatgaattcactgtgttccgcgagcctagcagttcagaaaacgcggtccaacggcaactccaatggctgacgccatgcggccaatgccagcctagcagttcagaaaacgcggtccaacggcaaccatcggacgaccaatcgctaccgcccgttgagcctagcagttcagaaaacgcggtccaacggcaaccgaataaacagttcagtttgttccgcccgaagcctagcagttcagaaaacgcggtccaacggcaacatgacatactcaccgcagtttttacgccacagcctagcagttcagaaaacgcggtccaacggcaactgtaggacagttcggtctcctcgcgccgctcagcctagcagttcagaaaacgcggtccaacggcaaccgataacgtcacgtctcgcaacgtggcaagagcctagcagttcagaaaacgcggtccaacggcaacaccaccaataggcgtaagcgtcacgtctggagcctagcagttcagaaaacgcggtccaacggcaactcattcccgcgtgtagaggtcatcggatatagcctagcagttcagaaaacgcggtccaacggcaacttctagtcctcctaccgtagcagtaagtgtagcctagcagttcagaaaacgcggtccaacggcaactgtcgatggacggcaggccgctggaggaagagcctagcagttcagaaaacgcggtccaacggcaacacatgccatcgatgaggggctgaggcatggtagcctagcagttcagaaaacgcggtccaacggcaaccggctgcaaccacgtttgcagcccgagtatagcctagcagttcagaaaacgcggtccaacggcaacgatgtccgcgcctatttcgatcacgatcgagcctagcagttcagaaaacgcggtccaacggcaacagatcgtcgccgtcaatatcgcccgcatcgagcctagcagttcagaaaacgcggtccaacggcaacggcacaagtcggtcagcgatctgatagcgcagcctagcagttcagaaaacgcggtccaacggcaactcagtctcggcggctatgaaatgagcagtgagcctagtcacctggaactgtaattcgtatcattggtccaagcgatttggagaatgatatggcgggccgggtagcggatgaaattgttttaagcgtcgaagagcgggactttctggaagcccaggttcg

SEQ ID NO: 3033 - DNA, 16078 bp, synthetic construct
  variation 14592..15141: note = note, n is a, c, g, or t
  source 1..16078: mol_type = other DNA
  misc_feature 1..16078: note = Synthetic
agtggcatggaagcgacctgcatcgatcgcgaggattgcatcggtaaggaagccggggattagagccccttttgcttcattgaccagacattggtcgggagcaaatggaatgcgtaaaaaggcccggtgtaaccgggccttttcctgttgcgttcgtgtttctccgggctttcttttcgcatgagcggcttttggcgcattgagcgcgatcagtcccgtcagtcctgattgtggatgccctcgcccaggccggtgccgcggcgggacatgggcacgtaatcgcgcatgaccgggccggtgtagagctggcgcggacggcctatcttgcgcttggggtcggcgatcatctcgcgccagtgggcgatccagccgacggtgcgggccagggcgaagagcacggtgaacatggaggtgggaaaacccagcgcccgcagggtgatgccggagtagaaatcgatgtttgggtagagcttgcgctcgatgaaatactcgtcattgagagccacctgctccagctggcgcgccacctcgagcaggggatcgttgggatcgcccacttccgccagaacctcctgggcggtgcgctgcatgatgcgggcgcgcggatcatagttcttgtaaacacgatggccgaagcccatgagccggaagggatcgttcttgtccttggcgcgggcgatgtatttcgggatgttctccggcgtgccgatttcctcgagcatgttgagcgctgcctcgttggcgccgccatgggccgggccccagagcgaggcgatgccggcggcgatgcaggcgaagggattggcgccggaggagccggccaggcgcacggtggaggtggaggcgttctgctcgtgatcggcgtgcaggatgaagatgcggtccatggcgcgggccagcaccgggttgaccttgtattcctccgccggcaccgagaagcacatgtgcaggaagttggaggcgtaatccaggtcattgcgcggatagacgaagggctggccgagcgaatacttgtaggccatggcagccagcgtggggatcttggcaatcatgcgccgggtggccacctcacgctgctgagggtcgttgatgtcggtgctgtcgtgatagaaggccgagagcgcaccgaccaccgccaccatgatggccatgggatgggcatcgcggcggaagccctggaagaaggtgcgcatctgctcgtgcaccatggtgtggcgcgtgatttcgttgtcgaagcgctggcgttcggcctgggtaggcagatcgccatagaggagcagatagcaggtctcgagatagtcaccgtattcggcaagctgctcgatgggatagccgcgatagagcagaatgcccttctcgccgtcgatgaaggtgatctgggattcgcaggacgcggtggaggtatagcccgggtcaaaagtgaaatagccggagcggcgatagaggttctggatgtcgatgacatccgggcccatggtggccttgcggatcggcaagtcataggtgttctcgccgatggtcagacgcgccgtttcgggcgatgtggcctcgtccttgcggatggcttcaggatttttgggtttgccgtctttgtcgctcttgctcatgggaactcccgtcgcctgttgacccccctcatgttgcgccgcttttttaagcgcacggagcggccttgtggcctcattgccggtcctgccgccctggtgcaccctgcggcgcccgcagtgtgcgtgcttcttcccctccttggctagcgcattcgccccgccttgggcaaggccgccttatgaaccagagcggggcagggtgatgacctgcttgcctgcgcagggcatggcgcccttttgcatttacccttcgttcagtttttatccaccgtttcttaagcatgtccgtttacctttcgggaacgaacaggcggacatgcgcctgcttgagggcaggctggcaggttgaggtgcatgacgctttttttgtcatcaggtggtgaggatccaaggtgttgaagctgttttccagattgcccggagcgggacggggcgagcgggcagggcggcagcggccgcttctggatacgcgtgttttcgacaatgtgctcgccagtggcagcgtgacggacaggcaggcgctggcctgtcagctggcggccttcgtgcgcggccgggaggcgaaggatccggaacggcggctggtcacaccctatctgcaccggctcttgcaggataaggacatgcgcgtgcggcaggcctgcgcggaaggcctcaccgaagatgcgcatctggatgccgattccgtctttctgatcacggccgatgcggaagccattgcgctgccgtttctcaggcgggcgaaggccctggatgcggcgcggcaggtggccattttcaaggtcggtgatgaaaagcggcgcgaggcgctggcgcagcgcgcggctgtcagtgacaggctgatgaccctgattgcgcgcgaaggggagctgcctgttgtgctcgccctgctagacaatggccgggtgcgcattgatggcgacaatctcaagcgcatttatgcgcggttccgggatgtgccggcggtgacggagcggttgctggcgcgcaaggatctgccggcggaaatccgcatcgtgcatgtgcgcacggcaacggaacgggtgcgcaccgccattctcaagggggagttgccggcgagcgtggccattcgcaaggcggtggaggataccgaagagcgggcgctggccgacattctcatctccctggccagggacaaggagcgggtgcgcgcggccatgcgcttcatggccgggcgcgggcttctgaccgcggcggtgatcctgcgcgcggcggtgcgcgggcatgtgacggtccttttggcggcgctggggattctggccggcgtctcctcccggcagcttgagcgcatcgcgaagaagggcagcaagcgggccttgcgcgcgctttacaagaagagcgatctgccggaggcggcgctgccgcttgttgaagccgtctttgacgtggcccagaagcatggcgatgccgaggccggcgtttccgaggccaccttcgggcgcgaggtgctctcctggatcatggcggcggacaacgacctttcagtggcggaaaaggcacgcctggcagagatcctggcgcagctggcggatgaagaaacccgccccctcgccgcccgcctcggcaaaggcctgctcaaggcggcgtaaaatcctttcctcgtcgattttctcgtcaaccggcaagagcagcggcctgatactgcacgttcatgcatttgccccaagtcaagtgtgcataccgcacggtggagccgatcggaagttttcctctgaagccaaacgaaaaatttgcccagaggcgatttttcacatctgctcaccgcccggtttttcttccttaggtcacctgatgtttttcctctatgaggtgcctgagcgaaagagggggcagtgtgatgaatttttggttggattttccggctggctgagggccgccttaaaaggcgggatatctcgcccagacatattcgggtgtctgcttaaaaagtgttttatcacttgctaactggtgggaatcctgcttaatgcctgtgccggtcgtggctttgccatgggcggggcgtgcgttcggtactggaaaggatcgcttggcctttgggtcatgagcagtgccgcaaggggaaggaacgtttcgtacccatgcggatgttggaacgtcgggggagggcgctgcatttggtggctgatgaaaggcaagggaagcatggtggagaacgggcggtcaaatcttgtgcgcggtctggccttgctggcgggattgttcggggggctgacggtgttttccggcgggcgggtgctttttggcccggaagaggcgcgcatcgccgccgggcattatctgcctttcgtggtctggttcaatttccttgccggattcgcctatgtggcggccgcctgggggatgatgcgccggtgcgcctgggcctgcccgctggcggcaggcattgcggccgccacggtcgtcgtttttgccatcttcgggatcaaggtggctgttggcacgccgtttgagatgcgcacggtgggcgccatgaccctgcgcagcggcttttggctgtttgtggcctttatcctgtgccggcggcgccaaggcgcaccatgaaagctgaaaaaaggcgcggtctttttatgtgtgcctgaatttttgagtcgtaatcagcaggagacgtgaacgcatgtggcgcaggctgcttttcatcccgcctctggcgctcggcattgccgttgtcgccttcgtcgtcaacaaccggccggccccggcgcgcaaggcgccgcaggaggaggcgcgggtggtgcgggtgatgacgctgcgcgcgcttacgctacagccgcgcattgtcggctatggcaccgtgcgcccttctcgcgtgtggaacgccatcgcccaggtgggcggcaaggtggtctacacgcatccggacctgaaaaagggcgccatcattcccgccggcacggagatcatcaccatcgcgccggatgattaccggctggccatcgcccaggcggaggcgggcattcgcgccacggaggcaaagctggccgagctggacgtgaccgagcgcaacacccgcagtcttcttgaactggagcggcaggcgctggacatcgttcgcaaggattacgagcgcaagaaaaccctcagagcgcggggcaccattgccgatgccaccctggagcaggctctgaaggcgcttcttgcccagcgcaagctggtgcagtcattggaaaacaccctgcatctcattcccgcccagcgcaaggaactgcaggcacaactggccaccctgcgcgcacaactggccgcggcaaaactcaatctggagcgcacgcatatccgcatgcccttcaccgggcgcatctccatggtgggcgtggaagtggggcagttcgcgccggtgggcaagcagctggccagcgctgacgatatcgcgaaagcggaagtggaggcgcaatatcccttgcagcggatgcagtctgtcatccggctcgtggccaatctctccgatgatgtgaccctgaacggccgcatggtgcgccatcttatcgacaggctgggcctgtcagtggaaatccggctggaaacgggggatgtgcccgtggtctggcagggccgcttcgcccgcctgtccgatacctttgacccgaagacgcgcacgctgggcgtcatcggcgaggtggacgatccctattcccacgtctctcccggcaacaagccgccgcttgccaagggcatgttcgtgcgcatggacattctcacccgcaaggtaaaggacgtgctggccattccgcgcgcggcggtgcacgagggccgggtgttcgtggtcgatgccgaaaaccggcttgagatacgcccggtgaaggtgcgcgcgcgcatgcgggatctcgtcattatcggcgaggggctgaaggccggtgagcgcatcgtgctcagcgatctcgttccggcgctggaagggcagttgctcaagcccgtgccggatgaggacaccgcgcgcatggtcatccgcgaagcggcgggaggcgagggccgatgaacagggtcgttcgctatttcgtcacccatcccaccatcgccaacctgctgatgctggccatcgttgctgccggcctgctggcgctgccgaagatgcagcgcgagacttttccgcgtatcgccccgcgcaaggtggaggtgagcctggcctggcccggtgcgcggcccgaggacgtggaacaggccatctgccagcgcatcgaggatgcggtgcacaacgtggacaatgtctacgagatcacctgcgtggccatggagaacgtggcgcgtgccaccgtggagatggtggagggcgccagtttcgagaaattcacctccgacctcaagacggaggtggaggccatcgacgactttcccgatctggtggaaaagccgatcatccgtcagctgggcacgcgcgatttcgtcacctccgttgcggtgtccgctcccgcggcatcgccggtggacctgaagatgctggccgagagactgaaagaccgcatggagcgcaccggcaagatcccgaaagtgacggtgcgcggcttttccacccatcagatccgcatcgcgcttgattcggcgcggcttaaggcactgggcatatcggtgcaggatgtggccaatgcggtgatgcgctcctgcttcgacctgccggccggctcgttgcagacgcgtgcgcgcgacattctcatccgttatgccgacgagggcaagcgcccgcgcgattatgagaacatcgtggtcgtggccagcgccagcggcggagaggtgcggctgggcgatatcgccaccatcaccgaccggttcactctggatgaggagaaatacctgttcaacggccgccgtgccgccattctcgacatcaccaagacaccgcaggatgatgtgctgcgggtgatcgacgcggtgaaggccttcatcgcggaggaaaaggcgcgcctgccgaagggcgtgaccatggagatcaccaacgatcaggcctcgctggtgcgtgaccggctcaatctcattctcaccaatgccgtgcagggtctgatcctggtgtttgtcacgctgtggctgtttttcggcctgcgctattccttctgggtggccatgggcctgcccatctccttcctgggcggcgggctgctgatggtctggagcggcatgaccatcaacatgatgacgatgatcggcctgctcatcgtcatcggtcttttgatggacgatgccatcgtcatttccgagaacatcgcggcacagcgggcgaagggcaagccgccggtgcaggcggccatcgacggcgtgacgcaagtgatgccctcggtgttcgcctcgttcatcaccacggtggttatcttcggctcgctggcctttctgaaaggggatctcggtcagatcctgcgggttgtgcccatcgtcatgctgttcgtgctggcggtgtcgcttatcgaggccttcctcatcctgccgcatcatcttctgcacaccatggaaaagacgaagacggcgaagatgggcgggcgctttcaggagtggatgaacgcgcggctggaagccttcagcaagcgggtggtggaaccggtggcccgctttgccgtcaactggcgctatttcacgttcgggtttgctgccatgctgtttctgctggcggtggcggccatggccggcggcaaggtgaagttcgaggcctttccggatctcgacggcaacaccatcgccgcgcgcattctgctgccggcgggctcgccgctggcgctgaccgagcgcacggttgagcgtgccattcaggccctgcgcgagatcaaccgggaggaaaagccgcgccagccggatcagcaggatctggtgcgcaacatcacggtggaattcaaccgcaatgatacggcaggtgaggcgggcccgcatgtggccaccatcaccgccgacctgctggatgcggaaatccgcaccatccgcatcgaggaggtgctggcgaaatggcgcgaaaagacgaaggacctgccggatgtggtgtggatccgcttttccgagacgaagatcggcccggcggggctggatatcgagatccggctgcagggggatgaccttgagcagatgaaggcggcctcgcgcgaactgatggcctggctgaagggctatgtgggcgcggtggacatttccgatgatctgcgcccgggcaagccggagtttcgcatccgcttaaagccggaggcgcgcatgctggggctggacggccggatggtggcggatcagctgcgcgcggctttccactccatcaccgtgaacacggtgcagcgcgacggtgattccatcgacattgacgtgcggctgtccgatcgggaccgggattctgtggccgatctcgatcatttcgacatcgccctgccggacgggcggctgataccgctcaaggcagtggcggacgtgcagcccgggcgcggctattcgcgcatcacccgcatcaacggccagcgtgccattaccatcaccggggatgtggacacgcgcatcgccaacgccaacgagatcgtcacccatgccatggcctccttcgtgccgaagctgcttgaaaaatatccgggggtgcgcatctcgctggaaggagccgaccgcaaggcgcgcaagacgcagcgatccatcctttccggctttgttgtcggcatcatcggcatctacctgctgctgtcgtttcagttccgcagctacatcgagccggtggtggtcatgtccatcattcccttcgccttcgtcggcgccgtgtttggccatttcctcatggggctgaacttttccatgccctcgcttttggggctggtggcgctttccggcgtggtggtgaacaactccatcctgcttgtgaacttcatcaagcattatcacggcgagacggcgagcgtgcgcgaggcggcgccgctggcctcgcgggcgcgcttccgcgctatcctgctcacttccatgaccaccttcgtgggccttttgcccatcctgacggaaaagagcctgcaggcgcagattctcacgcccctggtcacatcgctggccttcgggctggtggccgccaccttcctggtgctgctggtggtgccctcgatctattccatccttgatgactttggcctggcgcgcctggatgccccggcggaagaggagggagatcatgtctctgccgcttccgcctcgcgataatgtgatcgcacacatcgtttccggctgcgacggaaaccgtatcctgaatgcgtaaagaacagtggggcggaaaaaccatctcggatgagaaaagggatacatgcgacatgaaaaagaagcttttgaccggctttctcgcgctgacgctgtttgcggcgccgggcatggcccaggatgcgcaggatgacgggcgcacgctggtgcagatggagccgcagatgcagcagcagtttctcgccatgatgcggggatttctggattatgtcgatgacatgatgaatgcgctggcggaaggcgatttcagggaagtggcgcgcatcgccggcgaggatctcggcccggcccatgagctgatgagcaagttgcgcgcagcgaaagtaccggaggagaaaatcgccgagattcgcaagctggtgcgccagcgcatggccgagatggtggagcagggaggcggcaaccccgatcagatgcacatgggcatgggccgcattgtcatgcaggtgctgggcaagccgctgcccggcatgcagatgggcgagggccggaagaaaccgcagggatttggcggttttggccgggtcttgcccccggagatgcatcagatgggcatgcagatgcatcttgccgccggcaacatcgccgatgtggcggcaaaggtgggcaatgagccgacggctgatgattatcgcaaggtgatcgaggccatcggtgagctcaccggccagtgccgcgcctgtcacgccgcctggaagctgcgctgacaccacgctgatgatccctgcctctaagggcggcattcccggatacttgaacgaagggaggtggcggctttccccgccacctccttttcattccaaggcgtgggggcgaaaaccgcccatgaaccttggttcatgcgccgcttttttacctctgctgcggcaacgccatttaccgcaaggcgggcctgcgcggccgcagcgagctggtggcctatttcgtcgaagacctgctcgccggcgaaaagctccttaccggcagggggtgataaaaaatcccgtcaggaggcttggctaccaaccggaatgaaaaaggaaagaggccggagcctctttcctgaactgttgcagtcgaatgcttgttaacggccagactgcgtttactgatctgcaaagcaaaagctagattatcttctgattattgtcaagctttacgtgcatagataacatgtcctcgcctgcctttccagtcatgtgagggcaaccatgcgctatcgtctcgctctcgacatcggcaccaattccatcggttggtggatctacgagctgaacgcggaaaacgaacccgtgcgcagtgtcgatggcggcgtgcgcatcttccccgatggccgcgacccgcagagcaggaaatccctggccgaggatcgccgcctggcccgtggtgcacgccgccggcgcgaccgattcgtgcgccgaagaaacgccctgatgcgcgccctgatggaatacggcctgatgccggcggacgagtccgcgcgcaaggagctggaaaaactcgatcccttcgagctgcgcgcgcgtgcgctgaatgagccgctgccgccgcaccatctgggccgcgccctgttccatctgaaccagcgtcggggtttcaagtccaaccgcaagaccgacagccgcgacaatgaggcaggtgccatccgcaccggcatcgcccgactggaacacaagatgatggaggaaggcgcccgcaccttcggcgaattcctccacaagcgccgccagcgcggcgagagcgtgcgcgcccgactgcgcccggaaacgcagggcaagggcaacggctacgatttctaccccgaccgcaagctgctggaagcggaattcgacgcaatctggcaggcccaggcgaaataccacccggaggtgctgaccgaggaggcgcgtgatcacatccgccgcatcatcttctatcagcgcccgctgaagcccccgcgcgtcggcaagtgcaccttcaacgagcacgaggaacgcctgccgaaggcccatcccctgtttcagcaactccggctctatcaggaagtgaaccacctggaggtgcagcagccggacggttctttccgcaagctgacgcgggatgagcgcgacaagctgatcctttatctgaacacccgcaaagatgcaccgttcaagacgctacgcgagcgcgtattgaagctgcccgagttcacccgcttcaacaaggaaacggaaaaccgcaggaaactgccgggcaatgaggtcaacgccgcgctggcgaacaagaaggccttcggcccgcaatggacggcgaagagctggcaggagcaatgggccatcatcgagcgcatcctgaacgaggaagatccggacgcgctcatcgactggctgatcgaggaacagggcctgagcgaggagcaggccgaacatgtcgccttcaaggtttcgctgccgaagggccatggccgcctcggcctgacggcctcgctgcacatcctggaggccctgaaggaagacgtcatcacctatggcgaggcggtcgggtgtgtatatggccatggcgcgcactcggaattcgccaccggtgaggtcttcgaggaacttccttactacggccacatcctctcccgccacatcccgcccggcaccggcgacgcgaacgacccggaagaactgcgcgtgggccgcatcaccaacccgacggtgcacatcggcctcggccagcttcgccggctggtgaacactcttatccgccgctacggcaagccggccgagattgtcgtcgagctggcccgcgagctgaagatgaacgacgaacagatcagggaatacaaccgccgcctgaaaaagaataccgaagaggccgaacaccgccgccaactgatgcgggaagcagaagagataacgcatcagaaaatagagccaaccccgcgcaaccacttgctcctgcgtctgtggctggaactggaggagtgcggcaagcgcgcccgccgctgcgtctatacgggccagaacatcagcctctccatgctcttctccggtgccgtggacattgaccacatcctgccctatgcgaaaacgctggatgacagcgtggcaaacaagatcgtctgcctgcgcgaggccaatcaggaaaaacgcgacaggcccccatacgaagcctggggccacacggaaaaatgggaaggcatcgccgagcgggccaagggcctgccggccaacaagcgctggcgcttcgccccggacgcgcttgagcgcttcaggggcaaccatgaggatttcctggcccgccagctcaacgagactcaatatctcgcccgcatggcgcggctttacctggcagcgctttatccagtgaagctggcgcaagcaccggtgtgggtcacgcccggccggctcacggctcttctgcgtcgccgctgggggttgaacagtattttgcgcggcgacaacctgcccgaggagcaacaggcgaaagcgcgagacgatcatcgccatcacgccctggacgccgccgtcatcgggctgaccagccgcggcctcttgaaccgaatctctcgcgaggccgggcggctggaggcacaagggctggaagactacgtctggcaatcgatccctgcggaaccctggcctggctttcgcgaggaggtggcgcgcatcgtgcgtcgcatgatcgtcagtcatcgcccgcgtcacaagaccatcgacttttctctgcgtcgggtggggcgcgaccagactgcggggcaattgcacgaggaaaccgcctatggcctcaccggcgagcgcacgcagcgcggcgatcccatcgtcgtctatcgcgtaccactcaccagcctgaagccgaaggacatcgagctggtgcgcgatccggacctgcgcgatgccctgtggaatcacacgcgcgacctttcgggcaaggaatacgagaaggcgctggcggaatttcccacactggacaaggtcgatggcaaggataacccgtggaagggcatccgtcgcgtgcgcatcacccgtgcgctgaacgtcatccccatccgcgatcgccgtaccggccagccctacaaggcctacaagggcggctccaactaccgctatgacctctgggagctgccgaacggcaagtgggaagcggaggtcatctccatgttcgatgcccaccagccgggctggaaatcggagctcaaacgcaaatacccgaccgcgcgcaagctgatgcgcatcttccagaacgacatgtgtgcgtgggaacaggacggaaaaacggtttatggccgcgtggtgaagttcacgaagaatggtcagattacgcttgcgccgcataatgaggcgaatgtggatgcacgtaacagagatgcatccgacccatttaagtttatttcgccggcaccagccggactgaagaacatgaaatttcgcctggtcaaggtggacgagacgggacgcgtgttcgacccgggcccctggtatgaccggcgctgatgccgcctgcgatgatgtcacggcaaaacaatggatcgctatgtggacatagccaccgatgacgtacacttaagcgtgctgcgcggtttcatgctggtgcgcagggatggcgaggaactgggccgcgtggcgctggacgacatcgccgccgtcatcgttcacgcgcacggcgtcaccttctccgccaacctgtgcacccggctggcgcagcgcggcgcgctcattgtcttctgcgggccgaaccacgcgccgcattccctgctctggccattggaagggcatcatgcgcaaggcggacgcatgcaggcgcagctcgccgcctccaaaccgctgaagaagaacctgtggaaacaggtggtggtggccaagatccgcatgcagcaggccattctgcacgccgccggagaaaacgccgacgcctttgatcgtctagcgcgcaaggtgcgctccggtgatccggaaaacgtggaggcacaggcggcgcggcgctattggcctctgctcttcggccccggctttcagcgcgaccgcaatgcgcacgacgtgaacgtgttcctgaactatggctacacggtcctgcgtgcctgtgtggcgcgcgctgtcatcgccgccggactgcaccccacactgggaatgcaccaccacaaccgggccaatgcctttgctctggccgacgacctgatggagccgtttcgaccactggtggactggacagcgcggcaactgttgcgcgataatttcggaaacaataatggcggcatagtgctggactcacaagccaaggagcggctggtgcgcatgctgtcgtttgacctgctgctgccggaaagccgcacgccggtaagcggttgcgtgcagcggctgagcgtatcgttggcgcgcagctttgagcagcgcagggccatgcttgaatttccggtgccgccgaaagcgttggagcttgcggaattgtagggcgatgggccgcaagggcggagatggcgttttcttgagcggatacaggctcatgtggatgctggtgatgttcgacctgccggtgaacacgccacaggcgcagcgcgaggccacgcgctttcgccagttcctgcttgatcgtggctttgagatgaaccagttttcggtctacatgcgcttctgtggcgggcagaagacattcgaggcgcatgtgaaagccatagagcaaaacttgccttcaggcggtgatgtgcaaattttgcaaatcacggacaagcaatatgagcggatccgtgtttacagcggacagacacggcgtcaggcgcgaaaaaatccgaatcaactggcgcttttttgaggattggcggcattttcgatcttggaatggccgcccaaaccccttgaannnnnnnnnnnnnnnnnnnnnnnnnnnnnnnnnnnnnnnnnnnnnnnnnnnnnnnnnnnnnnnnnnnnnnnnnnnnnnnnnnnnnnnnnnnnnnnnnnnnnnnnnnnnnnnnnnnnnnnnnnnnnnnnnnnnnnnnnnnnnnnnnnnnnnnnnnnnnnnnnnnnnnnnnnnnnnnnnnnnnnnnnnnnnnnnnnnnnnnnnnnnnnnnnnnnnnnnnnnnnnnnnnnnnnnnnnnnnnnnnnnnnnnnnnnnnnnnnnnnnnnnnnnnnnnnnnnnnnnnnnnnnnnnnnnnnnnnnnnnnnnnnnnnnnnnnnnnnnnnnnnnnnnnnnnnnnnnnnnnnnnnnnnnnnnnnnnnnnnnnnnnnnnnnnnnnnnnnnnnnnnnnnnnnnnnnnnnnnnnnnnnnnnnnnnnnnnnnnnnnnnnnnnnnnnnnnnnnnnnnnnnnnnnnnnnnnnnnnnnnnnnnnnnnnnnnnnnnnnnnnnnnnnnnnnnnnnnnnnnnnnnnnnnnnnnnnnnnnnnnnnnnnnnnnnnnnnnnnnnnnnnnnnnnnacggccccaagattagcagatcagaaaacgcagtccagctgcaatagaagggcgaaaaaactagggcgtgtcctcataaaatccgacgtgccagcccctgaaggtcggcattttcgctgcatctcgccggcttttcgtccttgaaaatagcttcggctattccctgcgggcgaaaggaccagcgattttcaagaaaatgccgctggcatcgccgtctttgaattaagtccacgccctggagggggcaacagcaagattaaaggacgtgtttgctccagaaaacgcgaagaggcagaagaagggctggtgagcccgggaggactcgaacctccgaccaactgattaaaagtcagttgctctaccacctgagctacgggcccatgaggaatgtttggggcgccggtgtgtgtgtgtgtggcgcgtgtattctcccaagcgaggcggaacataggccgggggtgcgctgcggtcaaggggattggcatctctttgaaaagggctccaatgcccagaggcatattcgccttacggggaattttctcactctacacgacacaccgttaccatcttcctcgtcaccccagcgaaagcctcaggtctcagaccacaaacgcatgagcaaatggcttgagataccggctttcgcccactggtgtccaagaaagatgatggttaggtgaaaaaagtacgggattgtccgccacttgtggtaaaagtgaagtgtcaaggcttgatttgccacaagcggaggaacaatcccgatgtttgaacctaccacgcttcatcgcattgtccaactgcttcctgaccgccttgttgaggaggcggtgcgccggcataacagcgaccgctatcgcaagcgttttcacacgcgggcgcacctgttggcgctgctggtgtcacaacttggcgctgtatcgagcctgcgggatgtgga

SEQ ID NO: 3034 - DNA, 13815 bp, synthetic construct
  source 1..13815: mol_type = other DNA
  misc_feature 1..13815: note = Synthetic
gaatcccccgaccaacagccaggggacgatcaaaacatgggtcaattctcagtgaaaacttatgcccctagcgggtcagatctcgatgacattcaacacggaatcaattgggagcgtattgtcgcgtccctgctcgcatgaaatggtaggcaggctagaagaataggtcaacaaaaacatatcgttagtgtgctgtggtgtacccattcgtgctgccggatatcgggggcaaaagcgtcctgaacaaactcataacctgaaggtcgcaggttcaaatcctgctcccgcaaccaaagaaccccagtaactcggatgagttgctggggttttccttttccccatcgaacccggccctaaattgtcgtcggcaggcagccaatcagacccgaggacaacaaaaaagcgcagcccggaggctgcgccttatttggtgctgtcgaagcttgttaacagccagaccgcgatttctgaactgctaggcagtaagatcaatatatatcgcgctgcttgtataggcaacctgttgctgtctaacaattttgcttccattctgcgtcatagtggaggtcgtgatggcaaaatcgttcgcattcgacatggggaccaattccattggctgggcggtgctcgggctggattcggccggggatcccgacagcatcgagggagccggggttcgcatcttttccgatgggcgcgaacccaagtcgggggcctcgctggccgaggggcggcggatagcgcgcgggatgtcgcggcggcgggagcgctacaaggcgcggcgcaaggcgcttatccgcacgctgggcgattatggcctgatgccgctggagcgagcggcgcgccgggctctggtagccgaaaccaatgaccgcagctttgggctggtggcgcaggatgtctatgcgctgcgcgcccgggcgctggttgaaaagctccccccgtaccatctgggccgggcactgtttcatctcaaccagcggcgcggtttcaaatccaatcgaaagaccgatggccgcgacaatgaattgggcatgattgccaccggcattgcggcgctggatgcgcagctcaatggccggacgctgggccaatatctgcatgagatgcggggcgcggaccccagacagcgcgggcaggtgcgggtgcggccgcatctggagatcaacgataaggggcgcgaaattgccgcctatggcttttatccgcagcgggcgatgctggagagggaattcaacgccatctgggcggctcaggcgccccatcatcccgagttgttgagcgaggagcggcgcgcgcatctgttccaagttatcttctaccagcggccgctcaaacagcccgatccgggcaggtgcagtttcaatcccgccgagccgcgcctggccaaggcgcatccgctgttccagcgcttccggctggtcaaggaaatcaacgaactgcgcatcgtcaccggcagcaatagccagggcgtgccgctgacgctggaacagcgcgatattctgctcaccctgctgcgggacaaaaaggcgtcgagcttcaagacgctattggccaaaatcatcaagggccagcccgaggcgcgcttcaacaaggccagcgacagccgcgacaagatgaagggggacgaactggcggcgacgatgagcgacaagacgcgcttcggccaggcctggtttgccatgcccgaggcagagcaatggcgcatcatcgccaagctgcgcgacattgacgatccgctcgaactcaatgcctggctcgaaagcgaatatggccttgcgcccgagcggcgcgacgcggtcgccaatgcacttctgccgcagggctatggccggttgggtgaaaccgccttgcgtaccatgctcgactatctcgaggcggcggtgatttccgaggccgaagcagcggcgcaggcgggttatgatcacgccctggcccgccggggcgccgggctggaccagctgcccaaatatcaggaagtgctgggccgccgcattcctccgggcagcggcgagccgaacgatccctatgacatccgcatggggcgcatttccaacccgaccgtgcatatcgcactcaaccagttgcgccgggtggtcaatgcgttgatccgcaaatatggcaagccggccgagatcgccatcgagctggcgcgcgatctcaagctcagcgaggagcagaagcgcgaggtcaacgccaccatcgccaaaaatacccgtgacgcggagcgtcgcgcggttcggctggccgatgaaggcatcgacaataccggtcataaccgggcgctgctgcgcttctgggaggaactggcggcagacccgctcgatcgggtctgtgtttattgtggcggtggtatcggggccgcctcgctgttcaatggcagtgtggacattgatcacatcctgccctggtcgcgcacgctggacgacagccgcgccaaccgcattctggtgcacaatagctgcaatcggctgaagcgcaattttgcgccgttcgaggtgcccgagtggcgcgagatctaccaggatattctggtgcgggcggccaagctgcccgccaataagagctggcgctttgccccggacgccatggacaggttcgagggcgagaaggatttcctcgccaggcaattgaccgatactcaatatctggctcgcatggcccatgaatatctggccgcgctctatcccgatgaggagccggatgaatggggagtgttcgcgcgaggcaatcatgtacgggtggtgccgggcaggctgacggaaatgctgcgccgggcctggggactcaatgccatcctctccgacgataatcgtaagaatcgcaacgaccaccgccatcacgccatcgatgccgtcgtggtgggggtcaccacccgcgacatgctcaacaagatttcacaggcggccgggcgcggagcggatatgggcgccgcggatgccttgcgccgtttcgatccaccctggccgagctttcaccaggcggtgcgcgcggcggtcgaacgcatcttggtcagccaccgcgccgatcatggcaccctgccgggcacggacgggcagggcagcacggcgggtcaattgcataacgacaccgcctatggcctcaccggagagacgcgcaaaggcttggccgtcgtggtgcgccgcaagccctatctcagccttgaaccgcgggacatcgaaaccattcgcgacccccaattgcgcgaccacctggcgactgaaacctatggcctggccggcgccgaattcacggcggcgctcaagcgcctgcagcaaacggacaagttttatgcgggcattcgtcgggtgcgggtcaccgaggcgctgagcgtcatccctatccgcgatgcgactggccacgcctacaaggcctataagggcgacgccaattttcgctacgatgtctgggaattacccaatgggaaatgggtgcccgaagtgatctcgatgttcgacgcgcatgacaggggctgggtttcgcaggtccatgccgccaatcccgccgcccgccgtgttctcagcctcaggcagaatgacatggtggcctatcagcacccggaacagggcctcgtctatggccgcgtggtcaagttcggccaatcgggacaaatgaccttcgccgcccatcatgagggcgggtcgttgaaatccagggatgccgaccgcgacgatccattcaaatatttctacaagtccgccggcacgatgaaggatatcggcctgcgtcaaatccgcgttgatgaaatcggtcgggtccaggatcctgggccgcaggatcgagatagcaaaagggttcgaaaatctgatcgttaatcgtaaatgacgctatgtttggcaattaacattttgatcaactatcgatgatgcatggatcgcgtcgttgatatagcaaccgacaatctttttcttgccattcatcgcggatttctcaccgtatcggcggggcgcgaagaacaggggcggattgcgctcgacgatatcggcgcgctcatcgtgcatgcccatggcacgacctggtcgaattcggtgttcacgcggttgagcgatcgcggcatacccgtggtcatttgtggccccaaccatgcgccggtggccgttctgtggccgctggaagggcatcatctgcagggtgcacgcatgcgcgcccaattggcggcgtctcgccccttggccaagcagctttgggcgcagattgtcagggccaagattggtatgcagggctatattctggcgcgaaacggccgcgcggcgggagctttcgacctgctggcgcgcaaagttcgctccggcgatcctgataatgtcgaggcgcaggcggcgcgtcgttattggaagacattgttcggagcggatttctcgcgcgatcaggatgccggcgggatcaatggtttgctcaattacggctataccgtgttgcgggccaccgtctcgcgggcgatctgcgccgccggcctgcaccccacgctggggatttttcaccgcaatcgggccaatgcctttgcgctggccgacgacctgatggagccttaccggccgctggtcgatcaggtcgtgctcaatctggcacgagatggcaccatcgatgtatccccagaggcaaaacaggctcttgccgggatcgccacgctcgatctagctgggcctttgggcatctcgccgctttcggtccaggtccagcgctttgtccattcgctggcgcagagtttcgaaaccgggcgtgccgagctcgacctggttgcgccgcctgtcctggccgcggcgacggcgcccggtaccggcgatggctgaaatcataagacggtacgcccaaactcaccttagcgggtatcagttcatgtggatgcttgtgactttcgatctgcctgtcgaaacaaaagcgcagcgaaaggccgccaccaggtttcgcttggggctcctggatttaggctttgaaatgagccagctgtccaactaccttcgcttctgtaaaggcaaagagcaatttgaagcctatacgcgcaagattgaggcgcaattgccggctctgggtgatgtgtacatctttcaatttaccgataggcaatatgaaaacatcgtcagattttccgatcaaggccgccgggtgcgccagaaaaacccaacgcagatggccctgttctgaccgtctcggtccttttgtgggcgtcgacgccaccgatttcctgtttgttttcaggaagatcggcagctatcgagcctagcagttcagaaatcgcggtccagcggcaacccgaacgccgacaggtcgaaatgctcgatcagcctagcagttcagaaatcgcggtccagcggcaaccggctcaccgccggggctttttgtttgcgcagcctagcagttcagaaatcgcggtccagcggcaaccgaaattggatagctgaactactggccgcgagcctagcagttcagaaatcgcggtccagcggcaaccgtcccatagagatggttcgctccagatgcagcctagcagttcagaaatcgcggtccagcggcaacaggcaaggtgttcgccatgactgacgatgaagcctagcagttcagaaatcgcggtccagcggcaacaacagcatcggcgcaatcttggtcagcccaagcctagcagttcagaaatcgcggtccagcggcaacaggcgggaggcgcgccccaaggtcggcatgagcctagcagttcagaaatcgcggtccagcggcaacccacggtgaaagcgtatcggtctcaggcaaagcctagcagttcagaaatcgcggtccagcggcaacaccggccggcatcgatggcgtcaacgtccaagcctagcagttcagaaatcgcggtccagcggcaaccccgccctttgatctgccaactggtcatttagcctagcagttcagaaatcgcggtccagcggcaaccaccatcaatttcaccctcgcagcatttggagcctagcagttcagaaatcgcggtccagcggcaacgcacaggcgaagtcctcgtctacgactacgagcctagcagttcagaaatcgcggtccagcggcaactcagacagcttctccacacgctctagcggaagcctagcagttcagaaatcgcggtccagcggcaacacctgatacgagccatgtagtgccagcgaaagcctagcagttcagaaatcgcggtccagcggcaacacaaggtggaccgcatcaacgacgaaatcgagcctagcagttcagaaatcgcggtccagcggcaactgaacccggctggcgacaattacctgatggagcctagcagttcagaaatcgcggtccagcggcaaccggcatgcctgtcgtgccatatgagcagggagcctagcagttcagaaatcgcggtccagcggcaacaacggaaggaagtgaacagtgaaggcgagtagcctagcagttcagaaatcgcggtccagcggcaacgccaagtttcacagggagagcgtcaacacaagcctagcagttcagaaatcgcggtccagcggcaacttcatcggcataaattgctgatacgtagatagcctagcagttcagaaatcgcggtccagcggcaacaattccgtaatgctttgcgagcgcatttagagcctagcagttcagaaatcgcggtccagcggcaacttcgctggcggcgctgtcgcagtctcatgtagcctagcagttcagaaatcgcggtccagcggcaactccataggtggcgttctcttccgcctcacgagcctagcagttcagaaatcgcggtccagcggcaacccagccgacatggcagacggagcggcctggagcctagcagttcagaaatcgcggtccagcggcaacggagcgccggttttgttcgagccggtcggcaagcctagcagttcagaaatcgcggtccagcggcaaccctacgccaacggtaatggcgtcgtcagcgagcctagcagttcagaaatcgcggtccagcggcaacccgccacctctgccaccctgaccccggccgagcctagcagttcagaaatcgcggtccagcggcaaccatgcgggcaacaccatcggtgacgaccgaagcctagcagttcagaaatcgcggtccagcggcaaccggcctcccattcaaagggaaaacgaaaaagcctagcagttcagaaatcgcggtccagcggcaacagatactttctcaccccagccgctttcgatagcctagcagttcagaaatcgcggtccagcggcaaccgccttcaactcgtctgtgaccgggatcgtagcctagcagttcagaaatcgcggtccagcggcaacgtattgctcccccgcagcgtccaagccgaaagcctagcagttcagaaatcgcggtccagcggcaactcctgacatgcgcgagcggcacgcaagagcagcctagcagttcagaaatcgcggtccagcggcaaccggcatgatgtcgcctaaaccgattggttgagcctagcagttcagaaatcgcggtccagcggcaaccgacccatacgagcaatggcacctgccgccagcctagcagttcagaaatcgcggtccagcggcaacgacgaggggcctatagccaagtccatgatcagcctagcagttcagaaatcgcggtccagcggcaactacgggccgcagaattgagccttggccgctagcctagcagttcagaaatcgcggtccagcggcaacacgcgccatcgaatacaactcttggctataagcctagcagttcagaaatcgcggtccagcggcaacaccgatctggctacaatacgaacacagaaccagcctagcagttcagaaatcgcggtccagcggcaacatgaaaaaagtgatcccactattcacaaagagcctagcagttcagaaatcgcggtccagcggcaacaggagaccgagccggatcgtctcgcacgggagccgagagcgccacctgaaggtcgcagacttaaattctgctcctggaaccaaaagcccggtagttggctgggctttccttttgtgaggttctgagcgcttgctgtctctggtcgcttgctcaattgtggtagtgaacgccgctggcaggtgagggctagtatgagctaaacagcgccgtctgggcgatcttgagcgcgccaatggcgtcatggcggctctgtgcttccctgagcgcatcgatgtcgagcttgtcgaggccgcgaccggctgccttcaggaagtcgatggcatgggtggcggtggcgacggagtcttcgcggaacgggaattggtcgagctgccagacaccctcccaattgttcttcttgagcacatagaaaaattcgaagagctcgatggggtgcaggcttccggcgacaagatcgtcgtcccaagagcgataattgtcgttgacgtccataccgaacagccggccgtaatcgatggccagttgtgcggaatcggcggcggactcgccgccaatgatggcgtggccgaaatcgagcaggatgccgatattgggcaggccgatcttttcgatgccgaggatggtgcgcgcgaccgaaccgaagctcatgcgcacgcggggctcgcgcggcttgtattcgatgacgaatttaaggtcgggattttcgctggcgagttggccgacgccgtcgagcgagcgctgccactgggtcgagtaatcgacctggaacggatagtcccaaccatcctggccgggccaaagctttacgtaatctgccttgtggaagcggacgacgtcgcaggcggcggtgaccagttcatgcgccttacggcggatgccggcatcgggattggtgaaggcgcccttgacgaagtcgcgggtgtagatttccggtgtgatgccgatgacgccgagcttgttgcggtcgagcgccgtcttgatctcggcatcggagaattccccgccgaaatagggccagttgagatcgacgaccgatagatccttgacctggccggctaggtcgatggcctcgatgatattgcgtggaatgccatagccgtcagtagcataacgatcgacataggtagcgaagtgccagatgccggcgccgtgacgctgtttgctcatgaattgcctcccataagtgtctggccgatggcctgatgccagcgcgccacgtgatttttgcgggtttcttcgctcatattggcttggtagtggccagcggcagggactggcgccatggcaatgccaaggccgccgaaggcgagggcggcggcgcccagggcgctgacttccggtgcggcggccgtcgcgacctggcggccgagaatgtccgcctgaaactgcatgaggaatggattgcgtgaagcgccaccatcggcacgcagttcggacatggcgcctcccatgtcctgctccacggcggtgaacacgtcgctgatctgaaaagcgatcgcctcaagcgcggcgcgagcaaggtgagcgggacgagtgcctaaggcgaggccggtgatcgtgccgcgggcatcggctcgccagtgcggcgcacccaggccgacgagagccggcacgaaagcggcgccattgctgtcatccacgctttgggcgagcaccgagagcgctgtcgcgtcggcgaggcccagcaagtccgccatgaaggcggccgcctggccggaaacggaaatattgccctcgagggcataggcgatctcgcccgcctggctccatgcgatcgtgctggaaaggccgttgcgggacagcacccgacctggggtcagcgccatgagcgatgtccctgtgccataggtcgccttgacagtgccgggcatgcgcacgccatggccgaacaaggcggcatgggagtcgccgatcatggcgtggatcggccggcccgcaagggggcctgaggcaatgcggccaaattcgtcgtccgacgatcgcacctgcggcagcacagatacgggaacgtcaaaaaaggcgcagagctcttcgtcccaagcgaggcgctcggtgttgaaaagttgggtgcgcgacgcgttggaatggtctgttgcgtgaacggcgccgccggtgaaattccacaacagccagctatcgacagtgccggcacgcaattcgccgcgggctgcccgttcgcgcgcaccgggattgttgtcgagtagccaggcaatcttgcctgcgggaaacagcggatcgagcgcaaggccggtcttgttctcgatcacgccggccttgccggctgcgcgcagggcgtcgcatttcggggccgaccggcggcactgccagatcacgcagggtccgatcggctcgccgctggtcgcgtcccaaacgacgatggattcgcgctggttggaaatcgcgacggcggagatttcggtatcgccggccttggcgacgacttcatcaacgacctgttggacgccctcgaccaaggtggtggcagattgttcggcccagcctgattgcggataggtcacgacattgagcactgaggcctgatgatgcacgtggccatcaggcccgaccagcagcgccttggtattggtcgtaccctgatcgatggcgaggacgaggccgggcgaactcatcttttccgcgcgatggtctggcgcacggcgtcggcaatgccgctttcggtcaagccgaaatgctccattaggaattcggccgagccagttggcacaaagcccggaaagcccatgatccgaattggaacaggatcgttggccgtgaccacttcggcgacagccccgccaagccctccgcgtacattgccttcctccaccgtaacgatcgcgccggtgtcggcagcagcgaggatggcagtctcgtcgaggggactgatcgtggccagattgaccacgcgagcggaaacaccttcttgggcaagggtcgtggcggcggaaacggcgcgatgaaccatggtgccattggcgataatggtcgcatcgttgccttccatcagtgtttcggccttgccgatctggaagctggcactgctgcgctcgagggcggggacgggcatgcggctgacgcggacatagaccgggccctcatgagacgccgcagcgcggattgcctgctcggtctgccaggggtcggccggtacaatgatggtgaggttggtgagaagacgcagccaggccatgtcctcgatggagtggtgggtggggcccagctcgccataggcgacgccggaggactggccgatcagcttcacgttgacattggaataggcaatgtcggccttgatctgctccagcgaccgggccgtcaggaaacaggaggcggcggaaacgaagggtatcttgccaccattggcgagtccggcgccgacggcgaccacggtctgctcggcgatcccgacattgaccatgcgctccggccatctcttgcggaaaccgccgagcttggacgagccgacgctatcgctgacaacggtgacaatgcggttgtcggcttcagccagcgcctcgatcgtggccgcgaagctgtcgcggcagtcgaaaaggccggccttgttggaggttgcagcgctcatcagaccagttccgccatggcttgttcgaattgctccctggtcggcacgccatggtgccaggcgacgttatcatgcatgaagctaacgcccttgcccttgactgtattggcgatcacgcagagcggcttgccccggcccttggccggggccgaaagtacgtcgaggagctgcgcatgatcgtggccgtcgatcacttcgacatgccagccaaaggcgcgccacttgtcgtccagggggtcgagcgaggcggtttcctccgtgcgggcgccctgttgcaggcgattgcggtcgatgatgagggtaaggttttcaagcttgcgatggccagcggtcagcgccgcttcccaattgctgccctcctgcaattctccgtcgccggtcatgacgaaggtgcggaaatcggcattgtcgatctggccggcaatggcaatgcccagggcaaccggcaggccgtgcccaagcggcccggtattggtctcgacgccgggcagatagttgcgattggggtggccgttgagcctgctcagcggctgcatataggtcttgaggtcggcctcggggaaatagcccgccgccgcgagcacggcgtagaaggcgccggtgcaatggcccttgctcatcacgaagcggtcgcggttggggtcgttgggcttgctgggatcgtagcgcaggacgccgaaataaagcgtcgccagcgcgtccacagcactgaagtccccgcccggatgcccctgttgggcttcgtagaccatctggaagctgcgacggcgtatccacaaggccttttcggcgatggtggcgaccatatcgttgtggcgatcgggggcggtagcgggcacttgaaaattcctgtcgcggcgaaaaatggccagcttgccaagctaacgccgtcgagccggtgcgtgcaataagaatattttcgattttttgcgttttaaaaattggccaataaaaacaatattagctagggtagttagctgcttgagctgctttgccggcattgacatcgcatttttgtcgtgttgcacaatggcaaaacgaaaataatcgcaataaaatccattgcgacgaggagcatcacaatgatcaaccggcgccgggcaatcctggccttcgtccttgtcctgccgctggcagggtgcaaggtcgtccagattgccgaccagcagtccggtgcgcccgccggtttcgatgcggcgggctatgcggatggcatatggaccacgcaggttctgccgtatttcatggaatcggcgcgaccggcggcggaagttgttcctgccattaccagcgaccttggggcggctggggcaagttttggctatcgagcgggtgagggctcgccgtggagcttcatcgtttccggcaccggaacggtcgcggccaagaatacagagtctcgggccggcacgctggatgtgacggttgaaggcgttgccgaaccggtggttttgcagatcggcccggtaatccgtggcaatgccgttcgcgatgccttgcccttcgtctcgttcaaggatttcaccaaccagatcgaatacgccaatgccggcaaggcgctgacggcgttggcgatggctggtttcgcaggcaatgtcggcgccatcgcggtcggcgacatgatcggctttaccggcgccatcagcatggctggggcctccgacaggctgctggtgacgccggtcatactggaaaaggcgacgccatgagcgaagtggtcctcagcgcccgcgcgataaccaaggcctttcccggcaccgttgctctgcaggatgttgatttcgacgttcgtgccggcgccgtcaacgtgctgatcggagagaatggcgcgggcaagtcgacgctgatgaagatactcgccggcgtcgagcggccgacgctgggcacaatcaccatggggggcgagaaggtgagcttttcgtccattcgagacgctggcagcaagggcattggtatcgtttttcaggaactcaacctgtgcccgaacatgagcgttaccgagaacatctttctcggacgcgacatcaccagggctggcttccatatcgaccgcgcagcacagaaaatgcggactgcagaactaatgaagcggctcgaacatgcgatcgatccagatatgctggtgagcgagctgatgatcggccagcagcagatcgtcgaaatcgccaaggccctggccgaggatgcgcgtatcctcatcatggacgagccgacatcggcgctttccgcctcggaagtggaggtgctgttcaaggtgatcggtgagctcaagcgggctggcgtcgccattatctacatctcgcatcgcctcgaagaactgatccggatcggagattatttt

SEQ ID NO: 3035 - DNA, 12110 bp, synthetic construct
  source 1..12110: mol_type = other DNA
  misc_feature 1..12110: note = Synthetic
accggtactaatcgttcgattggcttgattgctctcattttcaatgtccatgcgcattcgcgcatcgtgacgagcttgcttcgtatccttgtccttcgccggcctggtggttttagcgaggagcttgaacccgatcccatcccgaactcggccgttaaactcctcagcgccaatggtactatggcttaagccctgggagagtaggtcgctgccaggcctgccaaggacaatgattcctcttatcgatgaacaatcagaacgccgtctccttccggaggcggcgtttttttgttgtctgtctgtccgggtgcgctctgcgttgcggtgatggcccacgtgtgctcgcgtggctgcgcgtattcatgatgcgccggcgacggacgaagttattccgccacgattgatcggcacgattcctatcgtgcgcacttcgatggtgacgattcgaactttccggctcgttgctcgtttgcgtccacgccgttttcaccgaggaaacattccatgcgcgtccggtttcgttttccgatctccgtcatgctcgccggtcttggtcttgtcgtgtctgtcgtcgtcattcccggacctgtggcatttgcgcaagcgcagacacaggcgccggcggatgcatcgccgagatcaaacggtccggtgtcgtctgatagcgaccggcaattgcgtcaggtgacgctgaccgacaagatgatcgaaggcgtgctcgcttcgcaaaaggaatttgatgcgatcgcggagaagctgccggagacggcgccggagaagccggatcccaaagtcacggcgcagttcgaggccgtcgccaagaaatatggctttgcgagctatgacgaatacaacgacgtggtcgataccatcagcctggtgctcggcggctttgaccccgcgaccaagaagtatgtcggcgccgacaatgtgattcgcggccagatcgctgcggtggaagccgacaaatcgattcccgaggaagaccgcaagcaggcgctcgagcagttgaaggatgcgctgaaggcgccggtgccgccgatcgagaacaaggccaacatcgaactggtcgcgaagtattacgacaagctcaacgccacgctgcaacagggcgagtaggttttcgttgagcacgtgcgtgatgcataaacggtctacgcgtcctttgcgaaccgtgcttccatcgcgcgccgcgtcgccaccgtatcattggcttgatcgatctcgacatcgttccaggtcacgacggcgccatgcgcgatgtctcgcgtgagtttcacgcgatgcgcgagaccgatcggcaatgcgccgactttcaggctgtcgcgcgccggcatcagcttgccccacacggtgtagccgccttcgccgtcgagcatctcgccggccttgaggtcgcgcttggcgacggcggcgacatcgccgcgaaagccgcgcggctgccccgtcgattcaccgcgcagcgcggccgatagcaccgagatgttcagctcgagtccgatcagatgatagggcttgtacatcgcagcgtatcgtccgctggcgtcggtcttcagtccgtattgcttgaagcaatcggcggcgtagtcgttcggcgcttccagcaccacatagacgccccagcgcaagtcgcgaaacaccgggcggccgtcacgctccaccgacgataccacttccaccatgccagagcgatccagcacgccgccttgatcgcgcggccgcatgatgtgcggcagatcgtcgacgccgcacggcggaaacttcaatcccgcctcgggaacatcgagcccggtcgcattggcgatcgccgccatctcgatggcggacttggtgccgtcgaggaaagagttgaacatctgcggattcatgccggcggattgtgcctcggctgcggtcaatccgtaatgctgccacacgtccttcggcgtcacgtcgtgatagatcggcaaatatttagtgcccttgccggcggcgaccaccttgaaaccggtggcgcgcgcccagtcgaccatctcggcggtgagcgccggctgatcgccgtaagccagcgaataaaccacgccggcctggcgcgcttcttccgccagcagaggtccggccagaacgtcggcttcgacattgaccatgacgatgtgcttgccggccgcgatcgccgcgcgggcatggcgaatcccgacggcgggattgccggtggcctcgaccaccacttcgatcgcactgtccttgatcgcggccatgccgtcggtgacgaatgtcgtcgcatcgatcagcgcgcgatcccaccccacggtgcggcacgcctcacgcgcccggccgggatcgagatcgacgatcgtgctcacctccagtcccggcgtatgtggcacctgcgccagaaacatcgagccgaacttgccggcgccgatcagcactacgcgaacaggttttcccgccgcgtggcgggcttgcaggaggtggtggaggttcatgatgcgcttcaatcctaagggaacgtggcggagcaggtcacctaatgcaaaaagcccccgccggagcgagggccttatttggtgccgtcgaggcttgttaacagccagaccgcgttttctgaactgctaggcagtgtctaggccattagcagaatcttttcgcaatcgcaagttgaaatttggtcgcgttgccttagcgctctctacccgtcaagctgcacctctaagttgcggtccggaaagatcttcatgtgaaggcgaaggatcattgacacgcgatgggaggattgaggcagccgctgcttctggcgatttgctgcccgcgcagttggggcgtctgaattgacaaaatatctcttttcatttgatcttggaacaaattcaaacggttggtgtatcttccgcctcgatggcgacggcgctcccgtcgccatcatcgacgctggcgtccgtatcttttccgacggccgcgaaccgaagtccggcaattcgttagccgaggggcggcgggtcgcgcgcggcatggcgcggcggcgggaccgttacaagcggcggcgcaaggcggtgctgcggacgctgagcgaatacggattgatgccggcggacccgaaggcgcgcgccgctctggttgccgaaacacaagacgccaaggaaggcgagcaggccaacgacgtctacgcgctgcgcgcccgcgcgctcgacgagaaactgccgctccatcatattggtcgtgcgctgtttcatttgcagcagcgccgcggcttcaagagcaatcgcaagactgatcgcaaggacaatgacaagggcgccatcgcgctcggcgccgaccgcctcgttcttgagatgcgcgaagataacgcccgtacgctcggcgaatttctcgcgaagcgccgcggccacgatcccagcgcacggggcaacgtccgcgttcgtatcgatatcgacacgaacgatgagcctgcaaaggacggcaagccaaccaagcccggttacaatttctacccgcagcgcgcgatgctcgaacacgagttcgaatgcatctggaatgcgcaggccgcgtattggcctgacgtgctcaccgacgagcgcaaggcgcatctgttccgcgtgatgttctatcagcggccgttgaaagcgccgatcgtcggacgatgcagcttcaatccatccgaacagcggctcgccaaggcgcatccgctgtttcaggcgtttcgtctctacaaggaggtgaacgaactcggccttgtcatgccggacgagtcggagcgcaaactgacgctcgacgaacgcaatgcattgatcaccaaattgcgcggcgtgagaagcgcgagcttcggcgcgttgcgcaagacgctcaagctctccgagcgtggagcgcgtttcaacaaggaaggtgaggcgcgcgacaaactgttgggcgacgagatttattccgtgctgtcggacaaggcgattttcggtaatcgctgggcgaagttatcgatggagcggcaatgggagattatcgagaagttgcgcgaggagcccgatccgttcgcgcttcacacatggctggtcgagaatgccggcctgtcggaggagcaagccagggaagcggccgatgtgtcgctgccggaaggttatggccggctcgggccgaccgcgctcgcggcgatgttggaagaattgaaggccgaggtcatcaccgaggccgaggcggcgaaacgtgccggttacgatcatgcgctggcgcgtgtcggtgaagcggtcgatttgctgccgcgttatcaggatattctcgagcgccgcatcccgcccggcaccaacgatcccgacgacgactatgatattcgcaagggacgcatcaccaatccgacggtgcatatcgcgctgaatcagttgcgcgccgtcaccaaccggttgatcgcgcgctacggcaagccggagcgcatccatatcgaattggcgcgcgagttgaaccagagcgaggagcagaagcgcgaggcgacctcgcgcaacgccaagaaccggcgtgaggccgagcggcgttccgcaattctgaaggagttcggccagccggacaacggattcaatcgccagcttctcaagcaatgggaagaactcaatccggagaatccgcttgagcgccgctgcatctacagcggtacggtgatcacgccgacgatgttgttctccggcgcggtcgatatcgatcatattctgccgtggtcgcgcacgctcgacgacagccaggccaatcgcttgctgtgcactcgcgaggccaaccgcgagaagcgcaaccatgcgccggcggaagtgccgcaatggaccgatcgctacgatgatattctcgcccgcgcccagcgattgccgctcaacaaacgctggcgcttcgggcatgacgcgatggcgcgtttggagaaggatcgcgactttctcgatcgtcagctcaccgacacgcaatatctggcgcggctggcgcacgattatctcggctcgctgtatcccgacgaggagccggatggcgacggcgtcgtggggcgacgcaatcatgtcgtcgtcgtcaccgggcggatgaccgagatgctgcggcggcgctggggcctcaacggtattctgcccgatcataatttcgccgatccgaccaaagcgaagaaccgcaaggatcaccgtcatcacgcggtcgatgccgcggtgatcggtacgatttcgcgcagcctgttgaagcgcattgcggatgccgcgcgcgaaggcgagaaccagggtgcggaggacgttattcgcaccatccagccgccgtggccgagttttcgcgaggatctcaaggccgtggtcgatcgcatcattgtcagccataagccggatcacggcaccttgccgaagcccggcgagcgcggccacaccgccgggcaacttcataacgacaccgcttacggtcttgccaaggacgatgacggcaacccgatcgctgtgcatcgtaagccgttccttgcgctggagccgaaggacttgcccttcattcgcgacccgcaactgcgcgggtggctcgaggcaaacacggcgaaattgagcggcaaggatttcaccgccagactgatgaaactgcgaaagttggatggtcatcccttcaagcgtatccgccgcgtgcgcatggtcgaacggctggcgctgattccgatttatgacgccactgggcgcgcctacaagggctacaagggcgatgcgaatttccgttacgacgtgtgggagatgccggatggcaagtggcgccacgatgtcgttaccatgttcgatgcgcatcgtcccgacatggactggcaagcgcgacgaccgcatccggccgcgcgcaaggtgctgtcgttgaagcagaacgacatggtggcctatgagcagccaagcgtcggcttcgtgattggccgcgtggtgaaattcaacaccgcgggtcaaatctactttgcgagccatctcgaagccggtgcgctgaaggcgcgcgatgccgaccccgacgatccgttcaagtatttttcgaaatccgcgaacggattgcgcgatgtcaaggcgcgccaggtccgcgtcgacgaggcggggcgcgtgtttgatcccggtccgcgcgatcgttcgtcgcatggtcagaaggctcagcccggttaagcttaacaaaggctttcgcttggcctgccgcaacttgcatgtacgctttcggcatcatgcaacgtgtggtcgatatcagcaccgacggcctgcacctcgctacgcaacgcggctttctcaccgtgagtgcgtccggtgaggagaaagggcgcgtcgcgcttgacgatatcggcgcgctgatcgttcacgcccatggcaccacgtggtcgaactcggttgtggtgcgactgtcggagcgggccgtcccgatggtgatctgcggctccaatcacgcgccgatcgcctgcgtgtggccgttggcgggccatcacgcgcaaggcgcgcggatgcgtgcgcaactttccgccaaccgtccgcttgccaagcagctctggcgcctgatggtctcgggaaagatccgaatgcagggcgaggcgctgcgtttcgctggccgggaaggtggcgcgttcgagggattggcgcgcaaggtgcgctcaggcgatccggagaatgtggaggcgcaggccgctcgtcgttactggaaaatcatgttcggcaacgagttttcgcgtgatcgtcaggcggaaggcatcaacgcgctgttgaactacggctatacggtgctgcgtgcggtggcgtcgcgggcgatctgcgcctcgggcctgcatccgaccattggcatctttcacgccaatcgtgccaacgccttcgccctggccgacgacgtgatggagccatttcgtccgatggtggatttattggtcctcgatcttctcgccagcggtgaagactcggtcactcccgaggccaaggttcggcttgcgcgggtgggatcggcggatcttgtcatgccggacgagactgtttccccgctcgatgtcgcggtccagaaattggtgcattcgctctcgaccagtttcgagaccggcaagccggttctcgatttgccggttcggccggcggcggtcgtggcggtcaatgcggatattgatgcatgacgaagcgcgccgcgagagccaataccggcccgtcggtgctcagcggatataggctgatgtggatgctggtgaccttcgatcttccggttgagaccaagaagcagcgcgcggcggccaccaaatttcgtcacgcgctgcttgatctgggcttcgagatgagccaactttccaactacttgcgcttctgtaacggtaaagagcagttcgtctcgtatgttcgcaaggtcgaggccatcctgccgccgtggggagatatctatgtcttccaattcaccgatcgccagtatgagaacattatccgcttctcagaccagcggcgccgacggcaacaaaaaaatcccgagcagatggcccttttctgattgcggtgggcaaattgccggacccggtgccggagatttcctgagtaaaatcaagaatatcgccggataccaagcgtagcagttcagaaaacgcggtccagcagcaactccgcgtgttctggtatcgcggcgagtagcgtagcagttcagaaaacgcggtccagcagcaacgcagggtaagaacgacgcctataaccaattagcgtagcagttcagaaaacgcggtccagcagcaacgcgagcaagcacacaaggttgccgaccgaaagcgtagcagttcagaaaacgcggtccagcagcaactgacgatattccgaatggtcgccggagtgagcgtagcagttcagaaaacgcggtccagcagcaacgacatagtggcgcgcctccggatggttgcgagcgtagcagttcagaaaacgcggtccagcagcaacagcgctgtgcatcgggaacatcgaatcgttagcgtagcagttcagaaaacgcggtccagcagcaacatgtcatcgcggcgcccgcggcggacgccagcgtagcagttcagaaaacgcggtccagcagcaacggctatttcatggacggcgccttccactgcagcgtagcagttcagaaaacgcggtccagcagcaacatcccgcctcatccttcacttgctggatgaagcgtagcagttcagaaaacgcggtccagcagcaacagcaatggatttgcttgatgccacgtcgccagcgtagcagttcagaaaacgcggtccagcagcaacgattggggcctttggggatcgccgcgaaggagcgtagcagttcagaaaacgcggtccagcagcaacccatcatcaaccatgaagatcaggccagctagcgtagcagttcagaaaacgcggtccagcagcaacatcgcgggcacggcatatgtggctgggcgaagcgtagcagttcagaaaacgcggtccagcagcaaccgccgatctcgtcgagcctctggtagaggcagcgtagcagttcagaaaacgcggtccagcagcaacggcgctggtacgtggagccgaagagaagaaagcgtagcagttcagaaaacgcggtccagcagcaacaatgccgccgagcaccgattgcagcgttcgagcgtagcagttcagaaaacgcggtccagcagcaactgttctcaattgcgacgatgcgccccacgaagcgtagcagttcagaaaacgcggtccagcagcaactttataaccagtcccggtattgttggtcgcagcgtagcagttcagaaaacgcggtccagcagcaacgacgccgcacgccgccggttgatggcatccagcgtagcagttcagaaaacgcggtccagcagcaacggatggatagatttagcgtgcaatgcgcctagcgtagcagttcagaaaacgcggtccagcagcaacgccgacatatatgcgtgcgccatggaccgcagcgtagcagttcagaaaacgcggtccagcagcaacaccacgtcgccggcaccggcaaccggaagtagcgtagcagttcagaaaacgcggtccagcagcaacctttcttgtaggcgatgacgcgatcctgtgagcgtagcagttcagaaaacgcggtccagcagcaacgttacttggagcgataagcgcaactgtgagagcgtagcagttcagaaaacgcggtccagcagcaaccgaagaatacgagtggaaggggatgcatatagcgtagcagttcagaaaacgcggtccagcagcaacggtttcgtgccgcgcttgctgaaagtggcagcgtagcagttcagaaaacgcggtccagcagcaaccgccttgatcgcagctacatggtccggctgagcgtagcagttcagaaaacgcggtccagcagcaaccggtcagaagacgctcacggcgtatctgttagcgtagcagttcagaaaacgcggtccagcagcaacttcgtgatggttagttcggtcgctgagacagcgtagcagttcagaaaacgcggtccagcagcaacttcttgataagcaggaaggtcatcgggaatagcgtagcagttcagaaaacgcggtccagcagcaacgtcgaggtcgcggcaacgcacggcgcgttcagcgtagcagttcagaaaacgcggtccagcagcaacagagcttgccttgcaggagcgagagcgattagcgtagcagttcagaaaacgcggtccagcagcaacgccggagcgcccgcctacctcgtccgcgagagcgtagcagttcagaaaacgcggtccagcagcaacctgccgttcctcgttgaaagcatcgaatgcagcgtagcagttcagaaaacgcggtccagcagcaaccgcgcgccttcagcatgccggcgacgatcgagcgtagcagttcagaaaacgcggtccagcagcaacgtatagcccggagccccgatcaggcgcgggagcgtagcagttcagaaaacgcggtccagcagcaactgatcatctgcttcgagcgatcgtcggtcagcgtagcagttcagaaaacgcggtccagcagcaactgacggttgggactcgtgcaccggggaataagcgtagcagttcagaaaacgcggtccagcagcaaccacgccatcgcgagagcgacggcaccatcgagcgtagcagttcagaaaacgcggtccagcagcaaccgcacgacggcgttgaacctggtcggccgcagcgtagcagttcagaaaacgcggtccagcagcaacgcttcctcgacctcgcacgccacgtcgctaagcgtagcagttcagaaaacgcggtccagcagcaacaaccgcgcgctgcatcaggccatgcagacgagcgtagcagttcagaaaacgcggtccagcagcaactcgtccgacgtgccccacacgttcgcgtaaagcgtagcagttcagaaaacgcggtccagcagcaacttttccggatcaccatcgcgataggctgcaagcgtagcagttcagaaaacgcggtccagcagcaacgcgcgatcgatgcgggttggggaggttgaaagcgtagcagttcagaaaacgcggtccagcagcaacgctatcgatgtcgtcacggcgacaagcgtcagcgtagcagttcagaaaacgcggtccagcagcaacggtcaatccaagtgatgaacgcgcgccgttagcgtagcagttcagaaaacgcggtccagcagcaacacgaataacgtgttggataacttcgagtgcagcgtagcagttcagaaaacgcggtccagcagcaacgctggcgcatggcgtagcgttgatgaaaaggagcgtagcagttcagaaaacgcggtccagcagcaactgaacgcttgcgcgtaagccgggccaatatagcgtagcagttcagaaaacgcggtccagcagcaacctcgcgcaacacctccaacaaatcgcagtgagcgtagcagttcagaaaacgcggtccagcagcaactcaggctcggtggacctcccggccgggctcagcgtagcagttcagaaaacgcggtccagcagcaacaccttcgtcatcttcgacgaattggcgcagagcgtagcagttcagaaaacgcggtccagcagcaacgtatccgcaagtgcgccatgaggcacagcgagcgtagcagttcagaaaacgcggtccagcagcaactcaaattgaggcttatgcgccgcacgcacaagcgtagcagttcagaaaacgcggtccagcagcaactccgtcaacttcaatccacgtttgagctgagcgtagcagttcagaaaacgcggtccagcagcaacgatgcccttggctgcggcaatcgctgccgtagcgtagcagttcagaaaacgcggtccagcagcaactgcccgcgtccggcctatggcgttctcaagagcgtagcagttcagaaaacgcggtccagcagcaacaatctggcatcggtctgatatgctttccacagcgtagcagttcagaaaacgcggtccagcagcaaccaatagacagacacaataaccatccgatcgagcgtagcagttcagaaaacgcggtccagcagcaaccagcagggcgtcatcgctatcgtcaagcgcagcgtagcagttcagaaaacgcggtccagcagcaacccgatgggaaatgccggcggcggcattcgaagcgtagcagttcagaaaacgcggtccagcagcaactccatcgggcggacagacgtcaccggagggagcgtagcagttcagaaaacgcggtccagcagcaactgctcggaacgccaagaggcggcgttcgtgagcgtagcagttcagaaaacgcggtccagcagcaacggaagatgccgttggtcgtccgcacctcgcagcgtagcagttcagaaaacgcggtccagcagcaacggcgttcgcttccacgacgcgcgtgagcgaagcgtagcagttcagaaaacgcggtccagcagcaacaaaccgacgctcgcggatagtcccgccgaaagcgtagcagttcagaaaacgcggtccagcagcaaccgctgtcggcctcgcttgcgggtggcgcacagcgtagcagttcagaaaacgcggtccagcagcaaccatgccgtcggtgcggcgattgaccagcccagcgtagcagttcagaaaacgcggtccagcagcaacactggccgcgccgcgcttg

SEQ ID NO: 3036 - DNA, 10197 bp, synthetic construct
  source 1..10197: mol_type = other DNA
  misc_feature 1..10197: note = Synthetic
acgtcgtgagacagttcggtccctatctgccgtgggtgttggaatattgagaggatttgtccctagtacgagaggaccgggatgaacgtacctctggtggagctgttgtcgcgccagcggcagtgcagcatagctatgtacggacgggataaccgctgaaggcatctaagcgggaaacccacctcaaaacgagtattcccttgagaaccgtggaagacgaccacgttgataggccgggtgtggaagtgcggcaacgcatgtagcttaccggtactaatcgttcgattggcttgattgctctcattttcaatgtccacgcgtcatgcgcgtgcgatctgaagaccatagtttgcttcgtatccttgtccttcgccggcctggtggttttagcgaggagcttgaacccgatcccatcccgaactcggccgttaaactcctcagcgccaatggtactatggcttaagtcctgggagagtaggtcgctgccaggcctgccaaggacatggatttcctctgtcgatgaacaatcaaaaacgccgtctccttcgggaggcggcgttttttgttgtccgtgcggttgcgatttgagttgtggcgatgcgccgacgtgtggccacgcggctgtgcgttttcagcggtgtcgacggcggacgaagttattccgccacgattgatcggcacgattcacggcgcgcgaacttcgaaggcaacgattcgaactttcctgctcgttgtcggtttgcgtccacgccgttttcaccgaggaaacattccatgcgcctccggtctcgtcttccgatctccctcgtgctcgccggtcttggttttgtcgcatccgtcatcgtcgttccggcacccacagtattcgcgcaaacccaagcccaggcaccggccgatgcatcgccgcgatcgagcggtccggtgtcatccgataccgatcagcaattgcgtcaggtcacgctgaccgacaagatgatcgaaggtgtgctggcgtcgcagaaggagttcgatgcgatcgcggagaagctgccggagacggcccccgacaagccggatcccaaggtgacggcgcagttcgaggccgtcgcgaagaagtacggcttcgccagctacgacgaatacaacgatgtggtcgataccattagcctggtgctgggcggcttcgatccggcgaccaagaaatatgtcggcgccgatgcggtgatccgcggtcagatcgcggcagtggaagccgacaagtcgatgccggaggaggatcgcaagcaggcgctcgagcaattgaacgatgccctaaaggcgccggtgccgccgattcagaacaaggccaatatcgaactagtggcgaagtattacgaccggctcaatgccacgctgcagcagggcgaataggtttctgttcaggatagtcgtgacacgacggctctctacgcggccttcgcgaaccgcttctccatcgcacgacgcgttgagatcgcatcgtcagcttgatcgatctcgacatcgttccaggtcacgaccgcgccatgcgcgatatcgcgcgtgagcttcaggcgatgggcgaggccgatcggcaacgcgccgatctttaagctgtcgcgcgccggcatgagtttgccccacacggtgtagccgccttcgccgtcgagcatctcgccggccttgaggctgtgcttggcgacggcggcgacatcgccgcgaaagccgcgcggttgtcctgtcggttcaccgcgcagcgccgccgacagcaccgagatgttcagttcgagtccgatcagatgatagggtttgtacatcgcagcgtatcgtccgctggcgtcggtcttcaatccatactgcttgaagcaatcggcggcgtagtcgttcggcgcttccagcacgacatagacgccccagcgcagatcaggaaacaccgggcgtccgtcgcgctccaccgatgacaccacttccaccatgctggaacgatccagtacgccgccctgatcgcgcggccgcatgatgtgcggcagatcgtcgacgccgcacgggggaaacttcaaccctgcttcaggaacgtcgagcccggtcgcgttcgcaatcgccgccatctcgatggcggacttggtgccgtcgaggaaggaattgaacatctgcggattcatgccggcggattgcgcttcggcggcgctcagcccgtagtgttgccacacatccttcggcgttacgtcgtgatagatcggcagatacttggtgcccttgccggcggcgaccaccttgaaaccggtggcgcgcgcccagtcgaccatctcggccgtcaatgccggctgatcgccgtaggccagcgaatagaccacgccggcgagcacatcggcttcgacgttgaccatgacgatatgcttggcggccgcgatcgcagcgcgcgcatgacgaatcccgacggcgggattgccggtggcctcgaccaccacttcgatcgcaccgtcctcgatcgcggccatgccatcggcggtgaatgtcgtcaggtcgatcagcgcgcgatcccaccccacggtgcggcacgcttcacgcgcccgctccggatcgagatcgacgatcgtgctcacttacgtggtctggctgttaacaagcctcgacctacaccagtaaggccctcgctccggcgggggctttgcgtttgaagcatcgactcttttcaggcgtccagcacctcggtgccgctgctattttatatagcgtcgtggggatgggtttacatattgcctcgaatcatctaatgcttgaactccgacgcaagtcggtggctgggggcgtggtgatccccacggacaggtatcttccaaagagatacgagtgcaacaaatgtcgcacgcgtcgtggggagttgccgccggactgcgttttctgaactgctagaacgccttgccgggtatggctttgccatacccgggtccgtgccgcagacgcttgaaggcgaacaataagagggggacaaattgcgaaagcgatcgatcgtattgctatcaatatcggtggggtgtcctcctcacgacgggcgtgagacgcgacctcgtgagctgccggccttcggagagttgtgaatactatggtgcggtgcaatccgagcaaaattggtcgggattcccttaatgcaaaagccctcgccggggcgagggccttatttggtgccgtcgaggcttgttaacagccagaccgcgttttctgaactgctatgtaatggaggtttcaatatcagaagggccatgcaagcgcaagttgaaatttagtcgcatggcgtccagtcaagtcacgcatcacactaaagctttgaacgcaggcggaatgatcccagctgggctaaaggggaagcgacctgcgggggaaggagcggggtgggcgctgccgtagcagttgctgcccaaggggattggggcgcagaaattgttgaaatacctgttttcatttgatcttggaaccaattcaataggttggtgggtctacgaactcgatccgactggtgagccatcggccagcaaagacggtggcgtccgcattttctcggatggccgtgagccgaagtccggcaattcgctcgccgaggggcggcgcgttgcgcgtggcatggcgcgacgccgcgaccgttacaagcggcgtcgcaaggcggtgctgcgcacgttgagcgagtacgggctgatgccggccgatccgaaggcgcgtgcggccctggtggcggagacgggtgacgccaaggaaggtcagcaggccagcgacgtctatacgctgcgcgcccgcgcgctcgataccaggctgccgttgcatcatatcggtcgcgcgctgtttcatttgcagcagcgccgcgggttcaagagcaaccgcaaggcagatcggaaggcgaatgacaacgacaagggcgccatcgcgctcggcgccgatcggctcattttcgagatgcgcgaagatggtgcgcgcacgctcggcgaattcctcgcgaagcgccggggccacgatcccagcgcacggggcaatgtccgcgtccgtatcgatatcgactccggcgatcaaaccacagacgatggcaagccggcgaagccgggctacaacttctatccgcagcgcgcgatgctggaacacgagttcaattgcatctgggacgcccaggccgcgcattggcctgatgtgctcaccgacgcgcgtaaggcgcatctgttccgtgtgatgttctatcagcggccgttgaaagcgccgatcgtcggacggtgcagcttcaatccgtcggagcagcgtctcgccaaagcgcacccgttgtttcaggcgtttcgcctctacaaggaggtgaatgagcttgagatcgtgatgccggatcagtcgcatcgcaagctgacgctggacgaacgcaacgcgctgatcgcaaagctgcgcagcgtaaaaagcgcgggttttcccgccttgcacaggacactcaagctttccgagcgcggggcacgcttcaataaggagggcgaagcccgggataaactgctcggcgacgagatctattccgcgctcgccgataagacgatctttggcggccgctgggcgaaactatccgtggagcgccaatgggagatcgtcgagaaactgcgagaggaggctgatccgtttgcgctccaccaatggctggtcgagcacgcaggcctgtcggacgatgaggccgtcaaagcggccgacgtgaagttgccggagggctacggtcggctcggcccgaccgcgctcaaagcgatgctggaggaattgaaggccgaggtcatcaccgaggcagaagcggcgaaacgcgccggttatgaccacgtgctggcgcgcgtcggcgacgcggtcgatgtactgccgcgctatcaggatattcttgagcgtcgcattccgcccggcaccaacgatcccgatgacgattacgacatccgcaagggacgcatcaccaatccgacggtgcatatcgcgctgaaccagttgcgcgccgtcaccaatcggctgattgcgcgttatggcaagcccgaacgcatccacatcgagctggcgcgcgaactcaaccagagcgaggagcagaagcgaaaagcgacatcggagaacgccaagaaccggcgcgaggccgagcggcgctccgcaattctgaaggaattcgggcagcccgacaatggccacaaccgccagcttctcaagcaatgggaagaactcaatccggagaacccgctcgaccggcggtgtatctacagcggcacggtgatcacgcccgcgatgctgttttcgggcgctgtcgatatcgatcatattctgccgtggtcgcgcacgctcgacgatagccaggccaatcgcctgctctgcacccgtgaggcgaaccgcgaaaagcgcaattacgcgccggccgaagtgccgcaatggaccgaccgctacgacgacattcttgcccgtgcccagcggctcccgccgaacaagcgttggcgcttcgcgcacgacgccatggcgcgatttgcgaaggaccgcgatttcctcgatcgccaactcaccgacacgcaatatctggcgcggctggcgcatgactatcttggcgcgctgtaccccgacgaggagcccgacggagacggcgtggtgaaacggcgcaatcatgtcgtggtcgtgaccggccggatgaccgagatgctgcggcgcaagtggggcctcaacggcattctgcccgatcacaatttcgccgatccgaccaaagcgaagaaccgcaaggatcaccgccatcacgcggtcgatgccgcggtgatcggcacgatttcgcgcagcctgttgaagcgcatcgcagatgccgcccgcgagggcgaggcccagggcgcggaggacgccattcgcgccatccagccgccatggccgagctttcgcgatgacctgaaagccgtggtcgatcgcatcattgtcagccacaagccggaccatggcaccttgccgaagccgggcgaccgtggccgcacggcaggtcgactccacaacgacacggcctacggacttgccaaggacgatgacggcaacccgattgcggtgcatcgcaagccgttcctttcactggagccgaaggatttgccttcgatccgcgatccgcaactccgtgaatggcttgaagccaatacaaaaggcctgagcgggaaggacttcaccgccagactgatgaagctgcgaaaggacggcgataatcggcgcgctcgtcgtaaaaagcctggtcgctatagcgggtcgccgttccagcgcatccgccgcgtgcgtgtcgtcgagcggctggcgctgattccgatccatgacgcgacggggcgtgcttacaagggctacaagggggacgcgaattttcgctacgacgtatgggagatgcccgacggcaaatggcaagccgacgtcgtcaccatgttcgatgcgcatcgacccgacatcgactggcaggcgcggcggccgcatccggccgcgcgcaaggtgctgtcgttgaagcagaacgacatggtggcttacgagcagccaggcgtcggcttcgcgattggccgcgtggtgaagttcaataccgcgggtcaaatctactttgcgggccatctcgaagccggcgcgctgaaagcgcgcgatgccgaccccgacgatccgttcaagtatttttcgaaatccgcgaacggattgcgcgatgtcaaggcacggcagatccgtgtcgacgaagccgggcggatgtcagatcccggaccgcgcgatcgttcgtcgcgcggtcggaaagctccgcccggttaagcttaacaaaagcttccgcttcggcctgtcgcaacttgcatgtacgttttcggcgtcatgcaacgtgtggtggacatcagcacggatggcctgcacctcgcgacgcagcgcggttttctgaccgtcagcgcgtccggcgaggagaaggggcgcgtggccctggacgatatcggcgctttaatcgtccatgcccatggcaccacctggtcaaactcggtggtggtgcgtctgtccgagcgagccgttccggtggtgatctgcgggtcaaatcatgcgcccgtcgcgtgcgtgtggccgctgcacggccatcacgcccagggcgcgcgcatgcgtgcccagctgtcggctggccgtccgctcgccaaacagctttggcgccaaattatcgtcggtaaaatcaggatgcagggcgaggcgcttcactttgccggtcgtgaaggcggcgcgttcgcggttctggcgcggaaagtgcgttcgggcgatccggaaaatgtcgaggcgcaggccgcgcggcgctactggaaggtgatgttcggaaaggatttcttgcgcgaccgtcaggccgacggcatcaacgccctgctgaactatggttacacggtgctgcgcgccgtggcatcgcgggcgatctgtgcctccggcctgcacccgacggtcggcatttttcacgccaaccgcgccaatgctttcgcgctggccgatgacgtgatggagccgtttcgcccgatggtcgatctgctcgtcgccgatctcatcgcgagcggcgagaacgccgtaacgcccgatgccaaggcccggctggcgcgcctggcatcagcggatttcgacatgccggatggcacggtctcgccgctcgatctggcaatgcagaagctgacgcaatcactcgcagtgagttttgaaaccggcaaggccgtgctcgacctgccgatacggccagcgatggttgcgtccggggacgcaggcgataccccatgaccaagcgatcggcgagagcgaataccgggccgtcgacattgagcggatacaggctgatgtggatgctgatcactttcgatcttcctgtcgaaacgaagaagcagcgcgcggcggcaaccagattccgccactcgctgcttgatctcggctttgagatgagtcagctttccaattatctgcgtttctgcaacggcaaggagcagttcgcttcctatgtccgcaagatcgaggcgattctgccgccttggggtgacatctatgtcttccagttcaccgatcgccagtacgaaaatatcgtccgcttctcagatcaacggcggcggcgacagcagaaaaatcctgaacaaatggcgcttttctgagccagaccgggaaaatgccatacccgatgccggaaaattcctgagtaaagtcaggaagatctccggacatcgagcgtagcagttcagaaaacgcggtccagcggcaactggatcggatgccagaaggtctccccgggcagcgtagcagttcagaaaacgcggtccagcggcaacggcgcggcgactgccgccaagggaatctatagcgtagcagttcagaaaacgcggtccagcggcaacgaacaatcctccttggctcagcatcctgtgagcgtagcagttcagaaaacgcggtccagcggcaactgtccgggatatccgccccgcccggctcatagcgtagcagttcagaaaacgcggtccagcggcaacttcgaagcagcagccgcgccaagcggcgctagcgtagcagttcagaaaacgcggtccagcggcaactgctgaagccagcgggcgggggtggtttctagcgtagcagttcagaaaacgcggtccagcggcaactttttgtcaatgcatccgagccacaaccagagcgtagcagttcagaaaacgcggtccagcggcaacagttgccggcgcaggccgattgtcattggcagcgtagcagttcagaaaacgcggtccagcggcaacaacaggccgttgctcaggcgttgttgggtcaagcgtagcagttcagaaaacgcggtccagcggcaacgcccaatcgtcaatggcgtgatcgacggctagcgtagcagttcagaaaacgcggtccagcggcaacggtcatctgcttcatgaagaagtagacgccagcgtagcagttcagaaaacgcggtccagcggcaacgactgcatccatatcccgctatcgccgcttagcgtagcagttcagaaaacgcggtccagcggcaacccatctaggctcagaagtagcacagtttgtagcgtagcagttcagaaaacgcggtccagcggcaacttgcttgaactcgattgaaggtgatggctgagcgtagcagttcagaaaacgcggtccagcggcaacgccgcacgccgccgtgctgtcgatctttcgagcgtagcagttcagaaaacgcggtccagcggcaacggtgccatgtggggtagcgctctcgcgatcagcgtagcagttcagaaaacgcggtccagcggcaaccgctgctgccgcaccgtcgttatggggcctagcgtagcagttcagaaaacgcggtccagcggcaacatcggccggacggtctatcgtcatggcatagcgtagcagttcagaaaacgcggtccagcggcaacactgcggcgaagcgctcggttttcagattaagcgtagcagttcagaaaacgcggtccagcggcaacagagcagccgtcgaagctaaatgatgcagaagcgtagcagttcagaaaacgcggtccagcggcaacacaacaagccaatgatagcgccgagcacagagcgtagcagttcagaaaacgcggtccagcggcaacagcatcccgcggcggcacgagtgagcctgaagcgtagcagttcagaaaacgcggtccagcggcaacgccattatgccgcttccttcatgccgtaggagcgtagcagttcagaaaacgcggtccagcggcaaccactttcacgcgcgtccacaattcaaaataagcgtagcagttcagaaaacgcggtccagcggcaaccaactggctcagcttgcgcagagccggcgcagcgtagcagttcagaaaacgcggtccagcggcaacaagcgcatttagcccagcagttttcagtgcagcgtagcagttcagaaaacgcggtccagcggcaacagccccgccccgacccacggcatgaactcaagcgtagcagttcagaaaacgcggtccagcggcaactccgcttgacgacgatgcccttttcacgggagcgtagcagttcagaaaacgcggtccagcggcaactgcccgcctcgtactgtgccggcgtgatccagcgtagcagttcagaaaacgcggtccagcggcaaccatcgaggccggcgccgtcaaacataagtgagcgtagcagttcagaaaacgcggtccagcggcaacagctttagcagccgccgcg

SEQ ID NO: 3037 - DNA, 5772 bp, synthetic construct
  misc_feature 1..5772: note = Synthetic
  source 1..5772: mol_type = other DNA
tgctggaccgtgtcatcgatacggtgcccggccgcctcagcgatgaattctgacctgtgggtttgggaggaagtccgtcagggcttcctcctttccttttgctcgtcgtccggttctgaacatgccggtcagcacaggacggcaggttttccacgtcaccccggggcataggaacgatcgcaattgtcgagatccttcgtcatcccgatggcattttaggcggcgggttcgattgcccccgcccacgtgagcgaggttatgaaagagctgagcgaacgtgccgccgagcagatctgcaatcagattggcgcaggcaggtgagattgaacccgctgatcagccaaatcaggtttgactgaggtaaagcaatccatcgccaacatgaagcgccccgcagaaaccttgtatggccacgccgacggcacaacgccgaacccaaaagggtcgccccgcaggacgaccctaatttggtgcagttccaaccacttgttagcgatcaggccgcgatctcacgaatgcaaatcggctaaacatcttgtaatacagagtcaaggccaactggagcacacttcaaggggcagctgaaaccaagcgctggcgtcgttctgcaggatggtaccacgcctattggatcaaagggatcaatatctgggagttgatttgaaggttccgttgtctgtagggaaaaatcggggagggtacttcatgcccccgctggttgcatcccgcgatagaccagccttatcctctcgtgtgttgtcggcttctgccagccgggctggggttgggctgacctgacaagagggcaatttcaaccatgacctaccggcttggcattgatctgggcaccaattcgctgggctggtgcgcgcttgatctggcctctgatggcacgcctgcgggggtgcgcgatggtggggtgcggatcttttcagacgggcgtgaagccaagaccggcgcgtcgcttgctgcggatcgccgcaacgcgcgcgcagtgcgccgccgccgcgaccgataccttcgccgccgcacagtactccttgaggagatgacccggcacggactaatgcccactgatgaggctgatcgcaaggcgctcgaactgatcgatccctatcatatccgcgccattgcgttggaccaaatggtgccggtgcatttcctgggtcgggccctgttccacttgaaccagcggcgcggattcaagtccaatcgcaaggccactcgcgctgccgacgatgccgacctgggcgttgtcgccaagggcaacgaaaacctcgatgcggccatgcaggcggcctgcgcgcgcacctatggtgaatacctggctcgccgccacgcgctcgaccctggcgatcactccgccgccgcgcgtcgcacccgcatccggcgcgatgaaggggaccaggattatgccttttatcccgcccgccgccatctcgaagacgaatttacggcgctgtggcgggcgcagcaaccgcaccacccgaacatcctgaccgaagaagcccgcgcccggctgtatgcgatcatcttctatcagcggccgctcaagagcccgccggtcagccgctgcacttacactgacgagcggcgcatggccaaggcccacccgctgttccagcgcctgcgattggtgaaggaggtcaatgaactcactatcaatgaaatcggcgaagccccccgtccgctcacccttgaacaacgcgacaaaatccttcgggcatggcgcacgccgaccgaaaccaagcgtagcatgacctggggggcgctgcgcaaggcggccggcctgccgcgcagcagccgcttcgagggcgaagaccgtcgcggcaaggggctggttggcgacgaggttgaggccgagctggtcaagctctacggccccggatggcgcgcgctttcgccggacggacagtggcgcatcatcgaacggttgaaggaggaaccggacgaagctgcgctcctcgccttcctgcgaacctatgtcggccttgacgatgcccgcgcccgcgccgtcgcacgcgtgcgcttgcccgacggctacggacggatcggagccaccgccgccgcccgcatccttgctgagctcgaagccgctgtaatccctgaaagcgaggctgcggcgcgctgcgggtggcaccacaacgaccatcgcaccgggagggtttgggaggcgttgccctattacgggcagatactcgaccgtcaaatcccgccggggacgcaagacccggatgacagccccgaggattgctatggccggatcaccagccccaccgtccatgttgggctgggccagctgcggcgggtaatcaacgtgatcctcacccgtcatggtccgccgcacgaaatcgtcatggaactcgcccgcgatctcaagctttccggagacgagaaggccgaaatcaaccgcgcaatccgtcgcaacaccgccgcggcgatcaggcgcggcacgatgctggaagagctcgggatctctaacaccggtggcaaccgggtcatcctgcaattttgggaagacctccaccccgaccccaaggcacgggtatgcatctacaccggtctgccgatcagcatcgagatgctttttacgggcgagaccgacatcgatcacatcctgccgatcgggctgacgttggacgacagtaacgccaacaagctgctgtgcatcgctgccgccaaacgcggcaaggccaaccgcgcgcccttcgacgccttcggcaccggcgcagaatgggaggcgatcctcacccgcgcgcagaacctgccgcacaacaagcgctggcgctttgcccccgacgcgctgacccggttcggggacgggagcggcctcatcgcccgccagctcaccgacacgcagtatctctcgcgcatggcgaaggaatatctcagtgcgctctatcccgacagccaagagggcagtcaacatgtgcgcgtgatcccgggccggctgaccgagatgctgcgccgcaactgggggctcaatagcctgctccacgatcacaactatacccagacggccaagcgcaagaaccggctcgatcaccgccatcacctgatcgacgccttcgtcaccgcgctgaccgaccagagcctgatgcagaaggttgcgtgcgcggccgggcgcaatgacgaactgggtatggtgcacatcttcaaggacatgcccgaaccatggccgggttttcgcgaggagttgaaggctctattggatcgtacggtcgtgagccacaagcccgatcatggcagcatcgccagcgccgctgatcgcgcgaaaggcagagacagaaccgccgggcagctgcacaatgataccgcctacggcctgaccggcgagtccgacgaaaaaggcaacgccatcgtggtgcgccgcgtgccgctgctctcgctcgacaacgatgagaagattgcggccgtgcgcgacgatcaccttcgcggcgaactgatgcaggcgcttgccggaaagagcgggcaggaacgcgaagcggcacttcgtcgctttgccaaggagcaccccgtgtaccgcgacacccgcagggtgcgcgtgaccgaaccgctcaagacggtgaacatccgcgatcatgatgggcgggcttacaagggttacaaaggcgatgccaactaccgctacgatgtctggcggatgccagatggcaagtggagcgccaaggtggtgacgatgtttgaggcgcatcagacatctgcgggccaggggctggaatggcgccctcatccggcggcaaagcgggtgatgcgtctgcaccagcatgacatggtggcaatcgaccatccgcagcacggcgaatgcatttgccgagtggtcaaattcaccgagaaggggcagatcacatttgctcgccacaacgaggctggagccttgaaacgtcgggacagcgatccggacgacccgttcaagtatttctcccccacgacagggggcctgaagaaagcccgtgcgcggcagattcgcatcgacgagacagggcgcgtctgggatcccggtccgcacgattgagtactgttaaccaggcagaacttagctgtgccaccgatccaagcggtgcccgaaggaggctccgatggtgcccgagcgcattgtcgatattccaggcgagagcagacacctatctctcacccggggattgatcgccgtctcgcacgaacacgaggaatgagccgcgcggcacctgacgacatcttcgtgcgaattgttcacgagtatagcacagcgctcagcgccaacgtgctggccgcggtcgcaaagtgccgtgttttcgactttctgtgcgatcaggcacacaccccaaccgcctgcgggcgggcgctgcctggccaccatgcgcaaggcgggatccggcgatcccgacaatctggaagcgcatgcggcatgccactactggctttgactgatctgcccggatcttcaccgctatcagggcagatctgctatagcattcatgagatcgcggcctaaccgcagcctgcgcctaagcgtataggccaatggggaacgcatagcattggtgaggccgcggcccaaccccagatcagctgccgatcaatccctcatgaagctctgcccgccatagacatgcagacctgcatccaatgacggtaactcaggcgcggcagaacgctcttcgatgctctcgccgctagggactctagaggggacatcggcagcgattccccgttcgacgtcagaccggcaccgtagatgaattttaccgcatcagatggtttttcaaaaggtaggagccagccttccggctgctcgggttgctcctcgtgcacactttcgagcgagacactggcggaatgaagccaaacaggctgcttcatccggtcttctcctctgaccgcgaaagagtcgaaaccaacttgagtgtcgtgaggcctttctgcaggagccctgatctcataaaatctgccgcgaccactgatcgaaatcttcgcccgcaattcgccatgtgagcatggctgtctgtttccgcggcgccgacacgaagccctggcagaaatttcccctcgggcgccattgcggctacggaatacctcggttcccggtagcttaggactccatcacgggcaggaatatttgtcgagacctgacctgaaattggtggacagatctacgcacaccctacgcgacggatcgcagcatctattggtacaaataatcattataaaacagaggtatgatgagcgcgctctggaaatggcagcttcccaatcagatttggacaggcctcgatccgccaatcaactctgattgaacgcctgccagagtggcggaattccgccaatgccaatgttcttgacatgttctcatttctgaattagttcttctctcgcctttcgcagtgcgttccgggctcctcatcacaaggagtccgtgcatgacacggccaaaatctctccaagtccatgtctcgttcgagcttgccgagcgggttcgaagtgcggccgagcgccgcgatatcagcgtaagcgaatggatccgctcgctgttgcagcaagcctgcgacgaggacgatctcaaggtcggcctgagtgcctggatgcagcggatgcaccgtcaggccctcttcacggtggtgggcatcgacgcgctgctttcgggccattcagaccctgacttgcgcgatcgtgcacgcggggcttacgcccgcaggtgcgcagaattcggccttgtgcagacgcccatcgagggagggttcgatgaagcgtaacctcgacaatttcacgcgcggaagccagctcctcgggcac

SEQ ID NO: 3038 - DNA, 5442 bp, synthetic construct
  misc_feature 1..5442: note = Synthetic
  source 1..5442: mol_type = other DNA
gttcaggcagaaaatccactcatctcaactgtgcagatttgtgaggccggctctcttcattcgccagaaacgcttcccgttcgtttgcacatgaagatagaggccagcgccatcggcgattttgtatggcttctcgcgcggttcggcgctgcttactgcaaagtcagaaagtgccattggggggggcgcaagttcgatcggtttcgatacccctgcatactacccccaactttttgcgctgcaagggcccgccatgcgcaggcatgtgcatcgggatacgcccaaggcgttgaaactaggccgcttttaagcagttatgttcaatcttggaaagggtagctggtgccaggggcggaatccatatctcacgccaacccactgaaaaaaatattttattagatacaacttatttacacgtaccccattatttacccctgaattcaaccatagaggtggttcgattcccaaaacactaccactgataatcaaggcgacacatatgtaaacgcgatacttgagaacgaaaccgctcacgaaaaagccagcgccggagcgctggccttatctggtgctgttccagcttgttaacggctggaccgcgttttctgaacatcccaacttgccaaaacataaacgtgctgtcaaccttgcccgcaattcaagcgattggagcgaccggcgatggttcagactattcgaacccttggcatcgatctcggcaccaattcgctcggctggtgctttgtagaaacaatcggcgaaccggggcagacacctgaaggccggattgtcggcatcggcgtgcggattttctcgcaggccgagatggctgggcgtgacccgcaatcgaaaacgtcgctagcggtcgcccggcgcgaagctcgggcgatgcgccggcggcgcgaccgatatctgtcgcgccgaagcgcgctgcttcgaaccttgaccgaattcggactgatgcccgccgacgaagttgcgcgccagaaactcctcgcgtcaaccggagacggtcagtacggtgcattggacaacagtgttcacggattgcgggcccgcgcgctcgatgcaccgctctacgcgcatcaaatcggccgcgtcctgttccaactcaaccagcgccgcggattcaagtcgaaccgcaaaaccgatcgcaaggacaacgaggccggaaagatcgcgattggagtatcgaggcttggacgcgcaatgagtgaaaccgattctcgcacctacggggagtttctcttcaagcgccgtaaggatggcaattccgtccgcacgcggctgcggccggaaaccggcgacgattcgaatggggaaggatatgactattacccctcgcgagcggcgttggaagccgagttcgatgcgatctgcgaaaagcaggctgagtttcacccggccctgttgactccggagcgaatcggattgttgcgcgacatcatgtttttccaacgaccgctcaaagcaccgaagccaggaaaatgcagctataatccggccgaagagcgcatgccgaaggcgcatccgctatttcagtctttccggctctacaaggaagtcaacgagctcgaagtgattggcgaagaccagacttcccgcaagctgaagccggaccagcgcgatgctctggcgatggaactgcgttcgaaaaaaagcgcaactttctcagtgttgcgcaagcgcttgaggctcccgcaagggacgcgtttcaacaaggagagtgaaaaccgcaccaaattggtcggtgacgaagtccatgcttcgcttgctgatcagagcgcttttggtaatcgctgggtcgagtttccgattgagcggcagtgggagatactttcgaggcttcgcaatgaggaagaccgagacgtgctcgtcaactggctggttgatcattgcggtcttcatgctgatgaggcgaggttcgtcgccgacatcaatctgccagagggttacggacgtttgggggagtcagcgctcatggcacttctggacgcgcttaaaaacgagaccgacgacagtggtttcgtgattaccgaagccgaagcggctatacgggtttacggccgcaccaattcggaggacgatcccaaccgcggaggattggatttccttccgaactaccaggaagtcctcgaacggcatattccgcccggaagcggagatccggacgatccctatgatgatttcaagggcaggataaccaatcctacagtgcacatcgcacttaatcagttgcgccgcgtcgtcaacgcaatcattcgtcggcacggcaggccggatcgaattgccattgaactcgggcgcgaactgaaactcaacgagaagcagcgcgaggctatcaaccgggatatcggcaagaacactcgtgaggcgcaagccaggtctgacaagctgaaagagttggggcagccggacacggggtacaaccgaatgcggttgaagctttgggaggaactcaacccgaaggaaccactcaacagggtttgcgtgtattccggcgaaccgatcagcatcggtatgctgttcagcgacgaggtggatgtcgaccacatcctcccatattcgaggacgctcgacgacggtcagtccaatcgaattttgtgcaaagcgcatgcaaaccggcaaaaacgcaatcgcgcgccggccgatgtgccagagtggtcatcccggtacgacgccatactgacgcgcgcgggcaatctgccgcgcaacaagcaatggcgatttgcggtaaacgctatggagaagttttccgacgaagaagggttcatggcgcggcagttaacagacactcagtatgtgtcgcgcatggcgctgagctatcttgccgcgctctacccggcagaagaagccgacatccagggcgtattgcggcgccacaaccacgttcgcgcgttgcctggccgcatgaccgagctgctgcggagaaagtgggaactgaaccagcttctgcccgatcacaactactcagatccggtcaaacagaagaatcgtctcgatcatcgccatcatgccatcgacgcagcggtaatcgcctgcaccagccgggcattgatccagaaactagcgaccgcgtctgccgccgaagaggaaagggggaccgagcgggtgatcgccgatgtggaaatgccttggccaagctttcgcgacgaactgcgagaagcgattgccagcaccgtggtcagccacaagcccgatcacggcacggtgtcccgatcgggccttgctactggaaaaggccagaccgccggcaagctgcacaatgataccgcctacggcctgaccggcgagaaggacaacaagggtaacgacctggtcgttcggcgcaagccgattggcggattcaaaaagccgtccgatctgcatgccattcgggatcgccagcttcgcgaaacgctttgggaagagacgagaggcctgagtggcaaggagttcgagcaggcgttgctgcggttttcgaggcaaccgaaactcaatggaaagccgaatcccttccgcaacctgcgtcatgtccgcatcgtcgaaccgctgcagacaatacacgtccgcgacaaatccggccgtgcgtacaagggatacaagggcgactccaaccaccgctatgacgtttggagattgctcgacggcaaatggttagcggaagtggtctccactttcgacgcacatcagccgggatggtcgtccaatgtgcggttgcaacatccgacggcaaggaaaattctcagcctgcatcaaaacgatataatcgccatcgatcgcgatggcgcacgccaactcatgcgtgtcgtaaaattcggagccaatggacaggtgacattggccgcgctgcatgaggccggcaccctcaagacgcgggatgccgacgaaagcgatcctttcaagtacaattccccgacagccggtggcctgaaaaaactgaaggctcgccaggtgcgcgtcgatgaattgggaactgtttttgatccgggaccgcgggattaaccaagagttaacctttatcgggagctcgatccgggaagtgataccatgtcagcatgcaccgaattgtcgacatcgcgacagacggcctgcatttggccgttcatcgtggctttctaataataagcgaaggccgtgtcgagcgcggccgaataccgcttgacgatattggcgcgctgattgtccatgcacatggaacaacctggtcgaacaatgccttagtaaggttcacggaacggaatgtgccggtcgtaatctgcgcacaaaaccattcgccggtggcttgtgtctggcctgtctctggccaccatcttcaaggcgcgcggcttcgttcgcaagcggaagcaaccaaaccgctcaagaagcagatatggcgaaggattgtcgcagcaaaggtgagaatgcagggcgctgtactctgcgcttgcggaaaggaagctggcgctttcgacacgctggcacgcagcgttcgttccggagatccggacaacgtcgaagcgcaagccgcccgacgatactggccgctgctgatgggaaaagagttcagacgcgaccccgcggccgaaggcgcgaacggattgctcaactatggatatacagtagtgcgtgcaatactatcacgcgcgatctgcgctagcggtttgcacccaaccctcggtgttcaccactcaaaccagttcaacgctttcgccctggcggacgatttgatggaaccttaccggccgattgtggacatggcggtcttcaaccttgttgccacgggtgaggtgaccgtcactccgatcacgaaagctgtgctggcctcactcggatcccttgaccttgaaacgcccgaaggcgtcagcccgctttcgactcacgccgtgcgtttgacacattcggtggcgacctcgttcgagcgcgggaagtgcgaactttccctgccggttccgccatctcctctggcattgtcaggcatcggcaaaacggaaattgcatgacgacgcttcatacacagcacaacggggaaggcggagggcccacgcacctttccgcctacaggctcatgtggatacttgtaacattcgatttgcctgtcgagacgaaaaagcagcgaaaggcggctcacgatttccggatgtttctgctcgatcaaggctttgagatgagtcagttttcgaactatcttcgcttctgcaacggtaaggagcagttcgacgcctatgttcgtcgcatcgaaagaaatcttcctgaacgcggccatgtgttcgtgtttcagtttacggaccgacagtatgaaaacattgttcgattctccgaccagtcgcggagacaggcgcagaaaaatcccggacaactggcgcttttctaggtttgcagttcattttctatgtcctatctccggtcgatcacccttttatatcagggagataaccgaagataggagcatagcagttcagaaaacgcgggccaaccgcaact

SEQ ID NO: 3039 - DNA, 23231 bp, synthetic construct
  misc_feature 1..23231: note = Synthetic
  source 1..23231: mol_type = other DNA
agctattttaaaaattattaagctttttagagagctctaacaacaaactgggtagcagcttcaccgctaccctttatgctcaatatatagatattaaaatttttgtcaagcaagaaaaagccctgctcaatcactatgcagggcttaaatattatcataactcctgttatttattatttaataatatatgtgttttattaacagtctgtcgtatatttgaaaaattataaattttgccacacttggcacatgctgtattatcattcatatctgtatatctatacccatgttcatcaatagcttttatatattctgtatcgttagtgaataatagtaaaaaattatttatttcaccacactcacatttaaattgatgtggcaatactcctctttctaaaataaacttataagcatatacaacatcatcaggtatattaatattaattgttctatttatgcgaagtggtggcatcacagctcttctgtatgcaaatatattgcgtctaggtgtatatcttctgttatatctttttttagaataactgcgtcttctcataatttactaaatcttcctatcctgccaaaaggcacggttgtatcctatatgatattctataagcaattgctacttatagatttataaaaaactctttgctgcattaataatatcatcagcataattatatatatcatctatattttctatatcatatatattttctgttttatctttaaatattgttctaatagacaattttttagtattattaaaaaataatttgcaaaaagtttttgtcatcatatcatcaagtctaataccaaaaaaaccttgataatctttatatgtaattctttggaaatctatatcttttcttaataatgcttttattatgttatatccatctatttcttcttgggtagtaacaatcttattattatcttcttcaatgttatcattttgaacttctaattgttgtttttcttcttcttgttttttgtctaaaactcttgtaattctttcagtaaacatatcatcagctacttgtttaatagctttctttgctattatagcaagcatatttaatctttttgttgttagtcttgttttatctacacttttaataataaatgttataaaattatcagtaggggttgtaagttctttttttagtaaagctgtcatttctttcatatattttaattcatttgcggcatcagctgctttatcaacatctaattcatttttatgaaattgttttaactgttctatttgataatctgtaatgtctgtaatatcaaattcaaaaaaaggtgtatcatcaggcttatttggttcttctatatctgtataaaaaagatattttaagccatttgtaaggatagcaaatttaacgctgggcagtgtagtaaaatatctaaacatttgaccatcatattttgtaggacattctttacaatgtttacactctataataattacaggttccccatcttttaacaatgcatagtctacttttccccttttttaatgccaaaatctgcaataaattctggtataacctgcattgggtcataaatatcataacctaactcagcaataaaaggtaatattaaagaatgttttgttgcttcttctgtttgcaaaacatcttgtaattttaatgctctgtttcctaatgctcttaacttatcagataaatctgccataataaatctcctttttcttaacctattctttttgtgggatttatattcatttctttattatattgtttttcaagtattttttgtgcttctaactctatctgtttcacatcttcttcgggtagcttgtcaagggtatcaattaaccactggtatttgctataatcaatattattctcttctttttttataaacatttcaccttcgcctgtgcgaagccagtcaggatttacattaaaagttctttctattagctttaaagatgcttcgcttattgttccacctttttcccatttttgtatagctgcatagctatatcctaactcttttgcaaattttatttgtcccaaattcaatgtttttcttaataaaataattctatctctcataaatatacaactcacttgtatttttctcttaacctatatacaactaggttgtatattataattataaataaaaaattactcttatataaaatataaaaaataaatttattacttatatatattagtaagtttttattaatttgtaaagaaaaaatagggggatattatgacagagcaatatcaaaaattaatgccattattagtatcaaaaggcattactcaaaaaaagattattgaacttactggtgtatcacaagcagcagttagtcaagttattcatggtaaagctagaatttatcgtgtggaacaaatcattactgatttaactggatttgaatttccaccatttaagcaagttccacgcacattaagtgcagcaaataattaagggggtaaaattatggaattagaatttgaagcggatatttatgaaagcatatttaaagaagaaccagtgcaggttttgaacgctggcaaaatctactgtgcttgcgaagacagcccaatggtgatgtttagaaagttagatgtagaagactggaatattatgcctaaaaaagagtttttaaaaaaataccgcaaagtatctaatgattatgattaaaatactttagtgtttaaatacagcataggagcataatatggacttaataaacgaagatactgactaccaagtcaaagactatgactataataataactggatagtttacaatccagaagaaagtgaggactaacatggcattaatatttgaaacagaaaaattcagaaataaagaaaataaagatattgtaatcactcttttaaaaataaatgcagttgatgaagattacaaagagccagcatatatttacaaagcagatgatttatatgcaggctggcatgtatctttaaatgaaaactttttagatgagtatgaaaaagtggaggaagtataatgccaaataaatttcaatacctgtattttaaaaaaatcttatcagttattaaaagctgtaaaaatgaagtgcagttagataatgctcgcaaatggtttgaaaaggtagtgattgcaaataaactgccatcatattttacacccagcattattaaaacatataaggcaaaaaagcagcaaatccaaaatggacttgccgctaaatataattaatctgcaaggggtttaacttctttatgccgtttaaatgacaataatctttcccccattgtcattctgagcctgcggagcaggcgaagaatctaaacagcgaagaatcttaaactacctagatataattgtattaattaattcaaaaaatgcaagaggtaatttttatggctcaaacatataaaaaaatttcagccctttcaaaagggcttgtaattttaaatataataggctcatcctctgtgcctatgatggcaagagatatagccgagcaggctggagttacttattcaacagctatgaataacatcgtaactttaaaagatgctggctttattgaagaacagagcagtggctacattggcagttttaaactggcatctatatggacaaaacgcatgagctatttgaaaagaagaaagcaggtaatcaacgatgaaatagaagcattagaaaaaggaggtgtagaatgagcaaaaaagaaatcatcttacttgttatactttacagcttaattatttttgcagcagctttaactctatttggtgataataccaatagctgtgttgtttctgaagagcagaaagaaaaagcagtattttttaaggagtaagcaatgctggaaagaatagagtttatttatgagaatggagtgcttgtagttgataatgtaaaattacagtttacatctccaaagttcaaaagtgaaataatgaatgcagtgctgcgttccagtgctgcaaactataaaaatgcaggcaaaactcagattgcattttgcagcaatatatctaagcacttaaacaagcagataagcattatatctgacaatgtgttttataacagggagggataaaatgagtaaaaaattatacaaatttgaaatcttagaaaaagataaataccatttttattatgaagatagagatgataattctggtggagctgttgtttataaaaatttaaaaaataatgaatcgtttgagcagtctgaaaaaatagaatctttaaaagatttttatgacacttgcgaaaattttattaaaaatttttggcacttattaccttttggtaaaaatgaaaataataaaaatcgacttgttatgatttcaaatattctttctttaaaagcggacataaaagatacagaagcaactcaaatagacacattcaaacttgaagcagagcagcaggcagctactgcccttgttgaagcaaatatggcacagtttgaagcggaaagacaggaaatcaaagagaaagagcaggcagaaagggaagtattaattgcagaagcatctcgtctgacaggtagagtggaagcatttagctttatttctaaactgacgacggtcggcagtttaatgaccttaaaaaaaataaaagaaagtggagcttataaagaacttccaaactgcaatacttgggctgattattgcagagctattggtttatcaagaacaaaagttgatgaagatctgcaaaatttaaatatttttggtgaagaatttttgacgacggtcggcacttttggtcttggctatcgtgaattaagaagtttatcaaaacaagtcaaaacaggtaatttagaagttaaagaagaaagtgtaattattgatggcgaagtaataccattaaatgataaagatgagcttcgtgatgcactggatactcttttaaaatctaaatacaaagagatagaagaaaaagataaacttttgaaagataaagatatacagctctccgttgtgagagaaacaaaagatggttttgctcgtagaatggataaagctgaagaagaagcagaaaaatataaaaaagagataagtgttttaaataataatatagagcagcttaaaaagaataaacccagctttaaaaatgttagtgaagcagatagtgaagattttaacaaacttttaacccttgaaagcgactggcgagatttatttaattcgcttaaaaatgccaccaatgatgataacttatcaagttttaataaaagcatgctgggtggtattgtagcacaaatattagttatgcttgatgattttagaatgcagctaaatggtaaatcagagttttattttcatggggtaaatatagacgaagagcatttaaataatcagataagcccatctgactttctagcgatgcagaacgaaaaataaacttatatattgtcattctgagcctttaggcgaagaatttaaaaaggatataaaaaatggataaagaaacaactataattttagaaaaattaaataataccactgatgagctgataactgcaacagtaaaagagctttccagtgagcttaatttatcagttgcttctatctggcgtaaagctaataaagcaggctttcgtgttcgcaaagagcgggcagataaaaacaaaacggtaataagtgaagatataataaattatatagcatcaagagtattaatatcaaggcgtagaaataggcagtttactaattctataaaaaaagcctatgaagattacgaaaaagaatatggcaaaatagaagcaggatatgagcgaatatgtgctattttacgccaaagagggcttgataagattgctttaaatcttcctacacctgcacttaaactttttagcctgcaccctaaccatgtgcatctttttgatgttacaaactgtctgcaatggcattttaaaaataaaggtggcttatcagaacgagatgtagaaaaaatcttttatcaaaataaagtagtgcgtgttgctaaaaaaataagacaggagcttttaaggtttgttttaatagaccataaaagcggagcatttttcttttggtattattacacctcaggtgaaaaagcatctgatggtttagattttttcagcaaggcttggggagataaaaaagagttaataaaaaatacattaggtatatcagattataacggcaagtatcagtttcaagggctgccaaaaatactttattctgacaaaggctcaatattaaaaaataaagcaatgcttaatatgatggaagctttaggagtagaagtgcaaacccatgaagcaggtaaccctcgtgcaaaaggtgctgttgaaggtttaatgcgtataattggttatgactttgaaagcgatttaaaaactcataatatcaggggtttagaagccttaaatgcttttgctcttaactggtgtttgcaaagaaatgaaaaggcagcttttagagggggcactatttcccgcatagatttttggcggaaaataaaacaagatgaacttattatttcccccgattatgaagtgtttaaaaaattataccataaacctgaagtatcacgagtatgcactattcaaggcattattaattttgaaggcagaaaatactcatgccctgatactaatgcctatggtaaaactgtgcttataaaagttaatgcattagaataccctgccatagatattcattttaatggttatgtttataaaacagagccgctggaaatagatgaatataataatattattcttcctaatatggcgacatttggcagctttaatgcccttaaaaaaacagagttgcagtataaaaaagaagagttagagcagtttgcaagtgaaaaatggggtgtagaatataaaggtaaaaaagataaaaaaatcgcacttccaagtgataacactcctagtgctgaaatagaaataaagcaggataatattgcatatcttccaaaagcaggcaaagaggcagaaataaaagatagttctgagccagtaactgcaccaattgcagcacatgtcattcttagcgatagagaagaatctaaaaaacctatattaatacctttaatgcaggcaatagatttagttatatcagaatatggcaaggttacacctgttatgaataaaaatttaaaaattttatatccaaaaggagtgccagcagagcttacagcaacagatatttataatgctataaataaacctgctgtggtggaggtgaaacatgcataatataaaagcagaaattacaaaaaacaatatatcgctttctaaaattgtaaatatttttaaaagtgaaacagggcaaaatttaagcaaatctgcattatctttatttttaaataaaggtatagagcctaaaaaaataaataatttgcaggaaaaattaaaacaagttttaaaaaaaataaaaagttcaggaggaagaactatgataccatcaatttatttatctaatgaagcaagacagcattttaaactaaaaagcgacccatttgcaccatatctgacaaaattaagcgatattataatgctgcaatctcattattatgcagatgaaatgctaaaaactgcagctaatgcctgcatgtttgcaataatcactggcgaagtaggaagtggcaaaacaactgtgaaagataagtttttagaagaaaataaaagcactaatcgctttacaccaataatacctgaaagcgatgctgggcatttaacagctcgcgaaatattaaatgccattgtttatgagctttcaggtgatactccaaaaagaaatatggaagcactagctatacaagtcaaaaaacttttaaaacaaaggcaaaaagcgggtgaaaaagttgtactaataattgacgaagcacaagatttacatacccaaacactgaaatatattaaaagactgtgggagaaaaaagagggcttaactgctcttttaggtattgcattgataggtcagccagagtttgcaacaaggctttacggacagagcaatgctgaaatccgtgaagttgtagcaagaacaactcatatagcattagagcctataaataacgaattacaggcatatctatctcataaaattaagcaggctggtggaaatatatcaaacattattactgatgatgcagttgcttgtttaagcgagaaacttactctgcaagatagaaataataaagtgcaacaaatagcctaccctcttgaaacaggaaatattatgaagatgcttatgaataaatgtgtcataatcggtgaagaagttattacaaaagaattggttgaaagcataaaattataggaggtgccttatgtatgtaagattatcagatattgaaaaagcagcaagagatttttctgcaaaaagcaaagtattaagaaattatcacgaacaattaaacagcgaaatagatgctgttaagtcaaaatatttggaagatattaaagcggcatctgtggaagctggtgaaagttatcaaatgcttttaactttaattaatgatgctcatgatttatttaaagagaaaaaaagtatgactgtttcaaatgttaaatttggctatcaaaagaaaaaaggtaaaatagaaataataaatgaagatgctactattaataaattaaaagagctttatggtgataatgctgctctttatataaatacaaaattatcagtagtaaaaaaagcattagacagtcttccagcatcagatttaaaaaagcttggtgtaaacatagtgcatgacactgatgtggcttttgtaaaattaactgatgatgaagtgcaaaagctcattgaagctatgataaaagaaagtgccaaggttgcggaatgactgttaaataattccccattctgcttattatcttagatttatgtgctgcaggtgtttatctgtggcacggagatatcaggcactttatatactgggttgcagcaggcacacttactgcaacagttacattttaataggtgtaatatgaaaaaaaatgcagataaaaaacaacttcaattaatacatatcgcaaaaacacaactagctcttgacgatgaaacatacagggaaacactgcaatatagatataatgtatcatcatctaaagatttaacttataatcaggcaagtaactttattggctttttatcagaaaaagggtttaaatttaaaaagaaatcttgcaccttaaaagcaaaaaaagctgataatctaatagagcttgcaacacctgcacagcacagattaattgatgtgcttaaaaataatattgtatggaaatatgaaaatggttatgagctttatattcaaaaaagattaaaaattaataaagtcataacaaagtctgatgcctttaaagttattaatgctctaaaaggtttgcttggtattaatacaaaaattatagagctgcaggctctgcctttcccatggaatccagaaactaagtggtttaataattcaaactgggcttggttttttgatatttcaaaaagcaggcttgtgaaattaaatgtttatggggaggaagttgtatgagtgaccaaaaaattaactatgatttatccatgcttactattaatgattttagtgaagggtttaaagatattgttgaaggtataggcattgaagcagcatataaattatgtgagctttatggcggtctttcaatatatgttccaaaagtggaatacttaaccaaaaggcttcgttacttgagtattcaagatgattataaaaaaggggtatcttttgtagagctggcaaaaaagtatgatataagtttaaaccatattagagttatttgcctgcatactcgtatcaagtctgcgagtattgaagattatttagataaagattaaaaaatggtgggtgtgatggaagcccacctttaaaaatttttgtatagttagtgtataataagagcataataaatgctaaaaaaataccctccaaaaaagttaaaatcgttttaagtttttaaaaattgtatagtcattgtatagtagttgcatagtcctgcaatatgcttatctcgctattccgttattttttatctcacctccttatagaaattcattaaaatatcgtttaggtcttgatttaggtactaattctataggctggtgtatgcttaggttaaatagtgataatgagccaactgcagttattaaatcaggtgttaggatatttcatgatggaagaaatgaaaaaacaaaagaacctttagcagtggttcgcagaaatgcacgcagtattagaagaaatcttgatagaaaaatatctcgcagaaatcatttattaaatacattaataaaatacagcatactgccgtcagatgaaaatgaaagaaaagcattagctgttttaaacccttatgaattaagaagcagagcagcaaatgaaaaaatagaattatttgagcttggaagaagtttaatgcatctttcaaaacgcagagggtttaaaagtaatagaaaagttgataaagaggaaagcagcggcaaaataaaacctgcaatagaaagattaaaaaataaaatgcaggaaactgataaaaaaacagctggtgagtatttatattttcttttgcagaatggtcaatctgttagagcccgccttggtaaaattgatggaaaagaaggatatgaaatatatttagacaggtctataatagaagaagaatataatatcataatgaatgagcagaaaaaatatcataaagaattaactgatgatattcttaatgaaatatttaacataatcttttatcaaagacaattaaaaccgcagaaagtgggtaaatgcagccttgtaccagaagaaaccaaactaagaaaagctcatgtgcttgcacaatcttttattttgttacagaaagtgcaggatttacgagtatttgataataatatgttagaatttagaccattaaacaatgatgaaaaagaaattcttaaaagggaattaaaagtaaaaaaagaaatatcttatgaaaatataaggaaacttttaaagaaatattatgaaaatggtaaatatggaatgttttcccatgaaactacagatggaaagctgcaaggtaataaaacaaatgctataatgtctagtaaagatattataggtgacatctggaatcgtttatcaccagaagttcagtatgacataatagaagaattatattctgataaagataatgatgaattaagtaaattatattctgaaaaatttaaattaaatgaaagccagatacaagggttattaaataaagcagtatataagcttgacagtggatatatcaggtatggaaaaacagcagttgaaaaactaaacagcataatggataaagataatttagatttacattatgctagagaaaaagcaggctttggaaaggaaaatataccagctgcatctgaatttttggaatattatggtaaagttcttccaaatagtgtaatagacccacagatagaaaaccctaaaaatgatgaagaaatatatggtaaaatagcaaacccaacagcccatgcagcattaaatcagttaagaaagctggttaatgaattaattaagctgtatggtaaaccagagcagattgttatagaattagccagagatttaaaaaacagcagaaaagcaaaagatttaattaagaaaaaaatagcagaaaataaaaaacttaatgaagaagtagataaaattattcaagaatattcagaaacacaccatacccaaattgtaaaaaataaattaaacagggataaagttaaattatggctggaactttcaaaagatgtattggaaaggaaatgcatatatacaggtgagcaaataagtatatcaaaattatttagtgatgatgtgcagattgagcatattataccatattctaaaacactagatgacagtatgaataataaaactttatctatgaaaaaagctaactattataaaggcaataaaactccttatgaagcatttaaggatagcaaagatggctataattatgatgacatattagcgagagccaaacttttaaataataatagtaaatttaaaagatttacaaaagatgctatggatatttacaataaagatggtaaagattttattgcaaggcagttggcagatactcagtatttatctaaactggcacttagctatttacagtctttatatgcagaagataaatacagttctctttggactattccaggtcagcttacagcacttattcgtaattatttaggattaaatacattaatttctgaagatgatagtaaaaatagaagcgaccacagacatcatgcagtagatgcttttgtggtagccataacaagccgctctttactgcaaaaaatatcttatgcagcatcattgcaggaagatttagataatagaaatttatcatcatatagaaataaattacttgaaaaaatgccagaaccttttccaaattatagaaaaagtctgcagctttctattaataatatcaaaacttctcataaggcagatagaagcatatctggtaaattacatgaagatactgcttatggtatcgttgaagataatgataaatataatgttgtaacaagatggacattagataaattcaaagaaaaaaaacattttgaaatgataagagataatgaattaaaggaaattgcatgcagcgataatgaattgtttaaaaagattattgaaacaagaaaaataaaaagtataagaaagctggcatcggaaaatcctgtaattacaataaaagataaatctggcagagattataaagcctttgcaggtggcaataatatttgtgtagagatatatgaagcagacggtgtaagaaaatcagaagttatacagttatttgatgcggcacaaaaagatttcaagccagcatggatgaataaatatcctaatggaaaattacttatgcgattatttaaaggtgatgtaataggatttatagataaagaaaaaggaagaaataaagtgtattatgttgttcagcagattagacaaaaagctaatgatttaggattaattttactgaattctactggatatgttaaagaaaatggcaaagaaaaagaaataaaaaaatgtatttatataggtttcaataaacttttcaataagtataatgcgaaacaatttaatataagcattacaggtattgttagtaaaaagaaaactgctgatattaatttttggaaaaatagaaagtgaatcaacgaataatagaaataactgatatgcaggcacatttaagcctgcatagaggttttttaaaagtcagtataaaagatggtaaagattatgaaataccattatatgatattggcggcatagtcagcaactcatatagtataacatacagcagcagcctgcttgctaaattagcagagctaaacataccatttattatatgtggagccaatcactctccagctgcttttttatggccagtagaaacccattctttaatgtctgcaaagatagataaccaaataaatacacgaaaaagtttttatgagaaaatatggcaggatattatacaaataaaaatttataatcagtcagtatgtttaagtagtttagaaaaagatgatagagcattaaaagcacttgtaaaaaaagtgagtattggtgatagagaaaatattgaggcacaagctgcaaaagtatactggaataaattatttggtgatgattttataagagataaaaatgctgaaggcattaatactttactaaattatggctataccattttacgctctggtatagcaaggtctataatgggagcagggcttcatcctgctattggcatatttcataaaaataaatataattctatgcgtctagcagatgatttaatggagccatttagaccaatagttgattattttgtatataaattcagcgaacagggaatgtatgaattaacacctgatataaaagaaaaaattgtgaatatattatatttagatttagatggtccccgcggcagaagtccaataataaatagaatgcagtcattggcatatacttatgcatattcattagaaacattaaagaaaaatttagatttaccgatacttaaaataagtgatttatgtaataaaaattaacaggttacttatatgacttatttaagtgggtatagacttatgtggataatagttttgtttgatttgccagttactacagaaaaagagcgtaaaaaagcaactaaatttagaaattttttattagataacagctttgaaatggtgcagttttcagtatatatgcgtccatgcccaagtaaagagcatgtagaaaggcttgtgaagttaatagaaaataatgtgccagaagatggcaaagtggatattctgcctattacagataagcagtatgaaaatattgtcactatccgtggcagaaataagctgcagagaaataacccaaaccaatatattttattccagccagatattgagcattttttaccagaaagtgcaaatttataagtaaaaataaaaaaatatttccttaaaaataatggataaaccccttataatcaaggggtttattgctgacctattataacatattaaatattgtggtcaatacagaactaacattgatacttctaaaaaattcattccattataacatattaaatattgtggtcaatacagaacaatggtggtttatcacctaatagtaagattattataacatattaaatattgtggtcaatacagaactaaccataccgctaaaggtggtttccgtggattataacatattaaatattgtggtcaatacagaacagatggttatgttaaaggtgattggggaacattataacatattaaatattgtggtcaatacagaactcatgatgttaaaattcgttactttgccgtattataacatattaaatattgtggtcaatacagaactcggcgatcaggctggtcatcaaattgcaattataacatattaaatattgtggtcaatacagaactcgttgaaagatctcacgctgaagttgtttattataacatattaaatattgtggtcaatacagaacgcgaacttcgtttggtttttggtttagatcattataacatattaaatattgtggtcaatacagaactcaacgcgaagataacgctattcgtcgtcgattataacatattaaatattgtggtcaatacagaacgattaattcaaacttaccttatactcaaagattataacatattaaatattgtggtcaatacagaacagacggttatgttataggttggtggggaacattataacatattaaatattgtggtcaatacagaacttatcattaaaattatcaatcataccacgaattataacatattaaatattgtggtcaatacagaacggagctcttaagccaaatatgattaaatgaattataacatattaaatattgtggtcaatacagaacttcaatcgatgaagatttatgtgatagttcattataacatattaaatattgtggtcaatacagaacctcctgctcttgtaaacttacctcgcgattattataacatattaaatattgtggtcaatacagaactgatgcttctaatgatactcataatgttacattataacatattaaatattgtggtcaatacagaactcaagcaaaatattaattatggttcgtattattataacatattaaatattgtggtcaatacagaacggtaatcaatatcctatatatacatctgaaattataacatattaaatattgtggtcaatacagaacggtttaggccttcaatggttattatgtcatattataacatattaaatattgtggtcaatacagaaccggcttcgcctctgaatgacaaggtatgttattataacatattaaatattgtggtcaatacagaaccatatatcctcgcgaacttcgtctagttttattataacatattaaatattgtggtcaatacagaacaaaagttttgcgatgtctttttttgcaacaattataacatattaaatattgtggtcaatacagaacagcaaagcctgctacattagcaataccgccattataacatattaaatattgtggtcaatacagaacttgaggtttattgttatggatatggcaagtattataacatattaaatattgtggtcaatacagaacttctgccgttttcttttacctgttcaatatattataacatattaaatattgtggtcaatacagaacaacaggctcatttggaacaatagtttataaattataacatattaaatattgtggtcaatacagaacatgagaaaatttataaagaaaaacatggtaattataacatattaaatattgtggtcaatacagaacccgtaggtgaatatggtgataaaaaacatcattataacatattaaatattgtggtcaatacagaacccataaggtaaatcagtaagaattaagtctattataacatattaaatattgtggtcaatacagaacgacttttactctgaattatataatactactattataacatattaaatactgttgttaactttatattatttttccactacctttccaaataacttattatcttttatttctgtaactactacatatataaacttatttggctctgtatttttatcataatgtataagcatatagttttctgtatgacctttattgcctttttctgagagaactctatatgttttgcctattgatttgttatataaatgcataaggcttttaaacccatgctttcttaataatgcagctctttcttctcttatttttatatccactttattttccatattttctgctgctgtatcttttctttcagaatatgggaaagcatggtaaaactctgtacctgcggactgtaaagttttaagtgtctctttaaaatcatcattagtttcagaaggaaagccagcaataatatctgagcctattgttacattaggtataatatcttttgcttttttaattacctttatatagtcatcttttttatatttcctgcccataagtgataaaattttatcacatccgctttgcagtggaatatgtaagtgggggcatattttttcattatcttttattaaatgtaaaagcctgtcatctatttcattaatttctatacttgtaagccttatgcggaaatcaccttcaatttttacaagttcttctaaaatatcagttatatttaatcctaactctttaccgtaaagccctatatgtattcctacaagcactatttctttatagccaagtgataaaagttttttaaacccgattataacttcattttttggcatactttttggcttacctctaagctctggtattatacagtatgtgcagtaagcatcgcagccatcttgtattttaaaaaatgctcttgttttaatgtttgtatgagataataatgcaccgcctgcaaagctgccctcagatgctttaatatacccgtcagttaaatttaatatatggtttacaagttcactttttgaaccgttagttacaattatatctgcaccatattctttgagtgacacacctttttcttcagtcaggcagcctgtaacaattatttttaagtctttattttcttttcttaatttttctatatagtgggttgactttttagcagctgtttcagtaacagcacatgtgtttataacaacaatatctgcatcatgaattgaagatgcttctttaaagccctgctcaataagctgtgataaataatactgaccttcccctgcatttactttgcagccaaatgtaacaaaatatatattcaatgtatgctcccttataaatatctcttttacaaagtaaaataatatgatattattttgtatgagtaaagaaagaaaagacacaacattcaaaaaattagtaaaattagttatatggcttttagtaatgactgccacagctttagttatttggaagctttatggtaaaatagaccttaaacagacagatttctcaaaagtcactttaaaaaagcaggaacctactctttatgatatgtataaggtaaaaagcgagaaaaaaaacagtcatctttattatgtacacataaacgatatatactgtgatgcttataaattaagagaaacagatatgcagcgttattttaagatagatattgtttttgaagcacataataaaaaagatgctaaagccatagaagaaattacggcacagactgttaatgaaattagaaatatgatgaaacattatcctgtaatagatatagacaggccgtctattatggcatatataaagcgtgacttaaaagctaagatgaataatgttttaaaaaataatgctgttgttgaaatatattttgagagttttctctgtggctagaataaaataagcaccttgacaatggtgcattataatgatagcgtaaaagaacactggggagaatattgtgagacatgtttatgtaaaccttccgcattatgaaggtattgcaaaagaattaaatgagcattttaagctgtgcagtaaaaatgaagcacatgctattgttacggaatttcctgatgaatattctccgtcatgctttgtaattatcataaaagacaaaaacccgcacaacggcagttattttatagacagttcaaatgatatcagttttatcaaaacagcagttcatgcaagtcttgatactttttttatgacaaaaatagcaggcaaatattctccatatatggaaaaagaaggtggtctgcagcgtattacctattttatgaataagttagagcatatattaaattcatcaccagaaagtattgtagagatagacttaactggtaatattttcttttacaacagaaagtttgcaaaagtatatcaggatgatgattttttaatagaagaaaatatatttaaaatatttgatgagaatacagcaacagaagtaaaacgctgtatggggactgcactgcagggctctgattctaatttttcaggcaagctgataaataagaaaggggaaagcataagtattgcaggtcatgttatagcattaagtgatgacagctataattttgaaattatttttgatgatattactactaaaatctcaaagattcttcaaatgcgcaaaatagaagaacagtctattgtggcaggcttttcccgccatttatcccataatgtaaagaatgccttaactgcagcaggcggctttatcaggcagataaaagcaaaaacagaatctgatgctcacatgcagaacttatggaagatagtagataataagctgcttttaatagaagaaataattgatggttataatgattatactcatgcaatatcatttaagcttacagaaaatgttgatatgaatgagtttatgagccagttaattgtgtctttggcagaaaaaaatgtagatagaaattttactgcttatctttataaatttatagacagttatgaattagaatatgatttttcagaaagcaaaccatttcatatacatggcaataaaatatttttaaaattagctgtatgctatattttaaaagataatatccgctatttttttaactgccagtcactgcattataaaatcaaactttcagcaaacagcgatttttttactataaacatagatttagagggtgtggaagttccagattatataattgaaagtatgttcagcccatggaaacatgctatgctttcccaaagttttgactactgggggatagtaattgctgggacaatagtggaaagacatcacggcaaatcaaaggtagagcgtatagagaatggcttaaggtttacttttgaatttaaagcaccacttgcttaataaaaaagtatttatttcttcttaatactgtcccttttttcttttgatgaaactaaaatatttactctcatatcttcatctaaaaattctatggcattcctaagcattattctaggcataaggtggcagcattcatttataaactggaaatatctgctttcactataatttaaaatatttctgcatgcccagcctgctgcacgcataacatactcatctttttcctgaaaaagttccataatgttatttataaggatatctatatctttattagtcaaagacatttctgcaaatactgttacactgcaccgccttaaaagatagtgatgatttaaagcaaagtcatgtagaaaatatttatcattaaatctactgaaagtgttagttgctatctggtcagcaattgcccagttaataataacattgtttaatatataatctttgataagatttattatattttcttcttcaaatttataataatatctttctaaaagcatacaggctatcacttgtttttcaaaagattttgataaaaataactggtttataaggctgtaattattttctgtttcaaggttgtcaaattctggtaaatgttttgagaataaagcctttaaccttttcataggtattccatatataatttctgcttggtttttaagatatattttaatgtttgctatttttttgctgtcagcattatttaaaataaactgctctatgttcctgcaatactgctcaactgctttttccataaaatccttgttttgtttatttttttgttataatatcataaaaaatattattatgatagttataatatatggtgggtaaatattatggcaaaagtgttatcattagatataggtgcatcttcaataaaaagcggacttgttgatgttaatggcattatcagtgaagaaaaacggatagttataaaagaagaatcatattctggctttatagatgcagtaaaaagcattatggcagaaatatctgaaaagcctgcaggtatcgcagcggcacttcctggcggatatgatatagaaaaagatgaaatatttgcaccaaatctgcatatattaaatgggaaacatataagaaatgatttagaaagtatatttaatataaaagtgttggcagaaaatgatgcaaatttagcagcttacggtgaatatgtttttggtgataaaaaatcagtaaaaaatatggtattctgcacattaggttcaggctttggcggcggattaatattaaatgggaagcttttacagtcaaatatttcgttatttgaaataggccatatgtctatagattttcatggcaggcagtgcggctgcggaagatatggctgtttagatgaatactgttctactggcggtttaaaagaaatatataaaaatattacaggcaaagaaataaatcctgttcatttaggtgagcttgcttcaagcggtgatacttatgcattggaagcatttagagaatatggcagactgcttgcaggtgcatttgcaaatatttccgccttattctgccctgaaaaaataaaatttggcggtggactttcagaacttgcagaatattatatgcagacactggaagaagaatttaataaaattatatttccatcatataaaggcagggtaaaaatagagcgtgcagtattaaaaaatcaggcaggcatggcaggtggtgcagctttattttttgagctttaaattagatattttgcaggaatacctttaagatatggtatattatcgttattataaattgcttctttttggtaaagtgcaaaggctggtgcagtaggtccagctactcttctatctttctgctctataattttaataacagtttcaggctttaagttatcttttactatttttaaggctgtacctgtaataatccgcaccatattatgcagaaatccgcttgcattaataagtatagaaatattttcattatcagatattaatttaacataattaattgtgcggatagtattttctttttttgttttttttacgcagaatgactggaaatcataagtgccgcagaaatatgcaagtgtattttctaaatattttctgtcaatatggtttcttatccataatgccctgtttatcataaatggattatgaatatgtgtatttattattttgtattcataagttttagattttattgattttccagaatgaaattcttttgtaacatctataatgtcaaacactgcaatatcttttggcaaaaggctgtttaatgcacgcattaaagtattattattaaaatatttttctgcagcaaaattaaacacctgccctaaagcatggacaccagtatcagttctgccacttcctgctataagtattttactttcataaagtttagacaatacattttctataatattctgcacacctgctgcatttttctgccgctgccagccgttataattatcgccacagtaggagcaaaggcatgctttataataaatattctgctgctgcataaaaagcacctgtaaagataataaagcatataagaaagcatatatctcttgtatttattttatcaagctttaatacattatctatattatttctgtaaagagcagtaatagaaagctgctctgcataatgaaatacgcgcacaaaaagtggtatgataaatgaatccatattaaaaataaacttaatcttatatttaaatgatttattatccatccaaagcccccgtaatttttgtgcagtaataattttagaagcttcttcaaaaagcagtggaataaaccttattgcaataagcatagaaagcccagtattttctacatttactttaaagattttaaaaggttttataaaaatatatagagtttttgctatttctgatggggaagtagtaagtgtaagaagacatgagtaagcaacaatcagcacaaactggtaagtggatagtaaggcagtatatagtgcatcttttgtaaaatgtatggaaaaaccaccattttcaccaaataaaagcattgtaacaaaaataaatatatataacattttaaatgatttgattgcagaaaaagcctgtttaaatattctgccagataagaatataagtataagccataaaaaagtcataaatgcataggaataaatattcctgccaaaataaaatataagagctgctgcaatagatataataatcagcttgataagaggattaagtagatggataatggatggtgattcaagctcaatatatttaccaaaataaattttattcatattgcaaaaaacacataaaggctttaagcatcaaacttc

SEQ ID NO: 3040 - DNA, 23135 bp, synthetic construct
  misc_feature 1..23135: note = Synthetic
  source 1..23135: mol_type = other DNA
ttaaagcagcaggtgcactgcatgcagaactggagttaatgtaatggttgaagcagcaaaacttaacacaaatgtagagcttacaaaagaacaggctcgtgaaaaaagagataaagaattaagacaggcttgtgcagcatttgaaggtatgtttatggatatgatgatgaaaacaatgcgtaaagctactatggagtcatcactgattaaaaaaagtaatggcgaaaaaatatttacagaaatgcttgaccagcagtatgtagatattttagcaaaaacaccagattctggtttgggagtgtcactttatcagcatttaaaacagactatgccacagtatagagatgaaggaaaaattttccacaaagaattaaacccttatgcagtgcagcagaaaagacaggaagcattttctcaagagggtttagatttagttcaataatatctatcacttcacaataaattcacacacttataggaaagggaagcgaaagtttcccttttctatttatcaaaatggcacaataattgctaaaatatttatgaaaaatttgtttatggatagcttaggcaaaatttaccgtatttgcaggaattatcagcaatggatatgtaaaaaacaggcacaaaaaaatatttaaaaattttaaaaaaagtgctaaagttttttaagcagcatccgatagggaagaagagcattggaggatattatgagaattgataacaatatgatgtctggaatggacacacttgaacaaacttcccgcaaaaaaaatgtagaaaaagtttctgcaaatgacaaacaaaattcttctgtagtagaaagtgatgaagtatctatttctgaaaaaggcaaagatgtttcagaaatgacacgcactttaaaagagatgcctgatgttcgtgctgataaagtagctgacttaaaagaaagaatagctaacggcacatacaatatatctggtaaagatatagcatctaaaataatcaatactgcattagaggatgttttttaattattttcaataggtaaatttttccataagttatccttaaagtatggtgataagccttttaaggagggcatatatggagcataattctattaaaaacttagtggagatattaaaatcacaggttagtcattacagccttatccgtgatactctgcaggaagaaaaaacagccgttacaagctgggacaatgataaaataaaagagcttagtaaaataaaggaacagctttctaaaaaagaaaagctgttagaagaagcccgcaaaacaatatctttgcgtataaaagaagaatataatcttgatgatgatactgtgcttgctattattgatggtattgatgatagtgaatgcagaaatacacttactcagttaagagatgagcttttagtattagtatcagaaatatctcagcttacagtttccttaaaagtcatatataatactaatctgaaaataatcagcgatgtaaaattaaaaatgggttttgtacctgctgcaaataaatatggtatggataaatctactgtatctatgccttcagctttacagataacaggttaaagggaggtgtgatatgagtaatttatttggtatgatatggactggtgtttcaggtgttaatgctgctcagattggtatttctgttactggtaataatatgtcaaatatgaaaacagaaaactattccagacagactgttgagcttgttacaaaaaaaccgcagtatacatataatggtgctataggtaaaggtgtagatgtagcagctgtcaggcgggaatatgatgacctgcttgcagcaaatgttcgcaactctaactctaattatttatattataattctatgagtacaactttaaagagtgctatgctttattttaatgagctggaatcaggttcagggttaggcgatgctttaaaaaattattttaatgcatggcaggatttaagcaactcagcaccagatgacacatcagaatctcttacaaaaagaacagtgcttgtgaaagcagcagatacacttgcaatgaaaattagagatggatataaatatttagaagatacaagaactcagtgtgatataactatacaaaatgaagttaatgcaattaatgaaatcacaactcagattgcaaaattaaataaagaaatagtttctgctgaagctatgggacagcctgctaatgaattacgagatatgcgggatggtctgcttgatgatttagcagaaaaaactcaaatatctacttatttaagggaagatggctcagtatctgtatatatgaatggtcagactcttgttgataacggcacagcacacaagttattaacagaaaaagacccaaataatgataaccacttaaaagtaatgtggaaaacagacaacccaaactctaagccaatagatatgacatctcttatgaaaggcggcacaatagctgcacagctgcaggtaagagataatgagctgaaacagtatcagtcagatttagatgcactggctaaaaaaatgatagaagaaacaaatagaattcatgcaacaggtatggggcttgataaagcttctgaatatactggcaaaactcaggtgataaacccagaatatcctttaaattcaccagaaggcatgctgccttatcctgtaaaaaatggttcttttgaaataaatatttcaacacctactggtaaaactgatgatgaaggcaatgatatatatgatacaagaaaaataactattcaggtaagtgaaagtgacactttaaaaacagttttagaaaaaattaaccagcagggtggaaactatgtaagtgcatctttaaatatagacaatacagttacaataaaagctgcagcaggcagttatatcgcttttggagaagatacaacagatttcttaatggcaactggcatgaattcattcttttcaggcagcagtgcaaaagatataaaccttgatgcatctataaaagaaaatccaagattaattgcagcatcagagtttggtgcagaaggcgataatactaatgcattaaaaatatcaaagctgcagacaacatctttttcaacagtgaaaggtaatgtaacattcagtgcattttatggatactttataggtgagatgagtagtgcaaaatctcagtctgatacatttaaggctacaacagagatggcatataaagagttaaatactcagcttatgtctatccgtggtgtatcagaaggagatgaacaggtaaacttatcactttatcaaaaaatgtttgaaattaattcaagatatataaatgtagttgatgaaatgcttaatacattaatcaatggtttaggctctgcaggcaggtaacagctgcctgcaataaatgcagcaatagaattttaaagtaaatgtttccgtcgctttcagcctgtgcgatttcttatttttcgctattcactcaggaaatcggcagcccttacaaaaacaattcacactaagcgacgggacttccctgtccctgtattatcataatgagcctgctttctttgctcgctgataatcactcaaaaagacatattttagtatttcaaaaatatatgcagtataaaaatattacttcatttaataaaatcatttaaggaaaatatatacattttaaaacttgtttatttggcataaaatttgctaaaaagctatatacagtagtgattatataaacggagcataattatgagagtaacatttaatatgcagggtatgcagatgaaagatatgctttcaacaagtctttcaaattatacagaggctgttaaaaaagcaaatgcaaagcaaagcctgcttaatccatgggaagattcaagcaagtatgtgggagcttacaatgttcaaaacatgattgatgagcttactcagtttagtgaaaatgcaggcagtgcatctaactggcttaataatactaatgcagaacttcaagaattagtagaagcattaaagcaggcaagagatgattatgcaattgcaggtgcatctgattcttatgatgaagaaagcagaaaggctttagctcaagatgtgttaagtttatataatcaaattatggatatagcaaatgccagctataatggaagatatatttttggcggctatcaaacaggaactccaccttttacaggcggcacaaattcagttacaaatgtaatcactaaaaatgtaaatggtgaacatttagcaggagatgctgtaacaaaagatgttttcagtgatatgacagagctgaaatcaggaaaatatactgcaaaagtaactgttaaagatggtattgcaaaattacagctttatgatgaaaaaggtaatgttgtaatattagattcaaacggttcagatgaatcaggcggtttaggtaataaatcagcagtttctatgtcttttgaatatgaggcaggtaaagttataaatacaggcaggggtatatcatttaaaatgcctgaagacttaaataacccaacatctattgtgatggaatttgattataaatcaggctcagaaatcacatatcagggtgataacggctatatttatactcaaattggatacagtcaggatattgcagtgaatatgcccggaagtaatatttttactcagtcaggtatggtattgcagggctcagcatttaatactgtaaatggtatgtcagccacattaaatactctgttttctaatttagataatacaaatatcagcataggcgattctataaaaatatcagggacagaccataatggcaataaagtaggtattgcaagccttgtgtctaacactaacccaagtttagatttagctgatgcttcagaaaaagaaaggacaataactgttacttatggcgataaactttataaaatagtagtgccgcaaaaagcatattcttccacaaaagaacttgcaagtgctgttgataacgagctgaaaaatgcagaatatataggctcaataagtggtttatccggagttaatgcagatattgaagattatgaatcactaataaatagtcaggtaaattcaggtaaatatcagggcgaaataagtgctgctggtaaaaataaatataaagtagatttatcaagtgagttaagaatagctgcagatggtgacaggcttaactttatgagccagaaagcaggagataatgtgcgtatcgcagttactggaacagaccaaagtttattaggttttaaaggttcaacagtagcagcagaaggcaaagatactacttttgagataggatatgattttcatactaatacaatagaccctgttgaaacaactcataaaaattttgaccttacaggaactgcctatacattttttgtaaatggtaaagagattactgtaaataaacctgctactcaaataacgaatacaccaacagcaggtattccttttggcgtgcagaatgtggagcttaatattaatggtaaaacagttactatacctgcatcagactttaataatgcacctgcaaaagcggtttatttaaatgaaaaactgcgtgaagcagggcttggtggtgaagcagttattcaaaatcttacttttaacggcaatacatacgactttgacttaacaactacaactccgtcaaaaaaagaattggaatttgcttttgatgaagcattaagaaaagcaggttttgattttgaagtgggagtaagccttgatttaaatccaaatgaccctgcaaattttggcaattatgatgtaacattttatctgcaaaactataatatggatagagacactactcttactacaacagcttatgacagaacgacaattccaccaacttctgatatgcagacagcaaaaattgacagaagccgtttaaatagtgcagtagaaaaaactcttggcgattatgttaaatttattaaagaattatatggacagtctgttgatgtatcaatagtagatggcaagcttactattgcagatttaagaagcggtaacagtaaacttacattcaggactaatgcacaaaatcaaggcataagtcatgcaaatgatcaggtgactattgcaggcggtgcatatactggcaaaaaagatgacacttggaatgtttctgttactacacagcttgggcagaatgaccaaagaaatataaccattacagttatggataaaaatggcaatatgctatacaataaagttactaatgattataaaggtggtccgatagcactgccaaatggtgtaactataactccagatgatatgcagataccaaacccattaaatccagcaaaaagaacatctaccacaacatttcagcttgatttaaaagcaaagccgggtttgaattttggtgatgtaaatattaaagaaacaggtaaaaatgtaaatgtattcagagcattagaaaacttaatgcatgcacttgaacataatattactaaaaatggttttggggagccttctgcttggaaagcaacagatttaagctctactgcaaaaccttttctagatggagtatttcaaggcaattttaatgataattggaaatatgaaatattatcagataagcagaaaactgatttttatctacagaatgaatataaaactacatcagggcaaatccagtatgataatgatgcttatacaaataattcagttttaaatttcagtgtagatatatttgataataaaacaggcagacaacagcgtgtgccagtaagtattgatttaacaaaagcaaaccctgcaataacaaatgcagaatcagcaagagattatattttagaacagttaaataacaaccctgattttgtaagtgctggcataaggtttgcagataaagacggctcaatagaaatacaatctggaagtggaacaaaaatagcaaactttgcaaattcatctactaacccagcagacagggcatttgcaagttttgtaatgggctttgaaacagtggcaaatggtgctgtatcagatgttttcacggcagcttttacatttaatgtggcagacccacttgacccggcaggagcaggttttaaaacaatcaatattaatcctgttattaatgcagtaaataataatgttgttgtaactgcaggagcaacttttgcacttaacattgggggcaaaactatagatattccgtcagatgaatttaataatgctgcaaacaaaaacacttttatcaataataagcttaaagaagcagggattagtgtagatgaaggagttacaacagttacagcaaacccagatggctcatatagttttcaaataactgcatttactaataaagatgatttattaacagaaattaataaccagcttgcagtaaatacaagcagtagaattaaagcaaatttagctgcagacggctctattcagtttgtaacagctgcaacagatttgcctgtggaagcatcggtgctgtcaggagctgataatccccttaatttaggtcttgtaaatgatgcagcaggcaatctggcagaattaacagtatcaggtgttcagacacctaaaactgaccttagtgagatggcagaagatgcaagaacattaacaattacatatatggaaaatggacagcagaaacaagcaaaagttatccttgaaaaaaaggaatataaatcagctgctgaaatggcagagcatattaatgaacagcttacatcacttgggatacctgctagtaatttaagtgctgttgtaaataataaaggtgaaatatcatttgcaaaagcaagtaataattttagctcaatagttgtagagggtgattatgcaggcacacttggctttccaaaagcgggaagtagtgtttccataaaagtaacaaatgcagatggtggattagtgcagaatgtatcacttgatactgcaaataaaagtgtatttgtatcagatgggctctatttaggctttgatgcaggctctcttagtgcaacagacagctttactgcagcagtaggcagtggagttgaaaatgaaatagattcattagatgccgctgtaaatcaagttttacaggctggcacattgataggaacaagaggtcaaagagtagaatcagttatgaaatttcaagaaacagtcattaaaaataatgaagaaataaaagctggttatctaggtgctacatctacagatattattaaacttaccactgatttagagctttcaaaaacagcttatcagtcagctatgagtatagtaagcactatgatgagcatttctatactagattttcttggataattagtgtataataggtttatatatgacaaatattgtatcaaaacaggacattaaaaaggacggcagtagtagaatgaagattaattcagctaagcttggggagattgaatattcagaagatgatgttataactttaagttctccccttttaggtttccctgatttgcaggattttttaataatctctgatgataattcatacccatttttatggtttcagtcagtagaggatgcagatatttgttttatccttattgaaacaaatactttttttaaggattataacccagatattccaaaaagggagttgaaagttattgcaataagtgataaaaaagaaatgaaactattttctattgttgtagttcctactgacccaaagttatctacagccaatctccgagcaccgcttgtagttaattttgaaaaaaaactggcaaagcagattattcttgatgatgatgcttataaaataaaaatgcctttatttgagagtgagtgatatgttagttctctctagaaaaagcaatgaaagcatcatgataggcgatgacattgaagtcagggtagtggagattactggcaaagctgtcaagctgggtatagaagcacctaaaaatatagtagttcatagaaaagaagtctatgaagctattaaaaatgaaaatctgcaggctgtgcctaaggaaacaccaaaagaaaatattatttcattagcagagtattttaaaaaacataaataatatatatacaggtgctaccatagtagacattaatcatcttcctattaaagatttaaaaatctctgtagaagatatcaatacaatggagcctatatcttttaaaggctctattgcagtagtagataatttatcaaaagcagaggcagcattagacaaactttttgcagcaaaatatatagggtttgatacggaatctcgtccagcattttttaaggggcaaaaatttcctgtttcaattattcagcttgcaactaatgaagaagcatttatttttcagttaaaatatgtgcatttttcaggcaggcttgtagagcttttatcagatgaaaatataataaaagttggcgttggagtgcaggatgatataagacgcttaaacgagctttgcaaatttaagcagggcggtttttatgacctttctagtgcagcgaaaaagaaagggcttgtgcagtctggagcaagagccttaactgcaagatatttaggcagaaaacttgttaaaagctcacaaaaaactaactgggctttaagtaaactcagccctaggcagcttgaatatgcagcaacagacgcatggatttgcctgcagcttttagaacatgttaagcatgacacaacagattatcgtaaacttgcagctttagaaagagaagcaggaaaccttagcgataatgaagaatatcatatagatgaatagcatataaatttatattttcatcttttcacatatcattgtataatttattcttattaatttgtattatatttatcttcttataaaattgattataaagaaataaaaaagccttccatatagaaaggctaaatttggtgtgagtgaatactcacttattactgtattcaccacaatatttaatatgttatatgctaaatatattttattttaatattcttgtcaagataattcatattgcttatttaaaaaatatcaagtaacataaatcatataaataatatggagcgaattatggcggaaaagaaatttaaataccgtttaggtcttgatttaggaacaaactctataggctggtgtatgcttaggttaaataaggataacgaaccagctgcagttattaaatcaggtgttagaatattccatgatggaagaaatgaaaaaacaaaagagcctttggcagttgtccgcagaaatgcccgcagtattagaagaaatcttgatagaaaaatatcccgcagaaatcatctgttaaatacattagtaaaatatttcctattgccatcaaatgaaattgagagaaaagcattagcagttttaaacccttatgaactaagaagcagggcagtaaatgaaagattagaattatttgagcttggaagattattaatgcacctttcaaaacgcagaggatttaaaagcaacaggaaagtagataaagaagacagcagtggtaaaattaagccagctatagaaagattaaaaaataaaatgcaggaaactaataaaaaaacagctggtgagtatttatattctctaatgcagaatggtaaaccagtcagagcccgccttggaagaatagacggaagtaatggatatgagatatatttagacagggctttaatagaagaagaatataatcttataatgaatgaacagaaaaaacatcataaagaattaactgatgatattattaatgagatatttaatataattttttatcagcgaccattaaaaaagcaaataatagggaaatgcagtttaactggtgaagatactaaactgaaaaaagcacatgtattggcacaagattttattttgctgcaaaaagtgcaggatttacgagtatttgatgataatcagttagaatttagaccattaagcaatgatgaaaaagacattattaaaagagaattgcgaaagaaaaaagaagtatcttatgaaaatatacggaaattgttaaagaaatattatgaaaatgttaaatatggtatgttctcacatgaaacattatataaaaaattacaaggtaataaaacaaatgctttaatgtcagataaagagattataggtgacagctggtatagtttatcgccagaagttcagtatgacataatagaagaattatattctgataaagataatgatgaattaagtaaattatattctgaaaaatttaacttaaatgaaagccagataaatggcttattaaataaagccatttatagacttgacagtggatatatcaggtatggaaaaacagcagttacaaacttaaacagcataatggataaagataatttaaatttacacgatgctagagaagaagcaggctatgaaaaggaaaataaacaagatgcatctgaatatctggaatattatggtaaagtgcttccagacagtgtagtagacccacaaattgaaaatcctaaaaatgatgaagaaagatatggtaaaattgcaaacccaacagtgcatgcagctttaaatcaattaagaaagttagttaatgaattaatcaagttatatggcaaaccagagcagatagttatagagcttgccagagatttaaaaaacagtagaaaggcaaaagatgttattaataaaaaaatagcagaaaatagaaaacttaatgaagaagttgataaaacactgcaggagtattcagaaaaatataacacacatattgtaaaaaataaattaaacagagataaagttaaattatggcgggaattagggaaagacccattagaaaggaaatgtatatatactggagagcaaataaatatagcaaaattattcagcgacgaagtgcagattgagcatattgtgccatattctaaaacattagatgatagttttaataataaaactctttcaatgaaacaagcaaattattataaaggcaataaaacaccttatgaagcatttaaagacagtaaagacggatataattatgacgacataattgcaagggcaaagctgcttaataatgacaataaatttaaaagatttacaaaagatgcaatggatatatataatagagatggtaaagattttattgcaaggcagctttcagatactcagtatttatctacacgggcacttatctatttacagtcattatatgaaaaagcacatcacagctctatttggactataccgggtcagttgactgcacttattcgcaactatttaggcttaaacacattaatttctaatgataaaaataaaaacagaaatgaccacaggcaccatgcagtagatgcatttgttgtggcagtaacaagccgttctttactgcagaaaatatcttatgcagcttcattacaggaagatttagataatagaaatgtatcatcatatagaaataaattacttgaaaaaatgccagagccttttccaaattatagaaaaagtctggagcttgctattgataatataaaaacttcccataaagcagatagaagtatatctggtaaattacatgaagatactgcttacgggatagttgaaaatgatgacaaatataatgttgttacaagatggacagtagataaatttaaagagcaaaaacattttgaaaccataagggataatgaattaaaggaaattgcatgtagtgataaagaattatttgctaagatagtagaaacaagaaaaataaaaagcattagaaagctggcaaaagaaaaccctgtaattaaaataaaagataaatcaggcagggactataaagcctttgcaggtggtaataatatttgtgtagagatatatgaagtagatggtgtaagaaaatcagaagttatacagttatttgatgcagcacaaaaaggatttatgccagaatggatgaaaaaatatcctaatggaaaattacttatgcggttatttaaaggcgatgtaataggatttatagagaatagaaaatataattattatacaattaaaggtattagtattgcagaccaaaatcttaaattacttgcaattaataaagctgaaggtatatttaaaaaaggcttaaatatattgtttgatagtaataataaaaactctttaaatgctaaacagtttaatataagtgtaacgggcattgtcactaaaaagaaaacagcagatgttaatttttggaaaaatagaaagtgaatcagcggattatagaaataacagatatgcaggctcatttaagcctgcatagaggttttttaaaagtaagtataaaagatagtaaaaactatgaaataccattatatgatattggcggcataattagcaattcatacagtataacatacagcagcagtctgcttgttaagttagcagagttaaatattccctttattatatgcggagtaaatcattctcctgctgcttttttatggccagtggaaactcactctttaatgtctgcaaaaatagataatcaaataaatacccgcaaaagtttttatgaaaagatatggcaggatattatacaaattaaaatttataatcagtctatatgtttaaacagtttagaaaaagatgatagagcattaaaagcacttgttaaaaaagtaactactggtgatagagaaaatatagaagcacaggcagcaaaaatatactggaataaattatttggtgataattttataagagataaaaatgcagaaggaattaatactttgctaaattatggctataccattttacgctctggcacagcaaggtctatcatgggggcaggacttcaccctgcaattggcatatttcataaaaataaatataattctatgcgtctagcagatgacttaatggagccatttagaccaatagtagattattttgtatataaattcagtgaaaaagaaaagtatgaactaacccctgatgtaaaagaaaatcttgtaaatattttatatttagatttagacggaccccgtggcagaagtcctgtaataaacagaatgcagtcattagcatatacttatgcatattcattagaaacattaaagaaaaatttagatttaccgatacttaaaataagcgatttatgtgaaacaaattaacaggttatttatatgacttatttaagtgggtataggcttatgtggataatggttttatttgatttgccagttattactgaaaaagagcgtaaaaaagcaacaaaattcagaaattttttaatggataatagttttgaaatggtgcagttttcagtatatatgcgaccatgtccaagtaaagagcatgtggaaaggcttgtaaagttaatagaaaaaaatgtgcctgaagatggaaaagtagatattcttcctattacagataagcagtatgaaaatattgtaactattcgtggcagaaataaggtgcaaagaaataatccaaaccaatatattttattccagccagatattgagcattttttaccagaaagtgcaaatctataaacaaaattaaaaaattattttcttaaaataatgtaataaaccccttatgataaaggggtttatttttgacttattataacatattaaatattgtggtcaatacagaaccgtaaaatggcttgccatacacggagccaattataacatattaaatattgtggtcaatacagaacatatccaataccattagtcttaatagtttaattataacatattaaatattgtggtcaatacagaacaagcaatttcaagaagcaagacttatagatattataacatattaaatattgtggtcaatacagaacttatctcttcaagaccaaataagtattattattataacatattaaatattgtggtcaatacagaacaggactacttcacatctgcattaccatttcattataacatattaaatattgtggtcaatacagaacagctgaaactgcatttatcaagactaaagaattataacatattaaatattgtggtcaatacagaacttcgtctttgttctgaattaggtgaatcgcattataacatattaaatattgtggtcaatacagaactatcctgttctttgtaaatttactatgccaattataacatattaaatattgtggtcaatacagaacctgtgattaacttgcggataaagtcagcttattataacatattaaatattgtggtcaatacagaactaatgcgtatatatagtcctgcaccaaagcattataacatattaaatattataatcaatacagactattatttataatctcatcagcctaaatttatataaacatattattaattaaatcagatgattttataagttaaaagagttattaaaaaataataaggaaaattttaatagatattagctgaataagatggctaaccatttttataatatattgttttatctctatccattttttggcactatatttgcttctggactgataaggataaaaatgttttattaatcgggaggcagatatggcagcatttatatcaatttttcttgcatttgttgcagcactggttagtgcatttgctctgtataccgttaaaaaatccagtgaaactggagataatcatttagatgagattatgcggttaaaacagcagataaatgaaactaacaacagatttgctcagcttaaacacgaccatcatatattacgggaacagtttaaaaaactgcaggaagtttctattaataatgatatgcaggtgcttttaaacactgctattaaagactataatgatattgcaagtgttacacctgaagaaggcagcataggcaaacatgaacgagccagaaaacaggcggcagaaaaagtgctgcaggcatgtaatgaagtatgccaaagatttattgcagaagatttaagccacaatacttttgcttctgtttataaatcacagttgcaggatatactaaacagcgatgatttaaaggaaatatattcaaatcttaaaggtaagtacccgtatattgaacgggtactacttgctccaattgatgaaaatctcatttcaaactttaaccagtattctgcaaactaatcttttattaaaccaaaaactttattaaaaatatatacctgcaccaaaatatggtgatgaaccgcttattgtatcagtaactataccttctataaatatattcagtctcatacctgtatgtttcatatctttattttgcaaagcaagtccgccacgaaatataccaccaaaactgtttttgccattatcttcaatgaaatatgcagcatttatctcaccaaaaagcagtatattatttgttaaataaaaatcaagccctaaaccaagagctatacctgtatcaattgtgctgatacttttttcgtatgaacggtagtagtaatcataatagtcatcataatcgtcatagtcatcgtcactgctaaaagatgattttaatccgttaataccaactagaacactgccgtttgtatatataccaaaccatttgttaaaccgccagtgagactgtatagaaaattctatattcattatatcaagattaaatccgcctgcaccttgtatgccatacagccagtaatttgttttataactgtttactgttttgatagtatcagaagtatgctttttataagaatttgagctgtaatcactacttactgacatttctattttttcaggttcctgctgctttggtttagggctaagttcctgtgccatttgctcatactgcaaaatctctggaaaaatctcataatctgcattgattgaaaaaaactgctctttattatttccaagatgcaccactctaaatccagttaaatatggcttagctccttttgtgctgtttggttcaagtgcatatacaggcactgctttaaaacttgcccttgtatcatacattgctctaaattcctgcaatgatgcaaacttatatttgaaattatattttttcattttatattttactataataggaagctcaatattatctaaatctcgctctccaaaatctattactgcttttgatgtatcgcttgcaacatacattcctgtattatattttttcagtctttcataaagcggttttaatgcttttaaaagagatgtttttgtatctttttcactatttgcttttctttctgcatattctgcttttaagtctgcaatatcctgctttttcttgttttcaaaatcttcttttcttttattatatgcagcttttttctcattataagcagcagtattatcccactccccttttttaggcatttcttctgtaaatttctgtttttcaagtatatcaagctgagatttatgatatatttccaacttcctgctgtttgcattcattgctgctttatattcattaacaaggctgctgaaatttgtgcacacttgagctgcatccattgcaatgatttcaacagtatcatttactgctatatccattgttttatcattaacaagtgcattttttgcaagttctgccaaaagtgcctgatgttccatttctgcctttgcctgtgcatctttttctgcagcaattcttgtctgcaattttgcatcttgagccatatattccttttgtatctgctctaattctttagctgcctgaagctcttctgcattctgtctgcgttgagcttccattaactgctgtttagcatttgatatttctttttcaagctgtttctgccttgcagcttgggcttttgtaatattttctgcctgcacacttaatgttttatcatattcttctttagatgcatttttcagtttcttttcaagagcaagtttttcctttctttccttttctaattcctgctttaatgcttcattctgcataagctgtcttaaaaatgcatcaagctctccagcatcaacagttgctttcacctgcacagttatatatgtctgaccattttctatttcctgttttaatatgctgacatctttttgagcaatagcacttgtctgcattttgatttcatctttagatactttgccgtcaactaatactatgctgctggatactgcaacccctgcttcttctgctgcttctctaaataaacgctcgcttgtatactgcttaacctgttcaactgactggttttcaggaactactgcttttgctgtttttgtgatagtcttagtttctgcataagaaaatattggtagaagaagtaaaaaaataataaacaaatttcgcataacttaacctttttagtaatctttttaatctatcacactgtagttaaaaagcaatatttttattttatatgcctgtattttataatagtaaatacaatttaaatttttttatattaatatatcaatagtttaatagctgtaaaaaaaattctgcttgaacaaaaaatatttttctgctaaaaaataattagagataagcggaagcaggtgagatacctgcactgcccccgcaactgtatgctggacaaagcccattatgccactgatattcgggaaggcgggtagaggttgaaagcaagtcaggatatgcttactcaatttattcttcggagggaagcctgtgagatacaattctatttaatatcctttttataccacaacatactcttaactaaccagacagcaagtatttctgtgtgcattgacctcgcccatatatttatatttatcagtctgtctggttagtttttattcttatttatattttattaaaaaatattgttcagctgcggacttttgattccaccgctgctcgcttggaaagtccttgcatcgcacaatacgctcccccatgaattttttaaatcacgctctgccgaaacaagttcgcctatcgcttactaaaggcggctcgtcctgagcctgaaaggcgaagtatctaaaagaaaatataagttgaatatattacaaactaatatatttaatttagatttttcgcctttaaaaaatcaggctcaaaatgactgtagtataatttttttgggtaaattcacactgcttttaaatagatattttctagtgatttgtctaaatctaaaatactttataattattttattgtgtgtataaatattatatgttagctttatatattatatcagcaggtaatgtttatggtagaaattattacatttattatagatttacttataattgcaggtgttgtttttgcagtattatttattagaaaaaggttaagccagcacccagggagaaaatatatgcttatagctttttttattctttttggtattattattgttgccagcagtgcaactgttatatactctacaaaaaatctgccaaaagattataagacacacatatcttcaaaaatacttattcaaccttatgatatattaaaaacacctgtaagcctagtttatgcagatgaactgcaaaataatccatcaaaaagtggtgcaatgcttattaaaagcggcaaagtttcatttttacacaggatagcattagttagaatggcatgccattctatagaactgcaaacatatatatacgagaatgatgttacttcaagaatattaatgcatgaaatgaaattagcagcagacaggggcgtaaaagtccgcattttagtagatgataatggactttcatcagatacaagcgatattatgacattaaattatcatccaaatatacaggtaaaagtttttaacccatataaataccgctcaaaaatattaaaatatccgcagtttctttttaacatcagcaggcttaattacaggatgcataataaacttttcattgttgacagctctgctgtaataataggcggtagaaatatagccagcaactattttgatgacagctcaagattaaatttttcagatacagatgtgctttttattggaaaacttgctcaagatgctcttgcttcttttaatgaatactggacctaccacaaatctataccagtagatgttttccctaaccataataaccccgatgagctgcatattctagataaagaaattactgaaaaatctatctactatcaacaggaacaagaaatacttgataaagcattagaattatttatcaaaagctttaatgagaaaaaattccctgtttactggggcagctctaaattaatagcagacagccctgcaaaagcagaaggcggcaattttacaagccctattattgatgctgttgacgggttactattggaagcaaaaaaatctatatatatctcttctgcatatcttgttccaggtaaaaaaggaacaaatgatttaataaatgctgaaaaaaggggagttaatataaatatactgacaaattctctttcatcaactgatgcaaaagttgtatattcaggctgggacagatacagagatgatttagtcgcaaatggcataaatgtatatgaatttcgtaatgaagggtataaaatatataatagaagaaattctggagcatcactgcacagcaaaacaatagttgtagatgataaaataagctggataggcagttttaatttagacggcaggtctgctatttataatacagaagtaatcacagcattttttaatgaagattttgcaaaactgttaaaagaagctatggaaaaagatatgtcagaatatatttcatggcatctttatacaaaagatggcaaaacatactggaaaacatacagaaatggcaaagaaatcacaaaaagccatatcccagatacatcacttttaatgcggattatggcttttgtattaaaaatagtgccagaaaagttaatataatatggggtataaaaatgtataaaattcctgcttacttgttaccattgattttaataattaattttttatctgctggttgtgcattaaagccagtggaaattattaaaaatgctgattatacaaaatataaatatgcatatgttcttccgacaaatacaataacttccaccagtggatatgttaataccagttacagcagatatacttatggttcatcatatacacagcagacaaacccaagcgatattattattggtttttttatgaaaaaaaattttattgttgtaaatgaaattcgcagcccagaaaatactattataataaattacggtcaaagtggaaagcgagatatagcaggtgggattgcatatactcttgaagcaacaatacaattacttgatgcaaaaactcatcaacttatttttcaatgttctgctgaaggtataggctctacagaagcagatgatattagaatagcagtaaacagatgtttagaaagtttaaaatagcacatatattatgcagttttatatactttaactatttccttaagtcttgcaagctcatattctgctgttagtttataaaataagctgtaatcacttttacagtgagcagtatctaatgcttcataatatcccagttttttatcgtttctaatatttactgcctgatatccgctttttaaaagctctaaattcattataagccttgatactcgtccattgccatctataaaaggatgtattcccacaaaatcaacatggactttcgcagtatttaatacaggatgcatattttcacatttttgataccagctaataaactcttccattttttctttcactaatatatggtttggtggaatatattctgcaccgcttatgattacattttgggttctatatcttcctgcattatcattatctatatttttaaggattaaattattaatggatttgattgtatattcgcttaatgcttccttattttttaccatattttctatatataaaacagcttctgcatggttaatcacttcaaaatgctcccttaaagttttaccgccaatagtaataccttcaagcacaacttttgtttctttaagtgtgagagtattgccttctattgcattagaattatatatatacttaatttgaaaatcttcatctatatttttaatactttttttctgctcttttaattctgcaagctctttttttaaaatatcaattttattaagcagtttatccataatattttccttttacggctttatttctatttttgtgtcaatatctattatttcatacagttctgccatatcgttatttgatactgcaatacagccttctgtccagtccccatatatatcaaataaaggctctgccatactaaacccatttggaagtccgtgtatttttatatcaccacctgcacttttattatgacgggctgcattttctttatctttttcattaggatagcttataccaaggtttaaaaaatatttactttttgggtttttactatcaatatgatatatcccttctggagttttgctgtccccttcaaactgcttatgtcccgctggatttttgccaagtgatattttatatgtttttaaaagctcattattatgatataaagccaactgccttttacttttttcaactactattaaattaacctttccttttaagttttcatcaattttatattcttttttctgctccataatataccctgcagttaccagtattaatattaaaatagtcaataaagctgctgtttttgcaaacattttcattactatacaccaaaagcattttcaatatgggttatctcattatcatctattgatattacatcaaacctgactggcatttttacatttttttcatttatatagtattggagagtttttattattttctgctgttttgtataatttacggcttcataccctttgccaaattttgcagatttcctgtattttacttctataataacaagtgtattattatattttgcaataatatctatttcgccgtataagcacctgtaatttttttctaatattttatattttttagattttaggtaattacaggctttttcttctccatcttttcctgacaatattttatccattactaaccttgatataaattttttataaatgatttcctgtgcactggtgttatacccagctcttttaaagctttaatatgctcttttgtgccatagcctgcatttttttcccacaagtaacctttatacacttttgcaagctctgccattaagttatctctatatacttttgctataattgacgctgctgatacctgtatatatgtatcatctgccttgtttggatggatatattctttatcaatatggttaagtgctactgcatcaataatcaattta

SEQ ID NO: 3041 - DNA, 24404 bp, synthetic construct
  source 1..24404: mol_type = other DNA
  misc_feature 1..24404: note = Synthetic
  variation 6348..6357: note = note, n is a, c, g, or t
aaagaagccggtacaagccattggtttagcggaaatagtggcactaatagcagcaattttactgctctaccaggaggttaccgaggcagcgatggcaagtttgccggtattagaagcctaggctattggtggacggctatagtttacggtgttacgtacacttggaatcgcagtttgggttacggcagcgctactgtgggcaaggacgacgatgaaaaagcggtcggatttagcttgcgctgtttgaaggacaattgatttttgaggacatacatgcttgcggatcgctttatttaattttttactttataggatgaattcgctgtatttaaagtaagaattaattgagcgtaattagctgacaggaaacttataaaaattaattaaataaaaatcgtagcgggtgctacgataagaagggaaaagcattattaaagcaatcagaaatgaaaagaacaattttaataattttaatagtcataaattttataagtctgtattcacaagaaaaacaatatgggaaagaatatataaattttcctgatacttcttatgttggcaaaattaattatatagtacattttctggaagatagtgcatattatggtagagaatttcctttatttgaaggaagtactcttactgattctacatttataaataagcaattaaaaaatgtagtaatgtataacttttggtttattcaatgtagtccatgtgtgtatgaaattcctatattagatagcttagctatagaatttagtggtaaagtagattttattgcaatcacttttaatgaaaaaaaagaagtatttgattttttgaaagagcatccgtttggatttacacaaatactaatgaatagtagaaaaatagaaagccttgatgttacaaaaggctacccaacaactgtaattaccaaagaccataaaattatatattggaaaagtggtggtagttcggctgatactatatatggaaaagatgtattgaattgttactataattatttaagacaatttttgcaaaatcagattaataaataacaatgcatctaatagagcctcctaccctattgagtaataagctggcaggaaatttatataaatgtacagaatttaaaaatcttagattaattttgtatttttggtgaaaatattgattatgaatacaaaggttcaaaatatcgaggtatatcaaaaacttgttgattctattgggattacaattgaaagtgctcgacaaagagcaattcaagctgttaataatgagttgttaaaagccaattgggcgattggtaaatacattgtagaatacgaacaacatggaaacgagaaagcagaatatggtagttcattattaacaaacctttctaaggacttaaaatcaagatttggaaaaggatttagtaaaagcaacatctatttaatgagacaattctacctaaaatatcagattttccagtcagtgactggaaaattgacttggactcattactctgaattactgggtgtttcagatgaccatgcaagagggtattatgaaaaacaagcagaaaaagaaaactggagcgttcgagaattaaaaagacaaataagttcgtctctgtttgagagattggcgttaagtcaggataaaagcggagttctaaaattatcacaaaaaggacaaattatctcggaaccaaaagatattgtgaaagacccatacgtgcttgaatttcttcagattccagaagaattcagaatgactgaaagtaagttggaacaaaaaatcatagacaaccttcaaacatttctacttgaattaggaaaagggttttcatttgttggcagacagtatcggataacattagacaatgatcattactacgttgatttggtattttatcatagaatactcaagtgcttcgtgttaattgatttaaaaacaaaacatgttaaacatcaagatattggacagatgaatatgtacttgaattatttcaagtcagaagaaaataccgaaggagataatccaccaattggaatagttttaggtgcagacaaaaatgatatattagttgaatatgcaattggaggaatttcaaacaatatttttgtctcaaagtatcagttatacttacctgatagaaaaatattggaacagaaagtaaaagaattaatgacagaataaaatccaactggcaattgattatcctgccttatacagtaattaatagaacttactactttgcatgcaaaccacattctttggtttctgggttttcccaccaccatctgccggctcttacatcttcaccgtttttaatggctcttgtacaaggctggcaacctatacttggaaatccctgatcgtgtagtttattatacggaactccatttttatgaacaaaatcccaaagttctttttctgtccaattaatcaatggatttatctttattaattgattgttggcatcccattcaatcatttgtgtattttcgcgggtaatggcttgttctttccttaatccgcaaatccaaacttccaaaccctgaaatgcacgacgcaatggctctattttgcgaacattgcaacatagttttctgttttcgatgctttcgtaaaaaagatttactcctttttcgttgaccattttttcaactgcagttgaatcggggaaaaatattgaaatattaattccatattgcatttttgttctttcgatggtactataagtttcggggaaaatacgtccggtatccaacgtaaaaatacgacagcttttatctatatcggcaattatatgtgttagcacctgatcttccactcccatgctagaagccagggcgattttatttttgtattcgcttaaaaaaaaacgcagcacttcttccgctgatgcgtttgaatacttttggtttaaagcagttacatctgataaattcataagatagattaatgtaattatttagtaaagatatataaatatcaataattaaaaacgtagtttattcacttaatgttgttgatacaaaactatgaaacttttaaggatatacaatataattattatttttgttagatataatttatcatgggtattccataaaagtaactaaacaaaatgattatcatactttacataaatatatacagatgaaattacattttattgccattggcggcagtgctatgcacaaccttgccattgcattgcacaaaaaaggatttgaagtaagtggttcggatgatgaaatatttgaaccttccaaaggacgcttggccaactatggtttgttgcccaaaaatgaaggatggaatgaaaataatattacaaaagatattgatgcagttattcttggcatgcatgcccgattggataatcctgagctgataaaggctcagcaaatgggaattaaaatattttcgtacccggaatatttatatgagcaatccaaagacaaaatccgtatcgtaattggcggaagtcatggaaaaacaaccatcacttcaatgattattcatgtttttaattacctgaacattgattgcgattatatggtgggtgctcaattgcatggttttgaagtaatggtaaagttgacaaatgaagccaaatacatgataattgaaggcgatgaatacttgacttcacctattgacagaagacctaaatttcatctttatatgcccgatattgctctgctgagcggaattgcatgggatcatattaatgtttttccaacgtttgaaaattatgtggatcaatttaatattttcgtcaatttaataaccaagaatggtaaattggtttattgtactgaagatgctgaagtagttaatgtggcaaaacaagccagaaaagacatagtactcctcccctatgctattccgaatcatgtgattaaagatggcattacttatatttcgtataagaataccgatataccattgcaaatattcggaaatcataatttgatgaatttgaatggtgcaagattggtttgtaatcagtccggtatttctgatgatgatttttacaaagcaatacaaacatttcagggtgcttccaaacggttggaattggttaaaatgaatgattttacagctatttacaaagattttgcccattctccttcaaaactgaaagcaactacttcagctgttaaagctcaatttacgaaccgaaaattagttgcttgtatggagttgcatacttttagcagtttaacccacgaatttctgttgcactacgatagttgtatgaatgaagcagacgaagccattgtttattttaatcctcatacaattgcacataaaaaactaccaccaatttctattgaagaagttaaaaatgcttttaatcgcgatgatttaaaggtttatactgattctactatcttgcttcaggatttgaaaagcatgaattggaagcataaaaacctgctaatgatgagttccggcaattttgacggaataaattttaatgaattggcgaatcagttaattaattagcctttattcaacaagttatttccaattctgcattgcagacattttttattagaacagtaattgtttttcagttcaagtaatgcttgcgattcaaaagcattatcagctgtaaaaccgatgcttatcaatttttctataattgcatttcgttccgattttatttgttctaaaaagtccaacgcacgtgtctgatatagtatttcatctttttcggatgcatataaaaaaagcataggcacaatcgtattgataattaataaatcaatggtatattttcccatttgtttttgctttggactatgagtttcaccatcaaaagtataatgcgtatcgaaatatgttgatgctttaatattaaacagttgataaacagaatttatactttctgcttcgattagcttagaaaaaagatgctgagaatgataaattaaaaatgcaaactgtgcaatacgaattgtagggaaatttgaagggcgtagccttaggtatttccataaatgcaaagctataggttgcagatgatattttttctttaaaaaatcatattcattgactaaactttgaggataagcatcctggtattcatttttcaacattcctgcctgaccaaataataatgcttccagttgaaacaaactattcttgtgttttgccagtattttaactggtaatgattttgataacaattcaaatggaagtgcattgagtttaaaaccaaggttttttgcaagtatctgataaaaagattcttcccaatcattattattggcaataaattttgatttaatttccagcgattttctttctattctttctatcaacaatctttcgagccaagattgtacaataaacggatctgcatttttaaaaattctttcacatggaatccagtttttattggataaaaaatcctgataattttcataaagttttttatcataataatcctttacttcaagcattggaattaaatcaccattttggcgttttacttccgcatcattctgatagactaaatgtaaaataatgctatcataagctaaatcgagctgatgctgatgttgataccattcagatgctttcacatgtatttcaacatttccggcccaaagagtttcgtttattttaagttttgcattaaaaaaatcgggaccagcatcagtattatgtgttcctgaatgaatgatttcgagcttatcaccattagaaagtattagctctcctcgtaaaagcttaaatttccatagataatgtaaaaattcttcggtcatacagatatatttgccgtaaaaatattacttttattgcataaataataaaaaaatgagaaaaacaattcaattaatttctgctatcgttatcattatttcgtataattttagcaatcaattattttcacaaaatattactcataataatgatactattgtacatatagaacaacaaccagattttccagggggaagtaaagtaatgttagactttttgcataaaaacttacattatcctcgaattgataaaaaaaatggaatagagggtactgtaactgtcggatttgttgttgaaaaagatggaagtattactaatgttaaaattttacgtagtaatcttagtactgattgtgacgaagaagcaatgcgagttataaaactaatgccaaggtggacacccggaaaacaagatggaaatagtgtaagtgtacaattttatatacctctaaaatttacacttacaaatgagaatataaaaaaaagaaaataaagaaaataaagaaaataaagaggaagataaagaaaaacaataagataagtttttcataatctttattttatactttgttaataatannnnnnnnnnattgtatatttgtaaaacaatttttgtggaaagttttcttttttatgcaagatttaagtattttagtatcaggaattgagtttaaattacgtaaactaattgaacaaaataatcaacttaaaattgaaaacgctcaattattaaaaacacaagaagaattaaacaatttaattgaaaatcaaaaaataataataaataaatcacaagaaaagtacaaagtactaaagattgcaaaatcgctggaaagtagtacaaattcgtttgatcaaaaaataaaaatcaacgaaatactgcgggaagttgacaagtgtataggtcttttaaataaatagatatttttgaatattaaacttaatggaagaaatctcgataacggtaaggatagctgatagacaatataagctaacgatagaaaaagatgaagaagaggtttttagaagagcaactaaattattatctgaaaaattaatggaatatgctcaaaattacgcttttaaggacaaacaggatttattggcattggttgcattacaatatacaacaagttcgttaaaatttgaagaacagctttctttcaatgatagcgaattggtattgaaactaaatgaaatagacaatgttttaaacaaaaatatatctgccttttaatagattacgttctttgaaaaaatcatacatttatcgtaagatttacccgcaattattcacttacagtttgtaaactcaacattatattaactagagtattacgcttactgaagttcagagtaggcctcaccccaattcgttgggttctcttaataagagacagtggacattcgatgcttctggcaactctataaatttcatttaggggtttacaaaactctatcgaattaattgcgggtttttatttttagtacttactaattatatattaactattaataaaactactatgagtttaacacttactattatcattgcattattttccctggcattaggaggtatcttagcttctactgtgttaagaaaatatgctgataaaaaaagccaacttattataaaggaggcagaagaaaaagctgaagttatcaaaaaagaaaagatgcttcaggcaaaagaaagattcctacaacttaaatctgaacacgaaagtattattcttgaaaagaatagcaatattcagaaaagtgaaaatcgcattaaacagaaagaaactacgttatcgcaaaaaattgaagaaattcaacgcaaacaaaatgaattaactgctattcgcgaaaatttaaacagtcaattagagattatcaataaaaaacaaggtgatcttgacaaacttcacaaaacacaaatagataaacttcaggctatcgccggactatctgcggaagaagcaaaagttcagataattgaagcacttcaggatgaagcaaaaaatgaagcaattaatctgattaaagacgtagtggatgaagccaaaattactgctaatattgaagccaaaaagattgtaattgaaacattacaacgcactgctgttgagcatgcaatagaaaattctgtttctgtatttaatatagaaaacgatgaaattaaaggtagaattattggacgtgaaggaagaaatatcagagctttagaagctttaaccggtgttgaaattattattgacgattcgcctgatgctataattatttcgggatttgatcctgttagaagagaaattgctcgattatcattacacaaattagttacagacggaagaattcatcctgctcgtattgaagaagttgtagctaaagtaaagaaacaaattgaacaggaaatcattgaaattggaaaacgtacaactattgaccttggcattttaaatatgcatcatgagttgatacgcttggtaggtaagatgaaatatcgttcttcatatggacaaaacttattgcaacactcaaaagaggttgctaatttatgcgcaaccatggctgctgaacttggtttaaatcctaaaattgcaaaacgtgcaggtttattacatgatattggaaaagtgccagataatgaacctgatttaccacatgcaattctaggtatgaaattagcagaaaaatttaaggaaaaacctgaaatttgtaatgctataggtgctcaccatgatgaagttgaaatggaatcactcattgctcctattgtacaggtttgcgatgctatttccggagcccgtcctggtgctcgtagagaagttgtagatgcttatattaacagattgaataatctggaagaattagcactctcctaccctggagttattaaaacgtatgcaatacaagctggtagagagttgcgtgtaattgtgggagctgataagatttcagatactgaagctaatcagttatcatttgatttatcacacaaaattcaaaatgagatgacttatccaggtcaaattaaaataactgttattagggaaaccagagcaattagttacgcaaaataaaagttctatatcataacatatagaaaaaggcttcaacttaaaactgaagccttttttttatgcattaaaaatgatccccatcaaatgcaatattcaatctactacattataaaaaacaaaaaagcctgaaatatatatttcaagcttttttgttttattttatgcggagagtgagggattcgaacccccggaacctctcagttcaacggttttcaagaccgccgcaatcgaccactctgccaactctccgatgcaaaagtacaaaaaaaattaattctacaaacttttttctaaacttttttttaatcaataaatattattctatatttacctgattatctatatgttataattatatattttgagtttgatttgaaataattcttaaatattatataatttttgcatgaatagataatgttatcacccttcttagtgcgaatcaagaaataaaatttaaaaaagataatataatatcacaacaaagaagaaaactaaagattttataacttagcttggattagcttattttgctgtttttaatgaatttgattttttagcagcatatcaatttataacttggaactcttaactattgattttcccccattgaatattgacttgaaacacttgactattgattttcccccgatgaattacgacttggaacacttgactattgattttcccccgttgatttatgacttggaactcttaactattaaaactttacaaaaaagtgtgtaaaacttgagtaataataattgaaaatttgaaggctatggtttctatcttatgtattattgaataataatatttaaaaagttataacaaaactttactatacttcctgattcccttaaaatgcgagttattagatttatttctgtgtatttttattgatgttaattataaacaaaatatttaacaaataatttggtagagttaataattatcaataagtttgatgtcttaaaaaaaatttgactaattgaataataacgtgcttttgaaagtaagaacataaagaaaatggaaagataagaaaataaaaaaccctacgaaacgcagggttgagaatttcttcggcttatagccttattgtgataagtcttttaaattgttttgcaaaagtaattaaaaaatataaaacaacaaaatattatgggacaaattttaggattagatttaggaacaaattccattggatggtcaatcagaaacacagacttatcagaaaatgaaattgaaaaatttggtgttgtaacatttgagaaaggtgttggtaatggaaaaaccggagaattctcatttgcagcagaaagaacaaaacaccgtgcaggaagaagattaaatcaagcaaggaaatatagactatgggcaacattggaagttcttattaagtttgggtattgtccaatgacaattgagcaattagataaatggagaaagtacgataaagaaacaaaacgagcctatcctcacatcgaaatatttgaacaatggataagattagattttaataatgatggtaaacctgattattttagcccataccaattaagagcagaattagttgaaacaaaacttgatttaactattgaaagtaatcgttttaagattgggcgtgccttttatcatattgctcaacgtcgaggatttaagagtagtagaaaagatgctcaagcaactgacactagtgaaggtaaagaagctaaatccgaattaaaaaagaatgatgaatttgaaaaagaattgcaaaaacagtttgagaaatcattatcggattttaaaacaataggttgtgcattacactttatagaaacacaaaaacaacgagttcgtttaaactggatacaacatactttcaggaaacaatataaagaagaaatcactactatatttgaatttcaaaatattggtattgaatctgatttctataaaaatctcgttgaaaataaaaaaaaccgatttaacggagcaatattctttcaaagacctttacgctcacaaaaaggattggttggaatttgttctcttgagaatagctttttcattgataaaaaaacaggaaaagctattcaaacaggaaagcctcgttgtccaattaatcatccagaatttgaagaatttagagcactatctcttctcaataatattcaatacaaacaagatggagtctggtatttactcactacggaacttaagcaagaaatatacgatactttattctttagaaaatcaaaaaccaattttcattttgaagacattagaaagaagatggaaaaaagccttaatctgaagttagattataaagctaaaactattaattacaatgacaaaacaaatgtttctgcttgcccgatatccgcctctttaaaagaaatattcggagaaaactggaaagaatataaaaaagaaactaccacaacaagaattaccattaataaaaaggcagaaacaaaaatacattccatctcatacaacgtacatgatatttggcatgtgttattttcttttgaagatgatgaaattgtgaaagaatttgcgattgaaaaactaaatcttgatttggaattaacagacaaatttgttgccacatggaaacgattgcaagatggatatgccatgttgagccttaatgctattgaaaaaattaatgtttttttaagacaaggatttatttattcggaagccgttatgttggcaaatatgccaagtattttaggaaaagatctttggatggagaatagtaaattacttacaacaagtatgaaaacgctgattgaacaaaatcaatatgaaaaacgagttagaaacattgtcaatattttaatctcaaaatacaaagctttaccagacaatgaacagtttgcttttaggaataccgattacaaattagatgaaagtgataaaaaagaaatacttcaaactattattggatcaataggggaaaagacatgggaaaaagcagatgaaacatataaaagtatggtgcttgatgaagtaacatatttttatcaaagcttttttcagaacagtaaaagagaattttatattttaccaagagtatcagatacaattgctttatttataaaacaaaaattccccgaaatatctaataaaaaacttcaaacactgtatcatccttccatgatagaaatctatccaagtgcgaaaagaaacgaggatggtaaaatatatttgcaaagtcctaaaactggttcttttaaaaatccaatggcaatgcgaaccttacatgaacttcgcaaacttataaactaccttattaaaacagggcagattgacgaagaaactcgcatagtagttgaaaccgccagagaattaaacgatgccaataaacgatgggcaattgaagcataccaaaaacaacgagaagctgaaaataatgaattcaaagcagcattaaaggaattatttaataatggaacaaatacaaatccagagaattctgaggatatagataaagtaagactttggtatgaacaattagagaacaacaatcccgtccaaaaaggcaaaggtgaatatgctcaacaaaagtgggaaaataacacaactgagctaattcaagagtcttatgcaaagaaaacagatattgagaaatatcgtttatggaaggaacaacaatgtgtgtgtatgtacacagggaaaatgatttcattaaccgatttatttgatgaaaacaaagtcgattttgaacacaccattccaagaagcatttcttttgacaattccttggctaatcttactgtttgttatgctcaatacaacaggcaaataaaaggaaacatgattccaacacaattaccaaactacgaacaagaatggagtggatatcaagctattaaacctcgtttaaaggcttgggagggaaaggtacagcaattaaaaaccaatattgagttttggaaaggtaaatcaaaatcagcatcagataaaaattataaagacgatgccatccgtcaaaggcacctttggcaaatggagttggattattggcaaaataagttaaatcgttttactatgatagaagtaacgagcggatttaaaaacagccagcttatagatacacaacttatatcaaaatacgctttgcattatcttaaaacagcattcaatcgcgtagatgttcaaaaaggaaatattacagccgatttcagaaaaattcttggaatacaagaaatgtatgtaaaaaagagccgtgataaacattcgcatcatgctattgatgccacggtacttacaatgataccaacagcagcaaaacgagatgaaattctacaaatcttctatgaatatcttgaaaacaagcaattgcaaaaaaatgacattgcctctcaaatcaaagaaagattatcatacaaattaaaacaactgaatttgccaaatatcgaatatattttaaataaaattgaagaaacaatattgataaataattcagcaaaagatcaaaccttgactcctggtaaaaagatagttcgccgaagaggtaaagttgtttacctaagagataaacaaggcgatttaataaaagatgtgaatggaaatctaattccgaaaattgcacaaggagattgtattcgaggagaattacataaggatactaaccttggtgcaataaaactaccatataaagatgctaatggtgattatcttattaaagacgggaaatttgttattaatgatgaaataatatatgttgttagagaaccttttgtatttaaaaaggatgctcagagtcctggctttaaaacattagaggaaattgaaaattgcattgttaataaagatctttttgaaaatattataaaaaaacaaattgaaggtaaatcatttaaagatgcgatgaatgatgggatttttatgttaaataaatatggagaaaaagttaatcaaataagacgcattagaatctttgtgagagacaaagctccccttaaaattaaaaaacaaacatacctttctcaaaaagaaaatataaatttatcaaacaaagagtataaacaatatgtctatgctgcaaatggtgaaaactatgcatatgctttatatcaaggaattattaatggaaaaattgtaagaggttttcgtctttttaatttgtttgatattgcaggaatgttaagtatatccgaaaatcacaaattagatgttgtatctgaaattgattataataaaaaaggagataagttgaatttatatgcaactttaaaaattggtcaaaaagttttattctataaaagaaaagagtatatacaagaacttgatttaaatgaattatcaaaaagactttatataataaatgggtttgagaaagatggcagaataagatttagttttcatttagatagtagaacagataaacaacttaaagagcttgaaagtacatatggaaagggaatctggcaaggattttcttttgtaaactatgaaaacccttggcctaaactaaaattaagtattggaaatatagattgcttatttgaaaattatgatttcaaaataaaccctgacggggaaattacatttatacaacaactataattgagtgtttcgcttttattgaagctttcaattaagcaaacgaaaaaacattaagcaaaatcaaaatttgaatttcatgcttacaaactaacaaaagattaccaacaaattaaaccaaactatatgaatatttatctattacaacgaaaagtttttaaaataacatatatatgatagctaatataatatatatatgctaatagtattaacttatataatatacacttattagcatatatatgttacaataaatatatagcattgtttataatactttgttgtgagtattttgctaattgtttggggtaattacattaaaacataagcaccaatgggtataaagtacaaaatgattaagcgggaagattatctgaatcccgacgataaaaagaagtcgggttattatccgcaggtagttcgctcggcaacggttaatattgctgatttggcactgcaagtggcacggggcaaaaagaacaatgcttttgaaatggaaggcactattcgcgttttgttaagttgtattgaagaagaattattaaacggcaacagcgtttgttttgacggtttcggcacattttcgcttacggctgaatgccgccgcgaagtaaaagatccttcggaaataagagcggaatctatttcggtaaaaagggtggtatttgttccttcgaaacccttaaaaggacgactgaaatcagcaaaatttgaacgggtaagcttctaaataaaagtgggagtgcgactttgagtcgcactcccacttaataatcaaactcaaaaaacacagcgtttatggattttgaaagcggacatatataccatatatacaaccaagggaacaataggcaaaagattttctttaatagagaaaactatctttactttttgcagaaaataaggaaacatatattgccttatgccgatgtgctggcttggtgtttaccctgtcaaataatttaaaattttcaatatgaataaattttattatgtttatgtattgaggagtcttaaagatggattgaattatacaggttatactgaaaatttaaaattaagatttgaacaacactgcaatggatatgtagcatctactaaaaacagaagacctttaattttaatctattttgaaggttctttaaaccaacaagacgcaactcatagagaaaaatatcttaaaactcattatggcaaaatgtttttaaaaaatagattaaaaggatggaacaacgaaaattcaaatcttatttgacagggttaatgccaaatcattttcatttgttggtgtatattaaagacactcatcagatgacctcaagtcatctgatgagtaacaagcaggaacaaccaagtcatcagatgagtagtcagttaaccaaatccattgctacgctgcttcgctcttacactcgtgctataaatattcaggaaaacagaacaggatccttgtttaagcctcatacaaaagcccaatgtcttacaaaagccgaaagtattacaccttcttattttaattctccttacggaacgtatctgaatttaagcattcccgaaagagaatacccccaactttgttttgattatatacataataatcctgtaaaagcaaatttggttaaaaatgccgaagactgggagttttcttcttgcaaagattactgtggattgagaaacggaaaactgattaacagagaaagggctattgaatattccttatttaaaagaatctaaaatatactcatctgatgacctcaaaatacagcctattatagaaacataattcaattagtcatctgatgagttagttattattcaaaacaaaaattatgataaaacgaacgctttattttggcaatccggcttatcttcatctggaaaacagccaattgcttgtaaaattgcctgaggtagaaaacaacgatacacttaccgatagatttaaaaaagaaagtgttgccagcatccctatcgaagatattggtgtaattgtaattgaccaccaacaaataactataacatcgggattaatagccgcacttaccgacaataatgtagccatcgttagttgcaacgcatcgcatttgccacaaggcttaatgctacctatgtatgcccatcatacatttaccgaaaaaatgcgatttcagattgattcgtcattgcctttgataaagaatttgtggcaacaaaccgtaatggcaaaaataaggaatcaaagaatattgctggcaagcacaggcatcaatgccgacaagatgaaatattgggaaaatagtgttggaagtggcgaccctgataattacgaaggcagagcagcagcctattattgggaaaacctgtttcaacacatccaaaacttcacaagacgaagatttggagacccacccaataatctgttgaattatggttatgccatattaagagctgtagttgcccgctcgttggttgccagtggtatgttattggcattgggcatccatcatcgcaacaaatacaatccttattgtttggcagatgatattatggaaccttatcgcccttatgtagataaaattgtgattgaaattttgaaagaaaatcccgataccgaagaattaacgaaagagattaaaataagattgttgcagttgccggtaattgatattataatagatgaaaagagcagcccgctgatggtaggtatgcaacgcactaccgcatcattggcgagttgttttgagggcgaaacacgcaaaatattatatccgataatgataattgagaaatgaaagaatgtagaaattgagaaaaaatttgacaaatgaaagaaaatataattaaagaaaaatcatattcttttgctgttcgcattgtaaagctaaacaagtatttgattaaagagcataaagaatatgtattatctaaacagatattaaaaagtggtacttcggtgggtgcaaacatagaagaagccaactctggtcagagcaaaaaagactttattgctaaactatccatttcactcaaagaagccaaagaaacacattattggttaagacttttatttgattgcgaatatattgacaaagctatattcgattcactattattcgattgtaacgaaattataataatattgactaaaatattaaaatcatccaaagagaatttataaaatgaataaatttcaaaaactatattttactattcatattccaatatttttcaatttcttcattccttcattccttcattaatattgatgaatcgtttaaaccaatatcagattatgtgggtatttgtattttttgatttgcctacagaaaccaaaaaagataggaaaaactatagtcttttccataaaggattggaaaaagacggctataccatgatgcaatactctatctatatccgtcactgcaacagtcgcgaaaatgccgatgtacatataaaaagagtaaaaaccatattaccaccacgaggcgaagtaattatcttttcgttgaccgacaaacaatttgggatgatagaactctttagaggcaaagaacccaagaataaacccgacactccgcagcaattagaattattttagtcctctcctattcatcagatgacttttatagtcatccgatgaatatagatacaaacccagatttcagaaaacaaaaatagcccaaaccttacagatttgagctataaatgcacatcttttttcaattctaataacacacttaactttcttaatttgaacctataaaccccacctatgttgtttataagatgtcaaagatacaatttaaaagcaaatcacaactagaatcttcaaaagcagattatcaatatgttgtttataagatgtcaaagatacaatttaaaagcaaatcacaacttgtttctgttgttgtaattgtttgttggggttgtttataagatgtcaaagatacaatttaaaagcaaatcacaactcataaatagcaatttaagtgattcgtagtgttgtttataagatgtcaaagatacaatttaaaagcaaatcacaaccgtaaaatgcaggaccttgaccccaaataagttgtttataagatgtcaaagatacaatttaaaagcaaatcacaacatataagctgcaattgatggatattgcttcgttgtttataagatgtcaaagatacaatttaaaagcaaatcacaacactctttttaagcatttcataattggcatgttgtttataagatgtcaaagatacaatttaaaagcaaatcacaactcttcaacagttaacgtgttaatagttattgttgtttataagatgtcaaagatacaatttaaaagcaaatcacaactactaaatacatacgctactgggaaaaaggttgtttataagatgtcaaagatacaatttaaaagcaaatcacaactcagagaaaccttattatccttacgttcatgttgtttataagatgtcaaagatacaatttaaaagcaaatcacaacttatgttattgtggcatagttatattagtgttgtttataagatgtcaaagatacaatttaaaagcaaatcacaactaatttatattgcttaaatcttcaatataagttgtttataagatgtcaaagatacaatttaaaagcaaatcacaacttagcaccagccgcacctgcatcacccttagttgtttataagatgtcaaagatacaatttaaaagcaaatcacaacatagctacctttgtagattccgaatatttgttgtttataagatgtcaaagatacaatttaaaagcaaatcacaacaatcagcaaaacgattgtataaatcgtcaagttgtttataagatgtcaaagatacaatttaaaagcaaatcacaacttctgaatagctttagagctattgccaccagttgtttataagatgtcaaagatacaatttaaaagcaaatcacaactaaaattgaacaaggaacagagacttttaggttgtttataagatgtcaaagatacaatttaaaagcaaatcacaacgagggcgaaattactattaaaagacccaccgttgtttataagatgtcaaagatacaatttaaaagcaaatcacaactatgtagtgagtgtagtgagcatttttttagttgtttataagatgtcaaagatacaatttaaaagcaaatcacaactatttgtattataaatatgatgcaaatatgttgtttataagatgtcaaagatacaatttaaaagcaaatcacaacacagcatcgtggtaaaagcctattttcttgttgtttataagatgtcaaagatacaatttaaaagcaaatcacaacatttcaacctgatcggaattgtgataagttgttgtttataagatgtcaaagatacaatttaaaagcaaatcacaacttgtaggtgttgatactccaaattttgaaggttgtttataagatgtcaaagatacaatttaaaagcaaatcacaacgataatgactgctttgtaataccaacacagttgtttataagatgtcaaagatacaatttaaaagcaaatcacaacctgaaagagttcaagaaaaacatggtgacagttgtttataagatgtcaaagatacaatttaaaagcaaatcacaacccacccaggtgcattattaatattagtatcgttgtttataagatgtcaaagatacaatttaaaagcaaatcacaacggcaggttgtagttgatattgatactgctgttgtttataagatgtcaaagatacaatttaaaagcaaatcacaaccaaaaagcacatattaaggaactttggaacgttgtttataagatgtcaaagatacaatttaaaagcaaatcacaactagaaaataaaagccgataacatatcaatgccatcggcttttttgatgcaatattgttaatctgattattacaaatcaaatttctttaaatgttcgggcattttttccagatcagttatactttccagcttttcgttttcacgaactagatgcactttttcttcagtatcaatcatcacaatgttcggtcgaagggtaataaactgcatccactgcgtcatattgtaagcaccaatagtagaaataaccacctgatcgcctttatttaatagtggcaaatcaatgttttctctaattacatcaatattcatacataaaggcccaaaaacctgtgaggtttccgtataatgtgtaaatggctgagcaggtgtcattttgtgttcgtaccaaaaagcagtaaacaataagttaacccccacatcaataatagtagtacgtttacccaaagaagtacgtttattagcaattacacttccaatcaaataacctgcttcgtcaatcaatgcacgcccggtttctaaaataagtgtgggtaattcgttgttcttaaaattactgttgattaatgcagttgtgatggcttcagcaaaatcatcaaaagtaggattggtatcagaaccaggcaaataagaaccttttaatgtattttttgaagcaaatccgccacccatatctatatatttgatgcaatgattgtatttttgttcgattccaattgcaagatcagctaatttacctgctgcaatagcataagcactggctgcaagcataaaagttccgatatgacaatgcaaaccaaccaattccagtttacctgaacgcataattttgttcaaagcatcccatgcctgaccattttcgtaattaaatccgaaacgatcccaaacaggataagtacctgtatccatattcactctaatagctacttttggacgtttatcaattgtttcggtaatttccagaatagtatacaattcgtcaagatgatcaatatgaatcaaagattcattttcgattgcttttcgtaaatcggcttcgcttttatcgggtccattgaagataatttttttaccatctacgccattacgtaaagctttttcgtattcaaaacccgaaactacttcagcccaagaaccttcctgatgaaaaacattacaaacagcattcagatagttggttttataactccaggcaaactgaacttttggataacgggtagtaaatgcttttttagctttattaatagttgaacggatagttgtttcagaaatcacgtacaaaggcgaaccataatcctttaccaaatcttttacagctacaccatcaatatgtgtcattggagtatattctgttcttagcccaaatttatttggcataccggcttctaattttttaattaccggtctttcatatcttaatttttccattttattttttttataaattattttgtatttattataattcgcctatagtagaaatttgctgaaattcttcaatatcaactatcatatcccaagcataacgaataaacattttgcccacatcataactggtataaggttcaaccttttcgcccaatgccagattcaccaatgattcaggtatattttgccctactcctactgctaaatatatccaggcaggaatcctcgggtttatctccaataaataaaattcattgtcctgtcctttcattaattcaagctcaaaaccacctctccatttggtttgacttacaaacttatgagttaggtctatcattttcttatcttcaatagaaatgccaccccaggcttttcctttatcggtaatatattgcttacgcataggaaccgccgctatggtatttccatttccatcgcctaaaccagtaatattgtattcggttccatgcacaaattgctgaactactattggcaaaccccatttagcactgattttattaaaataactcttcgcctgctcaaaattataggctatactcgcatcataatattttcctttgattaccataggaaattcaaaatcatccgttaatgtaaaaatttcctgagtgctaaagatatttctgctaaaaggtacttttatatcatactttttaccaaattcaggaaggtttactttatgacgttcttcaaactgttttaaagtaggcaaaaacatgtgaatacccatagccttaaaagtatcttccaacttcatgaaagaatataattcagcatcgaaattgggaataattacatcaattttttcaatactatgtatgtattccattcttgacaataaactgtcggttcctgctgttggataaggaatatgataagttttatcaataatgttatgcatatatatcccaggttcgagcgattcataagataatccgatgatttttacgtcgaaactctttgcctcacgcaaggctctgataacagcaacgcctggcccagggctgtcaatggcatttaagccactcacagcaattgtaactttacgcttgctcattggtgtcaattaaattatgatgctttaatattccgataaaatcaaaatagtctttttcaaatgtggcatcttcaacagtatattttgtaagcatcgtatgggtgatgtcttcaaaagatttatcttctttcatcatattaataatttcaatccctatagggttaatcgaatatgattcaccattcagtggattgaaaacaaaaccggtatcgctaatagcaatgtttttatttattttcatttcttttaatatttaattctcaatttgcaatattacgataagttagtgattgtactgttacaaaattataaaaaaatattataagatttaaaaattgcaaaaatagaaatagaaaaaaagcaattaagtagtaaacagcaaatacgcatatttttagtttcgttaattaatgtataaaaacattagaacgctgattaaacggatacgttccttaaacgcagattttcacgaattattcagaatgttttgattttaatatattaataatccgttttatcagcgtttcccgaagggatctgcgtcatccgcgttcatgaaaaatacattagaaaaattaattctatatttcaaatatgacaataaatggttcttagtacttacatctttaacttttcaggtcttttgaaaacatggcatgtaatttgctaaatatctttaataaaatcagtttatttattattaaatcattcaatgtattatgagaaaaattaggatcatctttattctgttctgctgccaacaattagtaatagctcaaacaccaaaagatttaaaatctacaataaaagaagctactatatttactaatggagcacaaattattcgttctgccaacataaacttgcaaccaggtgttagcgagcttgtatttgagggaatttcaccctacaccaatattgccagtattcagccatcaggtaaaggcaactttgtaatccttgattctcgccataatattaagtatccggagcctgctgataatcctgaaattctaattccagctgcattgcaacataaaatagaaacaactcaagacacactcaatgaaattaattatgattatgatgttattaaagaccgtaaagatctttatagcaagcagaaagatatgttaagcaataatccattgatgcgtggtggcggtaaaagtgattctttgccaatattgaaagatgccatggaattttttaatacaaaaatgaatagtattaatgttgaacttcaaaagatcaaacgtgaagaaagtaaagttttaattaaaagaactcaacttcaaacacgttataacgacctcttagcctacaaagaaagaattataagtgagaaaaccagttcaaatgcacctatttatcaggttatagtaactgtatctgcaaaagaagcggttacaggaaccctttcaatttcatatatctgttctaatgctggctggacgccatcatacgatattcgcgtaaatgatattaatgctcctgttgaattagcatttaaagccaatgtttaccaaaacacgggtgaagattggaacaatgtaaaattaaaactctccactaacaatcccattaaaagcaatataaagccatatctttcatcttggtacttgaattattatatgccggtatcagcttatacct

SEQ ID NO: 3042 - DNA, 24350 bp, synthetic construct
  misc_feature 1..24350: note = Synthetic
  variation 15704..17443: note = note, n is a, c, g, or t
  source 1..24350: mol_type = other DNA
gtagtgtatgaaaaaccaaaaacgctgattgccgatattaaagctttagaccaaaaacgtttggatgcaatgaatgaattggagaaaatgttggggtgattggcggagaaagagggatactccgcaagacaattgcagaggggatgggattcgaaacccacaatgacctcagggttatgaatcctgcacccattgaaaaagtacggttcgtgaccgcgacagggttccaagcacaaaccctaaagttacaacttgaccttgactggattcaaacctgtaatcttaaaaagttactttgtaatcgcagaaggattcgaaccttagaccgcctgcttagaaggcaggtgctcaaaacataatccttaaaaaaacttttgaaagggtaattagtataaagatatggaattaatagtaaatgaacgaattggcaataattttaggataatgaaagaattaattggaaatattacgtcaataagaactggaaaattagatgtcaatgctgaaaatccgaatggaaaatatcctttttttacttgttcaaaaaaacatacttatattgatgattatgcatttgagggtgaaagtattttagtcgcaggaaatggtgatctaaatgttaaatattacgatggtaagtttaatgcctatcagcgtacttatgttatacagccattagattcattaaatggcaaatacctttattattttttagaaaattatattcataaactaagagatctatcaataggaggagttattaaatatataaagcttggtaatttaaccgatgctgaaatcccactcccaccattctcaacccaacaaaaaataaccgaagtcctcgataccgcagaccaattgcgccaatacaacaagcaacttatagaaaaatatgatgccttgacacaaagtttgtttttggaaatgtttggggatccggtgaggaatgaaaaaggttgggatgaaaaaagattagaagatttacttgattttctaacaagtggttctagaggatgggctaaatattactcaaatactggcgatgttttcttgagaatacaaaatgtaggatacaataagttaaaactagatgacttgacttatattcaaacacctgaaaccgctgaagcaaaaagaactaaagtacaagctggagatataataatatcaataacagctgacttaggaagaactggggttattccagaaaacttcccaaaagcatttataaatcaacatcttgcaatattgagattaaaagaaaattataatccaaattacgttagtgcattcatagcatctaaaggagggcaagcactatttcaaaaattagataaaggcggtgttaagtctggtttaaacttcacggatttaaaatcttatctcattttttgtcctccactatctctccaaaaccaatttgcagaacgagtacaaatgatagaaacccaaaaacaacaagcgcaagaagccttgacaaaaagcgaggatttgtttcagagcttattgcaacgggcgtttaagggggagttggtgtaagttatattaattaaaaaaatcattatgagcgaaaaagagcaacatgatagactaagacaagatgcatggaattacgcattaaattcttatggttacggatatatttacagtttgcgtagtgaaaaactaaacaaaaatttaaaaattataacatttcttggaattttaatccccgttttgatcggtggtatcgttacaacttatggattaacctctccaattttaaaatatttgttaattataacggctccattatcaatagttcagttaataatttcggtttggtcagttgtagctaattggactacatcgtatgcctattatttagaaacttctttagacaattgtaacttatcttcaaattttgaaaaaattggaaaatatccacctcaatcagtaaatgatttaaaattagaattagaaaaagtaattgttcttcgagaaaacagggataaacaagacaatagatatcctttgaatgaaattgaaaaaagaagaggaatgagatattcattgagaaaatataaaagaagttgcgctggatgtgatattataccagtaaacatggattcgtccaattgtggagtgtgtggtaaattttaaaattatataaaatgacagaaaacagaaatgtactaaaagtactaaaaggattcactgagttaaatgattcagaaaaacaaattttgattagagaactaaatgaatttgtaaataaatccgactttgggaaaacccaaacaagaaatgaaattatggttaagatgagtgcatctttaggcccaacaaatgacagaagttgtccttgttgcggaaaaagctaattggtttattgtcaatatttagtcgtgaaatgatagtctaaatattgactaaattatacaatctaaaacaacaaacacaagaagccttggcaaaaaagcgaggatttgtttcagagcttattgcaacaggcgtttaagggggagttggtgtaatttttaaaacattttgttatgacagcattgttatttgttattgttcttttcatcgttctcgttggaggtggttattttttaggaaaaatggcaggagaaattttcacttggttgtttaagaataaaaaatgagcatcggcttcgctcagctcacgtttgtgttcagctattgtaaagcttcgccggagcatcggtggttgagcgaagtcgaaaccacggattggaattactaaattcaatatatttacacaaaaaacgaaccctttttagcagtctattataaaaatatggcattaccaataaacataaccgatttagtcaacggacaagctatagaatgggaacgtcttgaattcaaacaaggctggaatccggaagaaattgtacatacaatgtgtgcgtttgccaacgacatcaacaattggggcggtggctacatcattgtaggcattgcagaaaaagatggaagacctatcctgcctcctgcgggtttagcacccgaaagtttagatagaattcaaggggcagttttaacccttgcctatcaattgcttcccaattatttccctttaatacaaccttatctactacaaggacaacacattttagtgttatggtgtcctgccggtgataaccgcccttataccgcgccaatcacgcaaggaaaaggagcacaacgctatccttatattcgttttggttcccgtagcatcattgcaaaagaggataatttaagacgattacaagaactaacggcacgtattccatttgatgacaggataaacggtaaagcaaccattgacgatttggatttaggattaatccaagcctttcttcaagaagttaagagcgatttatacgaagaaagcaaacaaattccttttgcggatttatgcctcaatatgaaaattgtaaatggtccaaaagaagcattacgtccgttaaatgttggactgttgtttttttctcgcaatcccgaaaaattcctcgatcgttcctggattgaattggtaattcacaaagacaaaactggtaaaaatttttccgaaaagtatttcaaaggtcctttacaccatcagctaagagccatattagactatttcaaaaataatattattgaagaagtcgtcgaaaaagtagcccataaagcagaagccaaccgccattttaatttcccttatgaagccattgaagaggctttgtccaatgcagtgtaccataaaagctacgaaatggacaaacctattgaagtacagatatggccggacagaattgaaattctcagttttcctggaccagttccgccagttgatgtgcaaatattaaaacaaaataaacgcatcgtggctcgtgattatcgcaaccgcagaattggtgatttactcaaagagctgcacctaacggaaggaaggggcacgggttttccaaccatcagaaatgcgatgaaggaaaataattcgcctgagcctgtttttgaaacagacgagcaaagcacttatttcctttcggtgctgcaagcaaaagaacaaataattacagctatcgagaatgttcctttcaataatttggaggagcttagtcactttttaaacaaactgagcgaccaagttaacgaccaagataaaaccagtgacagcaaggaaagtgaggttttaaagaacaccttagcaagacttaacgaccaagctagcgaccaagctgttcaaatcatagaaagccagcttaatgataaaatactagctattttgaatgtattggaagagcctaaaaaaagagttgaaattctagaacatatcggattacgtaatcattccgataatcgagagaaatatttagatccattagtgaaattaggatggatagaaatgaccattccagaaaaaccaacacataaagaccaaaaatacaaacgcactattcagggagaaatactttataatttgatatttggtaaaaaataatgtagtattttagtggcatcaataaaaaaccatgcaaagcaactttacctttcttcaacaagaatttccagaaatctaccgagaaattgcagatgccgaaaaacacacgtttacggcaccacgttatgctgccttattgtgtagaagtacactggaaaaagtgctattttggttgtataaaaatgatgaagatttagagttgccttatgacaccaaattaggtgccctactccacaacgaaagtttcaaaaacatactcaaaccaagtatgctaatggaattggacattgtgcgcttgaatggtaacaatgcagctcacggaaaaacggttagagcattagacgctttacaatccttgaaaaacagctttcgctttttgacttttttaagcaaatattatagcgaaaataatcctgatatttcagaatttgacgaaaaagtaattccttatggagataccaatgataaaaatgcaaagcaactccaagcacttgccgaaaaactggaacaagaacgtgccgaagcgcaaaaagcattaaaagaacaagaaaaactagccgaagaaaacaatttactgcgcaaacaattagaagcacaattacaactcattgcggaacgtaaagaagaacgttttcaggaaatctcgttagaacaagcaatcccggaattaacatctgaacatcaaacacgccttatactaatcgatttactattgagagaagcaggttgggataaactgagagaagggcgagaaatagaatttgaagtaagcggaatgccgctaactaccaatccgtcaggaaaaggttttgtagattatgtgttatggggcgataacggtttaccattagcagtggtagaagccaaaagtacgattcactctgccaccaaaggaaagcaccaagccagtctttatgcagattgtttggaaaagagtacagggcaacgtcctataattttttacagtaacggttttgaaacccacatttgggacgacactttttatacatccagagtaatacaaggtttttataccaaagaagaattacaagttctcattgaaagacgttttgctcgtaaggatttaagagaatttggcgtaaatacaaatatcgccggaaggtattatcaactagaagctatcaaaagagtagcggaacacttggtaaccactaaccaaaacaaactcagaggaacaagcatgaaagctttgttggtgatggcaaccggaagcggaaaaacaagaaccgcagcggcaatggtagatatgtttaccaaatgcaattgggcaaaacgaatattgtttttggctgatagaaatgccttggtcacacaagccaaaaatgcttttaaggaacatttgccgcacttgtcagccattgatttaaccaaagaaaaagaagataatggtaccagaatcgttttctcgacctacccaaccattttgaataaaattgacagcctcaaaagcgaagacgaacgcttttatggcgtggggcattttgatgtgattatcatcgatgaagctcaccgctccgtatatcaaaaataccaatccatttttaattatttcgattgtatcctgattggtttgaccgctactcctaaaaaggaaatcgataaaaatacctatggcttattcgaaattgaagacgataacccgacctatgcctacgaattaaacaaagcggttgcggacaattatttaaagccgccaaaagcttttaaaatcccgctgaaatttccaagggaaggtattgtatatgatgatctttcagaagaagatcaaatacgtttcaaagaactatttggtgttcaatttggtgatgaaaaccaagtttgtaatgttgagaaaaacctgatcaatacatggttatacaataccgatacaattgacaaagtattagactatttgatgaccaatggccagaaaatagctggaggtgataaactcggaaagaccattctttttgcgaaaaaccacaaacacgctgtttttatagaggaacgcttcaataaaaactatcctcaatacggaggtagttttcttcgggtaattgataattacgaagataaagcacaagacctattggagaaattttgttttgacaaaggagatgaaaaagagcctcaaattgccgtttccgtagacatgatggataccggcgttgatgcgcccagagtattaaacttagtattttttaaagaggtaaaatcatattcaaaatattggcaaatgatcggccgaggtacgcgcctttgtccgaatatttttgcaccaggaatagacaaagaatatttcttaatctttgatttctgtggcaattttgaatattttggagacaatccggatggtgaaactcaaaaaacggccctttctttagcacaacaaaccttcaatacaaaactggaaattgtaatggcagtgcgtcacttgcaagacccaaccgaagagcaagaaaacattcaaattcaattcacggatgatttacatcaattggtggatcatttagatgatgcccgttttgaagtccgcaaacattggcgttatgttttagaatataaaaacagagcgagatggaacaatttgttacaaggtgatgtgctcaatatacaaagcaatttatctcatttaatagattacaaccaagacaaggacgaatttgccaaacgatttgatttactcgtttacaagttgcaactggcattgattactggtaataaagcacaagtaaaacacattgacaatatgtacgacattgtgaatatgctatttacgaaacgaaatatccctgccgttcaagccaaaatagcaacaatcaaacaacttcaaaacgaacaattttggagtacggttaatgtgcaacaattagaagtaatccgtcaagaacttcgtgatttaatccagtttttaaaagacgaaaagaaactagacccaatttatacttcattcacagatgaacttcatttagacatggtggaagaggtagatcttttggctacttacacttcacttcaaagttataaagaccgtgtagaagcctttattagaaaaaacaaatcccatttggtaattgataaattgtataaaaatttacctattacagtaaatgaactggaagcattggaacaatttctattgaaagaagctttggaaagcaaagatcgatttattaaagaatacggtgaacagccattaggtaagtttgttcgaaatatcattggtttagatattgaaatagccaatcaattatttgctgactttatctccaaaggaaatttgaatgccaaccaaattactttcattcaaaaaataatcaattacctcaaccaaaaaggagtaatcgaaaaacaattactgacacaagccccttttaacgaacaacacgatcaaggtgtttttgggatattcccagaagaagataaagtcatgaaagtgattcaagtaatcaatcaagtcaatgaaaatgccatgtttgcctaataattagctaaactgtttactaaccgtagcttaatggcgtttttaaaaaaatcgggggtaatcactttcagtccctctccaaaggataaaatcagtttttccaattcatgattgggaatcacctcaattgaaaaagtaaaaccgtcgttatcattaccaatttttttctgtgaaccgtgtaatggtttggtcattatgtaaggtgctaaatcgggagtagcaaacaaagtgatttttgaaactatagattcaggaggaatagaaactccgataacatcatcaaaatactcattaaaatcaattggggaaacttgatgctttttgtctatttcattaaatgaaacaattctatccaaagccaaattggtcaaattctcaaattccggattatttccaatcaaaaaccagcgattgttgtgctgtttcagataataaggatgaatttccaatgtagttatcacatcgcttttgaaagattgataatccacttgcaacacttttttgtagagaatggcattaaacaaatcacctaggaaatgaatgtttttcaggtattcattggcatcaaaactaataatttccctttcgtgcgattgcaatttgaaagcttcttgcaatttcaaaatcaattcattgacccattcaaactgtggcattcccttaaaacgggacaaaaccaataaagctgatttcaatttttcggcctccaattcattcatcggttgtttattaatagaaaaatcggaagtttcataacggtaatacactttcctgccctctttaattcgatcgagtggaacagaccaaccctgactactttccataaacttaatatcttcaaaaagttggcgtttttttatgccgtccccatcaggattgagttgaaattactaaagcatttgtctaaagagtgaaaacgaataagagcatttttgttgatagccatagttgaaaaatttgatcccgtaaatttaaaactaaactatgcaaatagactgcaccaatagcaaatagttttgtaatctaattttaaaagaaaatagtatgtacaagaaaattatgattatcgcagggattttaacttttatgtttaatggaaatgtatttggtcaggaaattaaatttagtgatttggcatcatcaagtagaggcgaattcacttcctatatcagtaaagatggttcaatttataaaattggcgatagaataaaaataggcgtgccatcgtctaataaaacatttgcttttattacagaaggtgatggttttttattgccaattacgccactgttagtacaagccagtggacaagaaagtgaaatcaaaaggatattcgttacaggaaataaaagagctggatattccgttgcttttagaacaaaagggattacaggattatcaaactattcgattatggttgaaaatgcaattgagactggagaaattaaatcctttggaatgaccagcagtgaagcattagtggcattaaaagaagcaaaagacaaattagatcttgggttaaaaacacaagaagaatataatgtcatcaaagcagaattagtaaaatatataaaatagaaattattgaaaaaagcatataaacaagaaactaccgtttttgtaaataacttccaactataaaaattgcgttatagtcaaaagaaagtctatttttatgatataaataagaatagactttttattataaattacttcaaaattgaattgtaagaatagaacagaagttttaatcttcgattgaggtttcccgtaagggaatcaattttattttaattaaatttaaagattaattttttagccatgaaaaaaatattaagtctccatttaaggagaaatagtatcagtccagctataatataaggaagagaagagaatcacctaattattgaaagcttcacaaaaaaatagccctacgaaacgcagagcttagattatcttcggcttatagccttattgtgaaaagtctttcaaaactgtgatacaaatataatataaaacataatagaaacaactatatgtcaaaaacaattgcttacgacctagggactaactcaataggatggtcaatacgagaagatcaaaaagaaggaaatcaaattttaaatgctggagttattacatttaataaaggtgttggtgaagaaaaaaatattgaatattcgcttgcagcaagtaggacgggaagacgctctttgagaagacgttatcaatcccataaatataagctatggagtactcttgaaatactaatcacaagcggatattgcccaatgactattgaagaactcgacttatggcgaaaatacacaaaaggtattggtagaaaatatcccgtaaatgcggttttattcaacaactggataaaactcgactttaacaatgatggaaaacctgattatacaagtccttatgaattacgaagtgaattaattaatcaaaaccttgattttactcttgaagaaaacagacacaaactaggtagggttttatatcatattgcacagcatcgagcatttaaaagtagtaaaaaagtgcaaagtgatgatagtaaggaagtcaaaaaagaaattatagatgaagaatatataggtgcagaagctccgaaagtagcagcgtttacaaaatttattttgtcgttggggattgaaataaaagaaactgtaggagcaactttttatgatgccgagacaaaaggaattcggattcgtgaaaacttgcaacaatatgtggttcgcaaacaattacagcaagaaataaaatctatttttgacttccaagttttatcatttgatgctttgtttggtaaagaaattgcaaaatcttctattttctggaatagaccattacgttcacaaaaagggacaattggcaaatgtactttagaacctaataaatatagatgtcctgtaagtcatcctgaatttgaagtttttagggcttggtcgtttttaaacaatatcaaatttagaaacaaacaagaaaacgatagccaatggacaaaactgcctttagaaataaaagaagccatatatcaaaagttatttttgggtaggttgaaagctgattttgaattttcagaaataattgattttgttgaaaagtacaatcaacacagaaattgggaacttaattacaaagctaaaactaatgtagcagcgagtcccgtttccgctagattacaagctatttttggagaaaactggaaattattcactcataatacaaccaaaactagaataaataaaaaaggcatagctcacaatattacatacacaatagaagatatttggcatattctattttcttatgatgatgaggaagaagtagagcgttttgcttcggaaaatttggaattaaacgaaaaacaaaccaaaagcattctattactatggtttaaaatgcctgttgcttatggaatgttgagcagtactgcaataaaaaacattaatgtatttttacaaaaaggattaatttataccgaagctgttttgctttccaaaattccgtctttgctaaaagaaacttgggcaaataacgaagacttcttaataagtgaaattgggaatattattgatacaaatagggaagaaaaaaaggatattgcaatagtaaataatcttattgctaaatataaatctttagagttagaagaacaatttggttataaaaacgtacagtataagctagatttaagtgataaaaatgacgtgttagatacatgcatcgaaaattatggagccaaaacttgggaaggattagacgaaaaaattaaagagttaaggatcaaaaaaataaatgatttttatcaaaaatttttctctaattcaaaaagagactatttcaaatctccacacttattagatactttgaaacgctttttagatgataattttaatttaccaaaaaacgaactcaataaactgtaccacccttcacaaattgaaatttatcctcctgctaaagagcaatattacaaacatttagatcaatcattaaccttattggatagacccgacaaaacaggagcttttaaaaatcctatggcaatgcgaacccttttcgaacttcgcaaattgaccaactatttaatcatcacaggacaaatagaacaagaaacacgggttgtcgttgaagtggctagagaattaaatgatgccaatatgcgttgggctattgaaacttatcaaaatagaagaagagaggaaaacaaagaatttgcattggcaattgttgaaatattagaagaattcccaaattcaaaagcaaacccagaaagtaatgaagatattgataaatttcgtttatggttagaacaaatagaagatgatacaactaatgacggtaaaagtgaatatactaaatacgaatgggctaatactaaatctaaagtttacaaagcagtatcttctgcaaaagaaatgattgacaaataccgattatggagagaacaatcctgtaagtgtatgtatacaggaagaccaataaatatgttcgatttattttccgaaaacaataccgattttgagcacactattcctagaagtatttcttttgacaactctcttgcaaaccttacagtctgtgattttgcttataatcgaactatcaaaaaaaataaactaccaacatcattagagaattatgaaaatgatactactatcaatggaaaatattataccgcaataaaaccaagactaattgattgggaaaagaaagtagaatctataaaaaacaatattgaattttggaaaaagaaaagtaaacaagcttcagacaaagaatttaaagataaagcaatcagacaaaaacacctttggaaaatggatttggattattggcaaaacaaaatccatcgttttacaacagaagaagttaccataggatttaaaaatagccaattagtagatactcaattgatttctaaatatgcttttcattatcttaaaactgttttcaataaagttgaagttcaaaaaggaagtattacggctgaatttagaaaaatatttggtgttcaagatccaaacgaaaaaaagagtagagactctcatagtcatcacgcaaaggatgctgcaattctaaccttaattccaagtgcaaataaacgagaagaaattttaaaaaaggcctacagttactatgaaagtaattacaagcaatacactgaaactccgtacaaaggtttttctagaaatcacattgatgaaataaatgataacactttgataaataatattgcaaatgaccaaagacttattcctgccaataaaaaagtaagagcttctgcaaaaatagtttacttcaaagataacaatggcaataaaataaaagatgaagaaggaaacccgatttcaaaatacgcaaaaggagatagcattagagggcaacttcacaaagaaacgtttttaggagccgtgaaacttttaaagaaagatgaaaacggaaaagctattagaaacgaaaatggaaattttatattagatgacacaaagtatgtaacaagaaaatcacttgtttataaaaaaaataatgacagtcctggtttttctaaattagaagaaatagaaaaatgtattgtagataaaaatttatttcagatcataaaaaaacaagtggaaactgctgggggctttaaagaagctttgacggatggggtctggatgtatagcacagaaagaaaagataaagatggaaaaatcgtaaaaaatgcagaaaaaataaataaaattagacgcataagagtttttactgctgataaaaatccaccaataataaaaaaacaaactcatcaaactgaaaaaccaatagtgtttttagagaatagggatcataagcaaaactattatgctacaagcggcgatggttacttgtatttgttttatgaaggtgccgtaaaaggaaagttagaaagagattacgaatgctatagtttattagaagtttcaaaactcaacaaaataaaagctacaacactagaagatttattaccaaaattaaaaacagtaaagaatacagaaataccattacgagctattttgaaaagtggacaaaaagtatttttctttaaagaaaatatggatgaactaaaggaacttcctaaaaatgaattgatgaaaagactctatagaattctatattttgaaaaagatgggttaaaaaaagatggcggaatcaaacgagacggtagaatacaatttaaatttcattcagaagctagacaagataccaaattagaaaacgcagaatcatcattagattttgaaaatcctcatcccaaattacgcttatcaaaaggaaattttgattttgccatagaaaacaaagattttactataaacgctgatggaacaataaaatggttgtaacaaaataatcttatgataaaacgaacccttttctttggtaatcctgcctatttaagcaccaaaaacgagcaaataataatctcttatcctgacaaggaacaagaaaccaaaaccgtggctattgaagatattggcgttatcgttctggaaaaccaacaaatcacaattacgaatggtttgctagaaaaactaattcataacaatgtagcattaatcaattgcgaccaacagcatttgcctattggtttattgatgcctttgaacggacacaccgaacagtcggaacggttcaaaaatcaaattaatgcttcggtcccactcaaaaagaatttatggcaacaaaccattagtgccaaaattataaaccaagcgggattactaaaagaaaaaggaattccgtgccgaaaaatggagctttgggcaaaggaagtaacctcaggtgatgcactcaatcacgaatccagagcagctgttttttattggccaaatctcatccaaatcgaaaatttcacacggggacaaaaaggaatcgcccctaataatctgttgaattatggttatgccattctaagggctattaccgcacgagctattgttagttctgggatgctgcccactttaggcatttttcatcgcaacaaatacaatgcgtattgccttgcagatgatattatggaaccgtatcgcccgtatgttgatttgattgtatgccatatcatggaaactgaagatacttttgaagaattgactattgacattaaaaaacaattattgagtatagccagtatagatgtttttattgatggaaaaaacagtccgttgatggtcgccatgagtagaacaacacattccttacacgaatgttttacgggaacgacaaggaaaattttataccccatttatgtatgatgaacattacacacgtttaaaccagtatagaagtttgtggatattagtattttttgatctgcccacggaaacgcaaaaagagcgtaaaatagccagtacatttcgtaagaaattattagacgatggcttttctatgtttcaattttctatctacatacgattttgtgccagcagagaaaatgccgaagtacacaccaaaagaataaaaaacaacttacctgaacacggcaaaattggtgtcatgcaaataaccgataaacaatttggtatgatggaacttttttatggaaaaaaattggtagaaacagacaaaccttcacaacaattagaattattttagtcttaacaggattaaaaaaaagtctaacatcttgtattgcaacatacaaacacctccttttttgatttcaaaacaaactcataactaccaacatatcagtcaatnnnnnnnnnnnnnnnnnnnnnnnnnnnnnnnnnnnnnnnnnnnnnnnnnnnnnnnnnnnnnnnnnnnnnnnnnnnnnnnnnnnnnnnnnnnnnnnnnnnnnnnnnnnnnnnnnnnnnnnnnnnnnnnnnnnnnnnnnnnnnnnnnnnnnnnnnnnnnnnnnnnnnnnnnnnnnnnnnnnnnnnnnnnnnnnnnnnnnnnnnnnnnnnnnnnnnnnnnnnnnnnnnnnnnnnnnnnnnnnnnnnnnnnnnnnnnnnnnnnnnnnnnnnnnnnnnnnnnnnnnnnnnnnnnnnnnnnnnnnnnnnnnnnnnnnnnnnnnnnnnnnnnnnnnnnnnnnnnnnnnnnnnnnnnnnnnnnnnnnnnnnnnnnnnnnnnnnnnnnnnnnnnnnnnnnnnnnnnnnnnnnnnnnnnnnnnnnnnnnnnnnnnnnnnnnnnnnnnnnnnnnnnnnnnnnnnnnnnnnnnnnnnnnnnnnnnnnnnnnnnnnnnnnnnnnnnnnnnnnnnnnnnnnnnnnnnnnnnnnnnnnnnnnnnnnnnnnnnnnnnnnnnnnnnnnnnnnnnnnnnnnnnnnnnnnnnnnnnnnnnnnnnnnnnnnnnnnnnnnnnnnnnnnnnnnnnnnnnnnnnnnnnnnnnnnnnnnnnnnnnnnnnnnnnnnnnnnnnnnnnnnnnnnnnnnnnnnnnnnnnnnnnnnnnnnnnnnnnnnnnnnnnnnnnnnnnnnnnnnnnnnnnnnnnnnnnnnnnnnnnnnnnnnnnnnnnnnnnnnnnnnnnnnnnnnnnnnnnnnnnnnnnnnnnnnnnnnnnnnnnnnnnnnnnnnnnnnnnnnnnnnnnnnnnnnnnnnnnnnnnnnnnnnnnnnnnnnnnnnnnnnnnnnnnnnnnnnnnnnnnnnnnnnnnnnnnnnnnnnnnnnnnnnnnnnnnnnnnnnnnnnnnnnnnnnnnnnnnnnnnnnnnnnnnnnnnnnnnnnnnnnnnnnnnnnnnnnnnnnnnnnnnnnnnnnnnnnnnnnnnnnnnnnnnnnnnnnnnnnnnnnnnnnnnnnnnnnnnnnnnnnnnnnnnnnnnnnnnnnnnnnnnnnnnnnnnnnnnnnnnnnnnnnnnnnnnnnnnnnnnnnnnnnnnnnnnnnnnnnnnnnnnnnnnnnnnnnnnnnnnnnnnnnnnnnnnnnnnnnnnnnnnnnnnnnnnnnnnnnnnnnnnnnnnnnnnnnnnnnnnnnnnnnnnnnnnnnnnnnnnnnnnnnnnnnnnnnnnnnnnnnnnnnnnnnnnnnnnnnnnnnnnnnnnnnnnnnnnnnnnnnnnnnnnnnnnnnnnnnnnnnnnnnnnnnnnnnnnnnnnnnnnnnnnnnnnnnnnnnnnnnnnnnnnnnnnnnnnnnnnnnnnnnnnnnnnnnnnnnnnnnnnnnnnnnnnnnnnnnnnnnnnnnnnnnnnnnnnnnnnnnnnnnnnnnnnnnnnnnnnnnnnnnnnnnnnnnnnnnnnnnnnnnnnnnnnnnnnnnnnnnnnnnnnnnnnnnnnnnnnnnnnnnnnnnnnnnnnnnnnnnnnnnnnnnnnnnnnnnnnnnnnnnnnnnnnnnnnnnnnnnnnnnnnnnnnnnnnnnnnnnnnnnnnnnnnnnnnnnnnnnnnnnnnnnnnnnnnnnnnnnnnnnnnnnnnnnnnnnnnnnnnnnnnnnnnnnnnnnnnnnnnnnnnnnnnnnnnnnnnnnnnnnnnnnnnnnnnnnnnnnnnnnnnnnnnnnnnnnnnnnnnnnnnnnnnnnnnnnnatcatcttttttggtttcagttgagaattataagctaaaataccatttttaaagcaattcgcaacatggatgtgaaatgaatgcaattccatatattgagaattacttcacctttacaatttttatatatatttgttttgaacaaaacggacagttctacacaaaaacagataactatataagattgattatcaggcatgtgaaattgtacaaacaatattaaaaacctataaatgaataaaaacaaccttctcaacgatatactagataataaaaagaaagtgctcgaattaataattatttcaattatattaggaattggtgtgagttttataagttcaagtttatttgattacttacaaattgaaaataataatgcgctgtgcttatcaattggtcttttcttaacattagttagtttaatttactttacatatagcttattcgggaagagaatatttgacaaagaaattaatggatttttcctagtggacagagaaaacgaaagccttatagatatcgacaattattattactcaaacaaaatttatcaatatcttaattccgcacgaatagaagactcagctattgacaaaaaatggttgaaaactaactttggaaatattgatagtgaaagaaataacatcttaccaatcgttcaggaaatttctgaatattattttttagaaagcctgtcaacgcatttatcagaatttttcaacagcactcaatttgacaaaaacagactaaagatatatgaaagaaatgatattcctgatatacttttaagtaatcaatttttagaattattttcaaagccaatgcaccaaagagctactttcatagatgacgaaacgaataactcagttacatcatttacaagaggagacattgaaggtaaggttacatcaagctataaaaatggtgtaatgtttaaacattttcatttagttttacctaacgaaagtaaactattaagaaagaacaattcaacaattattattaaaaacaagcgatttaagattactgttagaactcttgttagtggtgtcaacacctacatcccagttgaattcagagaactctatttaggtttagataaatatgataaaaaccctgccttcgtaacaacatatagaattaatattgaatttaataaattttcttttctcaaatcatcaagttgggcatattataagtgggtagactcttttttatatagattagagaaaaacgtatccgagaaatattattttaatactcaaattgaatgggacaaaatttatccaatcataaaagcattacaggtaaaaagcacaaaaaaaccaactattaaatcggttaaataacacaatattttagggaatcttgttgtttttaaagatcatcattaccactaacaattttataataatcttcaagaaattcgttagatttttcacgattactcgctactagaaagcttcagagaaatctgaagctttttttatgcaacaaacttaaggttgagacgttactaataattgaacggtacaaaacatccaaaatgaaattacctccctacgacttttatccaagcatttcagacgaaaaaatagtgttgcgtcaaattctggcttcagacatccaagacgttgtagaaatttcattttacgactccattcaagcaaagacaattgaagaagcaactgaaatgctaaagaaaattgatatagattatgagtccggtaattctattcattggggcattgtagacaaagtgacaaataatattgtagggacttgcggttattatcgtggccttgataaaggaattggtgaacttggttgtgttttattacctcaatataaaggacaaggttttatgtcgcttgccatgcaattggccctaaacttcggactggacacaatagggataaaaagtgttaaggcaattacaactatacaaaacgagaaagcaatacaacttcttaaaagactgaactttattaaaattgctaacttacaagacaacgagattgaatatgaactaaagctgaaagtgtaatagcagaaatttggatcgtatcaaattataattagtctgcattctgttcaaaacctgttataaaaataaagctacttttaagtattattcaacaaaaaagcctgtaaggtataaatactttacaggcttcaaacaactaaattaattaaaacttacttaaaaaaactaaaaattattaaatctaattactacgaaaacaaggttattttaacttctactaatcttcggaaacgatcgctttatttttatcttgatttacatctaataaaactgtcgcaccattattattcaacatagtcatatttagggtatctaactgcgccaagtttttggacacttttccgtaaaacatattatacgaaatattcatttccttcaaattattcaatttcccaagctccactggaacttctccaatcattttattgtcaaataaacttaggttctcaagagacttcaaatttgcaatttcaggtcctaattcaccaataagtttattactgtttaaaagcaatgttttcaatgatatcacactatataatgaacttggtatctgaccggtaatttcattattaaataaagaaagaacttctaaatttttcaagtttcctatttgttcaggcagttcacctgaaagaccgttcatatataatgctaactcttgcaatttattcatttcacaaacagagaccggaatagctcctgttaaactattaaatgagatatctagtattttaagttcttttaaattcccaacaattgaaggtatttctccagataaatggtttttatgcaaatctaattcttgcaaactaacaagctcagcaatatcataaggaatttcgccaaccaaattattattggccaaatttagtgaaaccactttttcatcttgcaatttaactccataccaagtagaaacgggctttgataaatcccattttgttacccactgacttccatttgttttttcgtataatttcactaatgcatttctctctgaaggtgcaacattagccaatatcgaaaaggaaaacaaaagggtaaaaaatagagtagttatatttttcataagtagaaattttaactttttacatatctaaatttacatacttttcaactcaacgacaaatataatcgacgaaatacacgtaatcataaattatatcaccgaatttcctacaaaattataaatatttttctataataaaatttattatatttgattaactaacctttaaaatcaattttatggaaatgaatttttatgctctattagttgcggctttttcaacgcttgttgttggatttatttggtataacccaaaagtgtttggaacaatctggatgaaagaatctggaatgaccgaagaaaaaatgaaaggaagcaatatgcttcttacttttggagtatcatttatttatgccttgttaatcagttttatgctgcaaatcatcacgatccatcaaactggcgctttaggaatggtgggaggagatgccagcattgccaaaccttcttatgccgcttttatggcagattatggaatggcttttagaaccttccaacatggtgctttgcacggatttttggcaggattatttttagccctaccattaattggaacaaatgcactctacgaaagaagaagttttaaatatacgctggtaactggaggtttctggatagtatgttttatgattatgggcgggattatttgcgcctggaaataaaaaaatagttaaagtaatctcgtgctctttttgcaagaggacgagattttttatttgtactacttatagttttgttgatcaaaaatcatatatcagcaatttttattatcttaatgctttatacaaaatctccacaggatgcagagcctctctacctgtaccatcagaaatttgatgacggcaactggtacctgacgcagaaattaaagttgttgtttcttcggttctaattgtagggaacaaaacgagttctccaatattcatagaaatttcataatgctctttttcatacccaaaagaccccgccataccacaacagccgcttggaatatttaaaactttataatttacaggaagagataatattttttttaatggcaccaatgatgacaatgctttttgaaaacaatgcccatgcatcctaatacgctcttcattgtcagtaaacaaatttgatgtaattctgcctgcgtctgtttcgtttgctaaaaactcctctatcaaaaacgtgcgcttcgctatttcttgcgcttttatttttaaactccctctgcacaaatcttgatattcatctctaaaagttaaaatagccgatggttctattcctatcaaaaaagcattatcgggcaaattttgactaacagagactacgtttttctcggcaatttctcgggctttttttaccataccttttgataggtacgttcttccgctgattcctattgatggaatttctaccttataacctaaccgatttagtaatttaaccgcagtctgaccaatagcaacatcgtaataattcaaaaattcgtcgttgtacaagtacacggttggtttatcaaaatttcctgcctgtgaataggttttcatccattttgaaaaggtaattttgtgcatcattggcaaattacgttcggtagaaaaaccggtcattttctttattacagttccaacaaaaccttttgtagaaaaattataaactgccggaatactagaaaatagtttattgataactggtgtattaccaattaatcttgaacggaattttattccgtttttatcataatattgctgcagggtttccgcttttaattttgccatatctacattcgaaggacattcagacttgcaacctttacaacttaaacacaaatctaaaacttccaacaacgcttcactatcaaatttattttccttgtcagaatgggttatcgtttcgcgtaacatattggctcgagcacgcgtagtgtgcttttcgttgcgtgttgccatataactcggacacatcgttccgccgctcttttcggtttttcgacaatcacctgatccgttgcacatctctgccgctcgaagtatcccattgttttccgaaaaatcaaaataagtttcaggcatgggcgtatcctgccctgcagtatagcgtaacgaagtatccattggcggagtgtcaacaattttacctggattaaagacaccccatggatcccatgtgaattttacctctttaaacagttggtagatttcgtctcccagcattaatgagataaactcccctctcaatcgtccgtccccgtgttcgccactcaacgatcctttgtatttcttgaccaaatgggcaatatctgtggcaatggttctaaaaagtgccgttccttcttctgtcttcaaatcaagaattggacgtaaatgaagttcacccgttgctgcatgcgcataatgtacgcagtgcaaatttcgcagttttaaaatggcgttaaaatcttctataaaacccggcaaatcatttacatcaacggctgtatcttctattaccgcgaccgcttttgcgtcaccaggaatattagacaataatcctaatcctgcttttctcaaattccaaaccttaaccgtatcttctccaaaaacaattggaaaataattacccaaatttttggttctcatttgagcctccattttgtgggctatttcaataatttcttccttggaatctcgcaaaaactcgactactagaatcgcttttggatcaccttgcacaaaaaatctgtttttgctttgttcgatattttctttggtacagtctaaaatatagtggtctatcaactctatactatcaggttgaaattttaaagcttccagatttgctattaaagattcgttgatactatcaaaatgtatacaaaccaagcctgaaaaaggttttagtgcagcaacaaggttcagcttaatcgcagtcgaaaaaaataaggtcccctccgatcctgcaattaatttacagaaattgaatttttccgtaaagttcccaaatggcatactatcccccaataaatcaagcgcataaccagtattgcgacgtggaatagatttttttggatagttctcatcaaataattttctgttcccttcatttgacaatatcgtttttgcctgaaggtaaatattctgctccagctggcttactacattaataccattgcatttatcttcaaattctttgttggtcaaagaaccaaatataacttcatttccgtcagccaaaaaacctttaatttccaacaaatgttctcgtgttgaaccataaattattgatctcgcaccacaggcattattcccaaccattccgccaatcatgcagcgattactagttgatgtttcaggcccaaaaaataattgatagggcttcaaataaagattcaactcatcacgaatgacacccggttgaacccatgcggttttattggtttcgtctaaggaaataatttttgtgaaatgttgagaaatatccaccacaattccgctgcccactacttgcccagcgagtgaggtaccggcagctctaggaataacactaactttattttctctggcaaattgaattatcttctgaatgtcgtgttccgttgatggtattgccactgctaatggcatttcccgataagcactagcatcggtagcatatagcgtacgcattgttttatcaaaaaataatttcccttctaattgactcgctaacctttgaagattcatttggtattctttttaattttcatcagacccttttagtgctaatactaaaactggataattgagttttataatcaaaaaaagttctcttataaataagaaaac

SEQ ID NO: 3043 - DNA, 16175 bp, synthetic construct
  misc_feature 1..16175: note = Synthetic
  source 1..16175: mol_type = other DNA
ttagctacgagttgggttatttgaaccataccaacttttgtagggcttttaaggtgcatacggggatcaatccgaatgaatttcgaattaaaatggacattagaaagtatcggtaaaaaaggagattttattctgatttattaaagcgtgcttgaaagcagttgttggctatttcgagccatttggatgaatgcataaattgattaacaaccgattcgtttaaaccaacaacgcgagtgcagtcatttacaactactcattgatacttaggtacaaaaaaggttttttttgtgaaagtgcttgaagttgccaaatggctacttggtacatgttttttagcaacatgccatttaaaatcaacttgataaaaaggaactcaacctattgaaaatagcatatcaatgcatgttagcttgaaattttccgaaatgtatttgaaaaaaaacgggcccttaaactaattatggatggtgtaaatggatgaaattaacctaatagacccgttctgggggcaaatgtatcattggaaaattgcctacatgtgccgaataatgtcctcatgttccgaaaaatgataaaatctttattgataaactaaaacttttccaatcgaacctcaaaaaaagacaatctgcatccagcaacccattggatttgctagccctcaaaatctatggcaacaacgccgtccattgaatgacccctcccccattcaaaatattgactactttcgtaaacccaaataacgccttccatcttgattacaacatcaaagctggagccatcggggtttaaaaaaaggtaatatggataagactgtttcaaaaaccaaatggcagtggttgctttcatttccagtcatcgtggccgctttaggctactttgtggatatttatgatttattattgtttggcattgtgcgggttccgagtttgcaggctttgcacttagatgccgatgcggtagggaccaccattattaactgtcaaatggtggggcttattattggcggcatcttatggggcgtcttaggcgaccgaaaagggcgcttatccgtgctttttgggtcaatattggtgtattcattggccaacattgcctgcggctttttgccctatttcccacaagaacagttggtattttggtatgccttgctgcgctttattgccggagtaggcttggcaggcgaattgggcgcgggcattaccttggtagccgaatcactgccggtgcatttgcgggccttgggcacttcgttggtggctgggtttgggttgtcgggcgctgtggtagctgggcttaccgtggaatgggccggcgactggaccattgcctattggattggtggctcgcttggcttgctattgcttttgctgcgggtgagtgtattggaaagccaattatttgaacacgtccaacagcaagacggcgtgagtaagggcaatttctttgccttttttactgaatttaaccggtttaaaacctacctaaaatgtgtcaccattgggctgcccacttggttttgcattggcattttggccatgatggccaaccagtttgcggtgccattaaattgtgggcaattggaaccaggcaaagccatcatgtgggcttatgtgggggtttcattgggcgattttggcagtggttttttgtcacatgccttgcagtcgcgccgcaaagccattgcgctcatgctagcttttacgctcattggcgtcagtttgatgctgttgggcgctgtgcattcggctactgcctattacgctttttgtgtgtggattggcttaggaacaggctattgggccttgtttgtcaccgtggcagccgaacaatttggcaccaacctgcgcaataccgccaccaccaccattccgaatatggtgcggggcttggtacccgtcatgctgtggagttttgactatttaaaaacatttttcagtgttcccctggctgcttatacgttgggagtcgttatttttggtctgggtttttgggctaccaaaaaaatgaccgaaacacacaaccgatcgttacattttattgaaaactaactcatgagaaattatattactattgccttagtccttattactgctatcggattttcccaatcatggaaaggcacattagatgcgggtggacaaaaaatcgaactgtttttggtggtggaagccaagggaactgcccatacttcttattggaaaatccccgctcaaaacttgccgaaactgccttcttctgacacccaaatgacgaccgatagcataaaggtttccatcaaaatgattcaaggggctttcaaagcacgtaaacttgccgaccaaagcttagacgggcaatgggaacaaagtggctataaaattccactcaaaatgaccccttgctcggctgccgatttggcacaagaattggttcgcccgcaaacccccaaagcccctttcccttaccaggtggaagacattcaatacaaaggcagtaaaacaggattaacctatggcgccactttaacgcatccaacgggaagtagccctgcccctgcccttattctcattacgggcagtggccaacaagaccgggacgaaaacatcttgagccacaagccatttgccctgattgccgattatttgacccgaaaaggctgggctgtgttgcgcatcgatgaccggggtaaaggcaaaacgacgggtaattttgcccaatcgaccaccctagattttgccgatgatgtgcgggaacacattgcctacctgaaaacacgaaccgatattgacagcaaacgcattggactttgcggacacagcgaaggcggactgattgcccctatggtggctgcttctgacgccagtgtggcattcactattttgctggctggccctggtgtcacatgcgaagaggtgatggtgtcccaaaacaaagctttattggccgaacaaggctggcctgaagaaagcctcaacaaatacctcgatttataccgtgcgatgtttaaagaggcctatgccaaaagcaccgaatcattgaccgatcggtttgccaaaaaagtaaccgattggatgaaaaccaccccagaagccactgtttctagaacaacaggcattacagatgaagcatctaaatcagcctttgtaaaatcgtatgccgatgcctttgacaatccgtggtggcacacctttgcgggtcttgacccagcgccttatttgaaaaaagtacgctgccccattttggccttaaacgggtcaaaagacgttcaaattgtcgccgacatcaacttggagggcattcgccaaaacaccatgaaaaataagcaagttcgcatccaaaaaatggaaggactgaaccatttgtttcaaaaatgcacccagtgtacagtggctgaatatggtaccattgaaaccactatggagcccgaagtattggccgtgatggctgagtggttaaatggcttggcggttctgggtaaaaaatagatttttagggggtaaagtagtatttaggcttggctatattgcttaactttcgcggattggcgaaggtggcgatttttactacaaatattgatgcggagaactgaactttgataaaccacaaaattgtctgcagagaacgaaaccgccacttttgccaaaccgctgttaccaactggcgttcttgtccaacgtgtctgtaaaccacagtctttgttgagttttactttcattgctgtgtcggctgtgcggtggctgttactgtctttatttcccacatgtctgtgtttattgtattttgaaatgcgttaaatctgtctcggtgaattgcaatacaaagcaagtctgttggtcgtgaaaaaccaacgtaagccattttcgctgattgcttaattctgtcaccaacagttggttgaatttgcgttcctaaaaattggtcttttaggcgttgagattcgtacgattttgcatttgctccatttccgtctttttgaaagtacgattccaaatacaatgttgcacaatgtgtttgtcctttcacagcgtgaacgctggtaatttcaatttcaagcccgtcttctttgtaatgattggttggtgtatgaatttcggtattttcggcaggaatttcgacaatgtcgttattgataaagttcgtacttgcggaaatagttttgtcaaacattgcaagtaaagtcggaacgtatgcttttattccgttccaaacatcgtctgttttttcttggattattccgattgaccaattgtaaaggttcaaattaagttcatcatatttttgaatgtctttatcgtgaataaagtcaatgagttttttctttgtgtaaggtctgtcgtctgcggtgttgatgttttctaaacgcaagatttttaaaaaagcgtttagaatgtttttacgcaaaggttctaatgttttctttttgtcgtaatacagcaaataactttttaagttgtcgtagtcttgtttgggctttcctttttccttcttgaagcctttatgataatcttctaaacgtagttttgttgcatcattcctacttgcttcatcgtctttccagtctgtattccaacaaacaacttttatcggcttttcagaattttcgagaccgttgtcttttacaatttgagcaaaacaaggaataatactgccgatgtttgcagattcaaaaaccaataaatgcggctttattgcacattcattttttccaacaatatcaaaagttgcatcgctgtacaaagcaaattttttcactacatcggcaataggtttgctaagtcgttggctgccatttaagcgtaatatatctgctctgtcttgccaaacatctgttgcttttacagaattatagattgcttggtttttgtcgccaattctttgaatttttgaaacgctgtttccttcatcataaaataccttttccaacaaattgtactggtgtgtgtccatatcctgcatttcgtccacaaacacgaaagaaaagcgtttttgcaaaatggttttgatattgggtatttctttcaaataacattccgctaaaaaataagcatcgtcataattcaaaacgcccgattgcaaaatttgctgttttattgttttgaaagtattgtatgatgctgaattgctgttacttctcaatattatatttccgttcattccgtttgtcaaattcaaatcaatgtcaaaacggaaattcttaaataaattttcggggtcgtgttgattatttagccaagtttttgcagcggaatttggaagattgttatatcgtcttgttgcaacttcattgtaaatatcgtggtcaattctgttcggttttttcttgcatttatgaacgtaaaatggaatagccaaaaactcatcaacaaaactttgtattgtgccaataaaatttggataggaaaataatctcggacaatgcttttgaattttttcttttatctcgtcaattgctgcgttggtatgcgacaaaaccaaaatgcccgatccgtcagcaaaaggaagtttgcgttctaaaataaccaattttgccagcaaagccgttgtttttccacttcctggaacggcttgtaaatctactgtattgaaattgcgaataaatgctttgcgttcatcgtcaaatgttttttccgcaggtaacagcaaacgttcggcatattgaatttcttcatctaatatgttaattacctgtggcatatttaatcgcttttacaagataattaaccgtatcgttagaatcatcaacatttagaattgtgcgaacttcttttattaaatcttcatcaatagcgtttgctatttgatatgcaatttcagttttctttaaccctttattgattagctttattgcaagtgctttttcaaaatcggtgttccaatccgttcctgtgtgaatcttttttacagaggtttcaaatgtcgtttttaaacaggttgatttaaacaaagaatactccaaagtccaatttggtgcaggaaaatattttacacactgctctgctttgccgtttaaggttgctaatttttcttgcgattcctgttgtacggtttgtgtatctcgttttacaaaatcatctccgctcttttcatattctctaatgtcggaatcggtaattacggcaacagggacagtcatattgggttctgcttgtcgcaagtaaatttttgcgtagtggtcaaaacctgtgtgtccaatatttacaatggaaacgcctttttcggttaagttgattccaattgcttttgcaatgcttggtaaaagaatttcttctgcccaaccttccactaaaatcacacctttggcaaaaaacaaattggcttttgtggtgtctaaaaacttttctaaaaacttgtaattgtcttttcccaatttagtgtaggtgtcgcccatcgaaaaagcgtttgcgttgttgcaaattattaagctttccaatttgagtttggaagccaaattcgggctatgggttgtaagaataagttgaatatccttttgcttttgaaaggcttcaatcacttgcatttgtgcctgtggatgcaaatgtgcttccaattcttcaaccaagcctaaacgcaaacctgaccaatttgatttggttaaatgaagcaattccgcagccataaacaaacggtttaaagttcctaaccccgggtttggttcgccttttaaagtcaaagtaagtttttcaagaatacttttgatgtcagttgatgttgattcaaattcactttcgttatcattgctataaaaacttttaatgtaaccatcaattttgtctttaatctgctttccctgtttgggttgtcccgcttcatcaacttcgttgaaatacttttctaattcttcttttaacccagaaaatatttttaccaaatcattgtctttttctttccctttaaatgcttcatcgcccaatagaatttgcgacaatcgtgaattgcgttttgcaatcaattcgttttcggcatcacgcaaaggctttaaataagttgctttcagatattcttttgcctctgccgtgagtaaatagccgtcttcatcaacacctgcttttacatctgttggaattattttatcagcttggcgttttacatcgtaattaagttttaaaaatggtttcgcatctgcaccagagccattccaccctagccattctgtaaagtttttagcttcatcgggattcaaactgtcaaaggttaattctatgcggaaacgatttgcttctttgtgaaaatccttatcatcaactcttatgtaatcgtagctgtgtgtttttaaaaccaattttatggcatcaacaatggctgttttgcccgaatcgttttcgccaataattacattcaaacctttggttaggtttaaatccaaatgcggttttgcaaggtctatttcgcccattgcaccgaatttcctataattccaaagtttgatgtttgatagatacattgtttacgttcttcgttttctgttctttttttgctgtctaaacagtcattgttaagtttttagttgaccgtttcattgttgcactgtcgtcctacgcttgctgccaactcatatataaccgcagcataataggcacatgaaacctaaggtgccaaacgcaccaattcccatgaccaatcgggcaataacgtataccgaaggcggtcatgcaagcggttgggtcggccttgccaaaactccacgctgatggggctcactaaataacctccccaatgtggtgggcggctcactcctgcggatgccgcatttaattcggcttcttttagtgacaactcgagtacttctcggctggcaatcacctgactttgcggcgaaaccacggctcctaactggctcccaagcggacggctttcaaaataagtatctgacgtttgcgcgtcaatggttttggccgttccctttactataacttgcctttcggccgacggccaaaaaaacgacaaacagacgttggggttctgggccaaggcctgtcctttttccgataaataattggtgtaaaatacgaagccttcttcgttgaattttttcaataaaaccacccgggttttaggaaacccatcgaggccaatggttgaaatactcatggcattgggttcgtcagtaccgccaaattcttccaattcataaaaccaactgtgaaacaagttcatcgggtcgttgggtacgttggtttcaagtaaggcgctcttttcgtaacttttgcggtaattgcttaagtcgctcattaggtttttagttttttctttttagctgcggggaacaatacattatttaaaatcagacgaaagccaggcgaattggggtgtaagtctaaaacagtaggagcatcccccacccgatgctggtaatcttcggggtcgtggccgccataaaaggtaaacatgcctttacccttttggccatgaatataacgggcctcattgttcaactggttttcgcccaaaatcaagacgttcgatttaattaattcccgtttaaaagcggtggtttgccccataaaacctttgaccaattgggtgtgattctggcacaacatggctggaatcgggtcccatttggccgaaaaatccatcaaggtaaaatagtctttttccatgggcatgttgcggccattggtggtatcaatatcggaaaattcatattgctctgggcggcgttccaatacatagtctttgaaagccatcgtattgccataattgatgcgcgcttggtaattcggatctgaatcgtcgccatcaaacatgggttcgcaaatgtcaatcccttcggcagacaaggcaatgtcaaaactatcggtggccgagcacatggcaaacataaagccaccgccgatgacaaaatctctaatttttttggcaacagccaatttatcttgtgacactttggcaaaccccaatttctgggccaagtcttcggatgcttttttttgttcaatataccacggcgcattgcggtaagccccgtaaaatttaccatactgaccggtaaaatcttcgtggtgcaagtgcaaccaatcatagagtatcagctgatcggccaatacttcttcgtcgtaaatgggtgtaaacggaatttcggcataggtcagcaccatggtaaccgcatcgtcccagggttgtttgccttttggtgtgtacaccgcaattttaggggctttttcgagcaccacggcttccatgttttgcgaaggactcgaaatgtcggccaaaatctgattggcagtggcatcggacaagcgttcgtaactcaccccacgaatttgacattcgtgttggatttcttccgcatcgggcaacaaaaatgagccaccacggtaattcagtaaccaactggccttgtatgacttatttaaagcccaataggtaattccgtaagctttgaggtggtttttttgggtttcttcgtccatgggcaacaaaatgaaaccagcccgcaaagagcttgccaacaacaacaaagacaaagtaatatagtaacgcatgttggtttaaaatttggatttcaaagatagttgttttgacacgaaagtcgaaagtcgaaagtcgaaagtcaaaagtcaaaagttgggggatttggaaatttggaaatttggaaattggcttgaggttgaaagattgaaggattgaaggattgaaagatttgaaaatttggaaaattggaaatttgggaatgggtttgaggtttgaggtttgtagagtttagaacaaatgaaaataattaatcctcaaaaaagcaaaaaaaatgccccgtatggaaagacgaggcggcttaaatgttttcacaacggaataatccttattgtgaattgcttcaaaaatcaaattgactttgtgttttattctttttttttattattttcgtgtttatattctgcaatattacaaagtaatgcttcaaaaaaaagctccacgaaacgcagagctaagttaatcttcggcttatagccttattgtgaaaagtctttcaaaactgtgaaacaaagttatagcaaaatttaatactaacaacaatatgtcaaaaataattgcttacgatttaggaacgaactcaattggctggtctattcgagatgaccaaaaagaagggaatcaaattataaacgctggtgttgttacctttaacaaaggggttggcgaagaaaagaatattgaatattctcttgccgcaagtagaactggacggcgctctttaagaagacgctaccaatcgcataagtataaactatggagtactctcgaaatactcattaacaatggctattgcccaatgtctattgaacaattagaccaatggagaaaatataccaaaggtattggtagaaactatcctgtaaatgcagttttattcaataattggataaaattagacttcgacaatgatggaaagcctgattacacaagcccttatgagttgcgaaatgaattaattagtcaaaaacttgattttactcttgaagaaaataaacataaactaggtagagctttatatcatattgcacaacatcgagcatttaaaagtagtaaaaaagttaaaagtgatgatagcaaagaagttaaaaaagaaactacagatgatgatttaattggagctgaatcaaaaaaagtagaaacatttacaaaatttattttgtctttagggattgaaataaaagtaactatagggtcaactttttatgatgcagaaaaaaaaggaataaggatacgcgaaaacttacagcaatatgtagttcggaaacaattacagcaagaagtaaaatcaatcttcgacttccaaagcttatcatttgatgctttgtttggaaaagaaatttcaaaatcggcaattttttggaatagacctttgcgctcacaaaaaggaacaataggaaaatgtactttagaaacaactaaatacagatgtcctgtaagtcatcctgaatttgaatttttcagagcgtggtcgtttttaaataacatcaaatttaaaaacaatcaagaaaatggtagccaatggacaaaattacctttagaaataaaagaagctatatatcaaaagttatttttgggtaggctaaaacctgattttgaattttcagaaataattgattttgttcaaaagtacaatcaacacaaaaaatgggaacttaattacaaagctaaaaccaatgtagcagcaagtcctgtttctgccagattacaagctatttttggagaaaactggaagtcattcactcataatacaagtaaaactagaataaacaaaaaaggagtagctcacactattacttatacccttgaagatatttggcatattttattttcttatgatgatgaagatgaagtagaacgatttgcattagaaaacttggaattaaacgaaaaacaaaccaaaaatttcttgctattgtggtttaaaatgcccatttcttacggaatgttaagcattacagcaataaaaaacattaacctatttttgcaaaaaggattaatttataccgaagcagttttgcttgctaaaattccatctttattaaaagaaacttgggctaacaacgaagactttttaataggtgaaatcggaaatattattgatgcaaatagagatgagaaaaaagaaattgccataataaataatctcattgctaagtataaatcattagaacacggagcaactatgtttgctcataatgattttggctacacattacaggaaagtgataaaaatgatgttttacaagcttgcatcgaaaattatggcaataaaacttggggaaacttggatgaaaaattaaaagatttaaaagtcaataaaataactgaattatatcaaggttttttctctaattcaaaaagagattatttcaaatctccgcacctattagataccttaaaacgctttttaaacaataattttgaattatcaaaaattgaactcaataaattataccacccttcacaaatcgaaatttaccctcctgctaaagagaaatattacaaacatcttgaacagtcattaactttattgaatagtccaaaaacaggagcttttaaaaatcctatggcaatgcgaaccctttttgaacttcgtaaattgaccaattatttgattataacaggacaaatagaacaagatacacgtgtagttgttgaagtagctagagaattaaacgatgctaatatgcgttgggctattgaacattatcaaaatagaagaagagaggaaaacaaagagtttgcatcagctattgtagaaatattagaagaatttccaaattcaaaagccaatcctgaaagtaatgaagatattgataaatttcgtttatggctagaacaaattgaaaacgatactatcaatgaagggaaaagcgagtatgcaaaatacgaatgggcaaatactaaatcaaaagtctataaagcagtttcttctgcaaaagaaatgattgataaatataggctttggaaagaacaatcctgtagatgtatttacacaggtagaatggtaaatatgtctgatttgttttctgaaaacaacaccgattttgaacatactatccctagaagcatctcttttgacaactcacttgcaaatcttaccgtttgtgattttgcctacaatcgaactgtcaaaaaaaataaattaccaaccgcactagaaaattatgaaaatgatgtgaccataaatggcacctattataccgctattaagccaagactaattgattgggaaaataaagtagaatctttaaaaaacaatattgaattttggaaaaagaaaagcaaacaagcatcagacaaagacgctaaagataaggctattcggcaaaaacacctttggaaaatggatttagattattggcaaaacaaactcaatcgttttacaacagaggaagttacaacaggttttaaaaacagtcaattagtagatactcaattgatttctaaatatgcttttcattatcttaaaactgtttttaataaagttgaagttcaaaaaggaagtattacagccgaatttagaaaaatatatggagttcaagatccaaacgaaaaaaagagccgagattctcacagccatcacgcaaaagatgcggcaatcttaactttaattccgactgtaaataagcgagaggatattttaaaaaaagcatacaactattacgaaagtaattacacacaatacaccgagtctccatataaaggttttactagaaatcatatcgatgaaataaatgatactactttgataaacaatgtagtaaacgaccaaaaagttacacctgccaataaaaaagttagatcctcaggaaaaatcgtctactataaagacgaagacggcaataatataactgataacgaaggaaaaccaatagcaaaatacgccaaaggcgatagcattagagggcaacttcataaagaaacatttctaggagcggtaaaacttttaaagaaaggtgaaaagggaaaagctactagagacgagagtggtaaatttgtcctagaagaaacaaaatatgtaactcgtaaaccactaattttcaaaaagaacgttgatagtcctggtttcgctaaattggaggaaatagaaaaatgtattgttgataaaaatttgtttctggttataaaaaaacaagtagaaacagctggaggatttaaagaagctttgactgatggaatttggatgtttagtaaagaaagaaaagataaagatggaaaaattgttaaaaatgccgaaaaaataaacaagataagacatataagagtttttactaatgataaaaacccgccaattataaaaaaacaatcttatcaaaatgaaaaagagttagtttttttagataatagagaccacaagcaaaactactatgctacaagtggggatggttatttataccttttttatgaaggaatggtaaaaggaaaattagaaagagattatgaatgttttagtttattacaactttcaaaactcaacaaagtaaaagctacaacattagaagatttattacctaaaaccaaaaaggtaaaaggaatagaaataccattacgagcaattttgaaaagtggtcaaaaagtgtttttctttaaagaagatatggatgagttaaaggatattcctaaaaatgaattgatgaaacgtctctataaaacaattgattttgataaagatcaaggcagaataagatttaggtttcatttagaagcaagacaagataaacttttaggagacggaatgtcatcaatagactttgaaaatccttatcccaaattgcgtttgtcgaagggcaatttcaattttgcaatagaaaatgaagattttattataaatcctgatggaactataaagtggaaattttaaaaactaaatgcctatgattaaacgcacccttttctttggcaatcctgcctatttgagcacgaagaatgagcaattggtggtcacttacccagacaaagagcaagcacccaaaacggtggccattgaagacatcggtgtgattgttttggaaaaccagcaaattaccattaccaatggtttgctggaaaagctcaccaacaacaatgtggccttgatcaattgcgaccaaacccatttgcccattggcttgttgatgccactgagcggacataccgaacaaacggagcgctttcggaatcagattgaggcttcgctcccactaaagaaaaacctgtggcaacaaaccatcagcgccaaaatcagcaaccaaggtgcgttgcttaaagaaaaagggattcccatgcgaaagatggaactgtgggcaaaagaagtgacctcgggcgatgcgctcaatcacgaagcccgagcggcggtctattattggaacaatttattcaaaatagaaggctttacaagacagcaaaaaggcctgcctcccaataatttattgaattacggctatgccattttacggggcattacggcccgcgccattgtcagctcggggatgttgcccacgctgggcatttttcaccgcaataaatacaacgcctattgcctggcggacgacatcatggagccgtatcggccatttgtcgatttgattgtatgtcacatcatggaaaccgaagacagcattgatgaactcaccgttgacattaaaaaacaattactgagcattgcggccatcgatgtgcaaattgatggcaaaagaagtccgttgatggtggccatgagccgcactacccattcgctgcatgaatgttttgaaggcagtgcccgaaagattttatatcctgtatatgtatgacgaacattatagtagacttaaccagtatagaagtttgtggatcttagttttttttgatttgcccaccgaaacgcgaaaggaacgtaaaatagccagtttatttcggaaaaagctattggacgatggcttttctatgtttcaattctccatctatatgcggttttgtgctagcaaagaaaacgcagaagtacacaccaaaagaatcaaaaacaacctgcccgaacatggcaaaattggggtcatgcaaattaccgataaacaatttggcatgatggaactattttatggcaaaaaacctgtcgaaaccgacaaaccctcgcaacaattggaattgttctaatgaacgacaggatcaaaaaaaacaaacttctaccctaccctacttcttcaatacaccgttttaattgattctataattacccacaatccccaacatatcagctaattatgacgcgacacgttgggaatcatgagtaaaaatacaattttgaaagcaattcacaaccctccgctcttgtttttgcgacttctaacggttgggaatcatgagtaaaaatacaattttgaaagcaattcacaactacgtcaaatttatgaatcgatacggtagggttgggaatcatgagtaaaaatacaattttgaaagcaattcacaactgagcatgctatcaaagattacgcagatcagttgggaatcatgagtaaaaatacaattttgaaagcaattcacaactgtagagggtttaaaacgcttttctgataagttgggaatcatgagtaaaaatacaattttgaaagcaattcacaaccatcgaagatttctttgcgatggcaatggcgttgggaatcatgagtaaaaatacaattttgaaagcaattcacaacatatttaaactcacagttttatagaacgaggttgggaatcatgagtaaaaaaacaat

SEQ ID NO: 3044 - DNA, 6370 bp, synthetic construct
  source 1..6370: mol_type = other DNA
  misc_feature 1..6370: note = Synthetic
cgcaattttttctccaggtaaaacaacaatcccgcattgctgcgggactactgaaaatgtttacacaacggaataatccttattgtgattttataaaaaagccccacggagtacgcagggctaagaattctcttcggcttatagccttattgtgaaaagtctttcaattttcatcactaaattaagtattttacgaataccaaatagctggatatgtcaaaaatattgggacttgatttaggtactaactccattggctgggcaataaggaatacagttttgcctgaaaatcaaattgaaaaatttggtgtaatcacatttgagaagggtgttggtgaaggtaaatctggcgaattttcctttgcggccgaaagaactaaaaaccgctccttaagaaggcgttaccaggcacataaatataagttatggacaactctcgaaatcttaattattaatggttattgcccattgtctattgaaagtttaaataaatggagaaagtatgaaaaaggaattggaagaaaatatccggttgatgatataatgttcaataactggataaaattagatttcaatagcgatggaaagccagattatacaagtccttaccaacttcgtttggaattggttactaaacaattcgatttttcaaaacaagaagataaattcaaacttggcagggctttatatcatattgctcaacatagaggatttaaaagcagcaagaaggtacaggacaaagaagaaaatattactgaagaagattatattggagcagaaaagaaacgagcaaaatttattgaggatttatccgccaagcataaagtaactactgtgggagctgcttttgccatggaagaaaagcaaggtaatcgcattcgtaaaaatttgcaccagcatgttatccgcaagcaattacaaaatgaagtaaagcagatattcaattttcaaaatctatcattcattgatttatttaaaaaagaaatcaacaaatcagctattttctggcaacgccccctacgttctcaaaaaggaactattggtaaatgtactttggaacctactaaatatcggtgccctgtaagccatccttcatttgaagaattcagggctttgtcatttttaaatacaatagaatataaacgtaaagatgatgatgaaaccagatgggaaaaaattccatttgaattaaggcacgaaatatatgaggaaaaattttttagaatttctgttcctgattttgattttcttgaaatacgaaaattaattgaaaaacataatggccatgataaatgggaattgaactacaaagacaaaaccaatgtatctgcatgtcctgtctctgcaaggcttcaggatatttttggaaacgactggaaaaattttaagttagaaacaaaccaaataaaaaaaataaaaaagaaagacagaataataaccgaacataaaatagtttatacccttgaagatgtatggcatgtattgctttcttttgatgatgaagatgatgtgagagattttgctgtggcaaaactaggattaacagataaagctgaaaagtttgtaacactttggtataagatgacggtagcttatagtatgctcagccttaaagcaattaacaacatccttccttttctaaggcagggaatgatttatacagaggcagttttattagctaaaatgcctgagatttttggagaagaactttggaaggaaatagaagcaaatcttacagaaagtattggcaatattattcatcttaacagagaagaaaaaagaaagttaaccgttgcgaatagccttattgcaaagtataaatcacttgataatattttaaaatttgccgacagagatttcgattatactttaaagaatgatgataggaaagaagttgaagaaacagctaaagaagcttacggcaataaaacctggtttgaaaaaaatgaggaacaaagaaatgaaattatttcagaaatagcagcttcttatcaatctttttttaatgataagcaaagagaatttaaaaagcttccgcatttgctagatactttgaaaagttttttgagagataattttgaaatagacgaaaagaaattaaacaaattatatcatccatcacaaattgaaatttatccacctgcaaaagaaaaatactataaggaatacaacggccattttaaattgttagatagtccgaaaacaggatcatttaaaaatccaatggcgatgcggactctttatgaattacgtaagcttattaactacatgttagttacagaccagattgatgaagaaacaggtattgttgtagaagtagcccgagaattgaatgattccaacatgcgttgggctattgaaactcaccaaagaaggcggcaggaagagaataaagaatttgtcaatgcaattattgaattactgaaagaacatccatcaagtaaagctaatcctgataataatgatgatatagataaatttcgtctgtggtttgagcaaatgaatgatgaaactgtaaatgatggaaaaaatgattattcaaaacacgagtggaacaatcaaaaatcaaaggtctataagcaaattgcagcggctactgaaatgattgaaaaataccggctttggaaacagcaggaatgtcaatgtttttataccggaagaatgataggaatggcagatttgttttctgaaaacaatattgactttgaacataccataccaagaagcgtctcatttgacaattctatggcaaatctcacagtatgcgattttgattataaccgaaatgtaaaacataatcagattcctacttttttacctaactatgaaaccgatgtaaaactaaatggaaaaagttatactgccataaaaccgagattagaaaaatgggaacagaaaattgaggaattgaaaactaacattgagtattggaataaaaaatcaaaacaggcaaccacaaaagaagcaaaagacaaagcaatcaggcaaagacatttgtggcggttcgagttagattattggcgtaataaattattaagatttactatgattgaagtaaaaagcgggtttaaaaacagccaactggtagatacacaaattatatccaaatatgcttatcactatatgcgtacagcttttaataaagtaagagttcagaaaggaagcatcactgccgaattcagaaaaatctttaatgtacaacccaaaaatgaaaaaaaagatcgtagcaaacatagccaccatgccaaagatgctgctgtgctaacattaattcctatagacacaaaaagagaagaaattttgaaaaaagcttatgtatataatgagagaacacaccaactatatcatgaaagaccgtatcacgactttaaacaatcctatatagaagaaatcgaagatgagattttaattaataatatagccaaagaccaggcattaactcccggacaaaaaaaagtaaggataagaggtaaaaaagttttgttgagaaataaaaatggagagattataaaagatgaaaacggaaatccaaaagagaagtgggcaaaaggtgatagcataagaggtcagttgcatctggacactttttatggcgcaatcaaaaaagtaaaaaggaatgaaaatcttaaaccattgaaagacgaagcaaataattttctttacgaagatggattatatttcgttgtaagggaagaatttgtttataaaaaaaatacagccagcccgggctttaaaacattagatgaaattaaaaattctattgttgacccgcatctttataaagcaattcagaagcaagttggacaaaagaatttaaaagatgctatagcagcgggtatttatacattagatagaaatggaaaccctgtaacaacagatcaaaatggtaaaaaaataaatccaattaggcatatcagaatttttgtaagagctaaagagcctttagcagttaaacaacaaacaaatttttccaataaagaatataaaaatagttactgggctgataatgccgaaaactatgcctatatactttacctggggaaaatcaataatgtaacagaacgaaaatttattcttttaaatctttttgatacatcaaaacttcatcaattaaatggctcaaaaaaacttgaagtggaagctgagttaatagccaataaaaaagggaataagcttcaattgcatgcaattttaaaagccggtcaaaaggttttattttataagaatagaaattctgacgaattaaaggacttatccaaaacagatttaatgaaaagactatatcgcatcattaaatttgaaaaggatggaagaattgtatttggacatcacttagacgccaaaagtgataatgaacttaaagcgttaatacctatatatggcaaatctatttttaatggattttcaactatcaattatgaaagcccttatcccaaactaaagctatctgtaggaaattttgattttttagtagagaataaacattttgaagttaagcctgatggagaaataaaatggttgctaaatatttaatcacatgaaaaaattaaacagacttaagattctttctttagcactatactatttgtttatgcccaaaagaataaggtataaattttatttcaaaacatcaccaattgaaaatcttgctgttgcattgattatgaacaaaataaaataccggaggttatttattagaccccgggaaataaagaaaaaaataatcttcactgaaaagaaagttaatgatacttatataatcccttacagtgaatgatcaaacgtactctctacttcggcaacccagcatatctcaaaactaccatggaacaaatggtggtggagatgcatgacagcggggaaaccaaaactattcctattgaagatattgggttgctgatcttagatcatcagcagatcaccatcacacaaggattgatggccaggctgctgcattacaatgtagcattgatcaattgtgatagcacccaccatcctgtaggacttttattaaaccttgatggcaatacattgcaaagccagaaatttaaggcacagttagatgcctccctgccgcttaaaaaacaattatggcaacaaaccattattgcaaaaattcaaaaccaggctgcattattaaaacaaaaaaatggggattgcgttttcctgaataacctgtgtaaaacggttgcaagcggcgatagtgataaccatgaagcaaaagcagcttcgtattactggaagcgaattttcccggaagtacctgaatttcgccgtgaccgctacggactgccaccaaacaatctattgaattatggctatgctattttaagagcaattgttgcacgcagtttagttggctccggtctattaccaactttaggcattcatcaccgcaatcaatacaatgcctactgccttgctgatgacataatggaaccataccgtccctttgtggatcacactgtttgttctatgataaataatacagatgaatggtgggagctgaacactgagcgaaaaaaaattctgctgggcatgccggctatggatgtttatttagacagtcagaaaagtcctttaatgaatgcggtgcaacgaacaactgcttctctggctaaatgttttgaaggtaatctgagaaagatagcatacccccaatttgtaaaaaatgatcgttaaatgccatttgaacgccttaacgcttaccgtattatgtgggttttagtactttttgacctgccaaccgaaacaaaagctgaccggaaaaattataccctattccggaaaaaaatactaaaagacggctttcaaatgttccagttcagcatgtacatacgccactgcagcagcaaagaaagcaatgatgtacatacaaaaagagtgaagaaatttttgccacctaaggggcacataggaatactgtccatcactgataaacaatttggtatgatggaaattttcagaggcagggaaataataaatgctcctgaaactactcagcaacttgaactattttaaactaaaaagtgtttttgaaataacaggaatgaaaaaacgggacatatgccccgttttttcattctaaaatacagcttaaacccaatgctgtagcggattctatcaaaatcggatgtgaaagaactaagctacattaaaaattgaaagcaaatcacaacgatcaatgatctgttgcttttcatctgatggatgtgaaagaactaagctacattaaaaattgaaagcaaatcacaactaaccattggtaatgatggcacagggaaaggatgtgaaagaactaagctacattaaaaattgaaagcaaatcacaactcatttgctgcggcacgtattccggactgcgatgtga

SEQ ID NO: 3045 - DNA, 23177 bp, synthetic construct
  source 1..23177: mol_type = other DNA
  misc_feature 1..23177: note = Synthetic
tgcgacggcgatcgacctgctggcggcggcgtttcccggcgggtcgattaccggcgcgccgaaggtgagagcgatggagatcatcgcggagttggagccgacggcgcggggaccgtattgcggcgcgctcggttacctcggcttcgatgggagcatggacacgaacattctgattcggacggttacggcgggccgcggctggtggcaagcgccggccggcggtggaatcgtggctcaatcggttcccgagcgcgagtacgccgagacctggcacaaggcggagggactgttacgggccttccgttgagcggcgcgcggccggttccgtttcgcaatcgaaatgcaaatacgctgctgtttttgcaattgaatggcatctgggcgaccgatgaaactagcgaccgcgttcgggcgtggcggagcggggcgcgccgtcaaagtttgcccaagcacgagcatcggcgcggaatcggccgaacggtccggcgacttcgacgcaatcgcgcgttcccgggacgggtcgtagggcggtcgcttctctcggtaaacgtgcacgcgagggcgaaccgattcaaacgaaacggacgcccgacgacgcgggcgcgacggcgaacgagcgcggaatcgtccacggatggcgccggtggccgcagatttgcggcgtccgtggcgagcagcagagcaaggaggtatgcggcgatgcagcgttcgagcttaggaggttggctggcggcggcgtatctgttcgcggcagtggcgttatattgcagcgacgcccgtgcgcaatcgtatgcggaactggtcgagcagcaccgcgagttgacggcgcggctccgcgcgatggaagctgctggtcttgccggaactcaagtgccgcgcggcgatgattccgcgcacgctcacgagtccgacggccacggcgaatcgcgcccaggccacggcgacgaagctcacaatgagcacgaagggcacgacggtcacggcgacgatgaacacggcgacgacgagtggacctgggaagatcccttcacgcccggctggtggcgaccgtcggacgagtatcggccttactcttggatggcgccgccgaacgaaggattcttgcgcgacctgcttcgcggacagttcgtcgagacgcaccgcagctcgtcgggcacgccgtgggtgcatcccttcacgatcgagccgccgcacctgcaccgcgacctgttcatgttctacaagtacaccaaggacgcggaaggaacgacgatcgacgagcacgaagccgagattcatctcgactgggcgctcacgcggcggttcgggattctcgtcgctgctccatttctcggacttatcggtcccgacgaacaggcgacgggattcggcgacatcgaaatcgcgccgcgcgtcgtgctgatcgaatccgaacgcttctttctggcgacgaacatcttcatcacggcgccgacgggcgacgattcgcgcgacttgggcgcaggagaaaccaccatcgcgccgctgctcacgtcgtggcacgacctcggcagcctggaccggattccctggacgcattggaacaccgcgtatctgaacgtcggtcccgaatcgggcgtcggctccggcgagacgtcgctcgtctataccgcggtgttcgcgcattcgttcgtgggaccgaagctgatcttcccgcaccatcacggcaacgggcacggcgcaggcaacggatcgcacggtgaggaagcccacgagcatcgcggcggcacgatttcgccgatgggtccgggctacccgccgggattgaccagcgtgatcgtcgaattcaacggccaatcggagtttttcggcgagcggcaaacgtacctgcaattcctgacgggcgtcagctatatcctgaccgactcggcggaagttcgctttgggatcaacttcccgctcaatcggctcaaagagcaaatggatgcgcagtacattctggggttcagctatatcttctgagcgcgcattccgcgacgcgacctcgatgtgagcgcgaatcttattcgcctgccgaggtattcggcgtcccctagtctatagccgttgcttgacggcgtcacccaaacgggctatcctgacgcccgcgtcgcaaacgggttccctttcacttgcgaatccgcggcgggagtaatcggcctgcagttcccggtcgttcctttttcggatcatccgttttttgaattgccaatgacgaatccaatacgttcaccatcttgaaaagaggagccccgctatgttcggaacagcattgcgtctgggtatttgctcggctgtcgctttcctcgggtcgcagccgaattgggcgggtacgctgactccgccgtgtgccgggtgcgtgtggtcgtcggaccttcccgaaacgccgtttcgcgccgtgttgtcgaggcggagcctctccgtctcgtcgggagcgcgctacggcgaattcacctttgccgggccgaagctcgcgacgatgttaccgctgccgtccggcgtcggagaagtcgctttcgatgcctcggagggcgcgtactacgcgatgggattgcacggcatgaacacgctcgatcttgcggcgcgcaagttgacgccgcttctgctgccgtcctcgctgcccgaattcagttggaccatgggcatcgcgttcgatcagacgcgaaaccggctcgtcgtcgccacgcttggcggaacgggctatttgtattcgtatgcaccggcgtccgacacgtggtccattctggcagaccttcaaggtcgcgatccgacggcgattgcctttcatccgcaaaccgatcgcctatacgcgataaccgccgacggttggtcagggcaagcattcctggagtttacgccggatggaagcctggttcgcagccgaccactcgacttgtcggtcatcggaagcgttcaattcggcgactttatcgaccgcgccattcaactggttccggttgacgagtacctcgcgcttgtcgtgccggatgtcgaggacgtgccgcgcatgttcgtcatcgacccgtcgactgccgagatgcgccgcgtcgttcccattccggagcccgcggcgtacgccatcgcgctaaccggcctgatttttgcggcctcgaccgtgagacggcgcggctaccggacgtaaccgcgcggcacgtcgcacgtggaatggcggcgcgtggccgcttcgcgtaatcggcgcggcggtcgcctcgctcaagaggcggctgccgcgttctcgcgctgcgcccccaggcggcggaactttacgtaattgcgagcgttgtcgctttcccgcgaatcttcgacgtacggccgcagcgtgttccatagctttggccacgtgtagggtttcgtgaggaatgcggcggcgcccaggttgtacatcgtgcgctcgatcgacttttcgcgccgcccggtaagtacgatgacggggatgtcgcgcgtgacgggattttctttgagccggcggaggacgtagtcgccgtttccgccgggcatttcgaagtcgagcagaattgcctgagccggttcggtgaatgcgcgtcgatagccctccatgccggcaacggcccggcgaacggcgacgttgtgtgcggccaagcgcatttcgaggctcttggccaggtcgggatcgtcgtcgatgcagagtatccacgcggccggagcctcggtcgaccattgcgaatcgtccggcgtcctttcggtgttgcgttgcacggcgaggtcgttcggcgtcaaggcggcgaagacggcgtcgaccagggcgtcgccgtgcgcgggtagctcttgaggcgattgtcgcaacggcgccgtcgtgacgtcgtctgccccgttcgcggcgtccgttgcggcgacgatctcgctttccgccggtttggcttgccgcggcggtttggcaagaatctcctggagcagcggcccgacgcgctcccacacatcgggacatttgagaacgtagtacgcacacatctcgtggcagcggcgaaccgtttcgggctgcgactcgccggtgagcatgatgatcggcgtgtcgccgagcaggcggccgctggtgaccagttcgcacacggcgaggccgttgccgctgggcatgttcacgtccagcatcacgatatccggcgcgagcgagtcgatcatcctcaccgccgacatggcatcgtaggtaacgtgcggcgtcaggccgagcgattggcaacgcagggcgagcgcggcgacgagatcgcgatcgtcgtcggcaatgagaatcgttttcgcgggaagagcggtttcggacatgatgggttcctcaacggagtcgcggagttcgcggtgcggcgcgcggtacgatgaaaaaacgcggtgtcaggccagcgcggactaattggcggacggtgcgacgtcgcacgccggccgcaactcgggcagcaaatcgtaaagcagttcgcgaagctgttgccatgcggccggcgacttggcgaggtagtgcgcactgagttccaggctccggcgcatggtcggacgatcggtgcgaccggtgagcacgacgaaccgcgcgcgggacaagcccgcgtcttgggccaggaactcgcagacgtccaagccgttgccggtgggcatgttgacgtccaggcacacgacgtcgggctgccatttctcggcgatcgacatggcggtcagcacgttgcgggcggtcagggccgacagtccgagttcgcggcagcgggtggccatcgcttcggcgaagtcgtcgtcgtcatcgacgaacaggatgcgtttcgaggcactcacgagtttcctccgcgggttcggggttttcgattgcggccgtcacggcggcgaccagttgtttcccgtcgtatggcttcgagagaaagaaccgagctccggcgtcgagcgctcgctgcctgtcgaccaggcttgcggacagcatgacgacgggaatgtcgtgcgtcgcgtccttccgccggagctcgtcgagcaccgaaagcccgtcgcggccgggcatccggacgtcgagcacgatcgcgtcgggccgaatctgcacggccgtcgcgatcgcgcggtcgccgtcgcccgcggcgcacgtctcgaagccggccgcggccagtctgaggctaatgccgcggactagctccgtttcgtcgtccaccaccaacacttgcttgtcgtcgctcacggcgcgcctcgctgtaattcgatggttagcatgcgtagtgcggttcgttctcggccaacgcccggtcgaatcggccgagcagggcctcgcgccctaccgcgacgtcccacgttcccaggcggtcgatcgcaaatggcggcaagggaccgaagggccgattgcggttggccttgcggtgttcgcgcttgacccgcttgagatatccgtcgacgtccggcgcgtcggccgcgagcgcgatcaaccagcggtgcgggtcgcggcggaacagcagatcctgctggcgcagcatgtagttgaagaacgcgtcgacgtcttctgcgtcggtctcagatacggtcgcgtcgatttcggccgtcagcagcgaaacgatccgcggggcgtgcttgcgttgggccatggcatcgacatagcgccgtatgaccgaccgcggctccgccaagggcagcgtgaagctgaaggtgctcccttgccccacgacgctgtcgacgcggatttcgcccagattcaacgccacgagttcgcgggcgatgttcaagcccagaccgaagcccttcgtactgctcttgacgttgcgattgagttgcttgaaccgctgaaagagcaactccaactggtcgggatcgattccgggaccgttgtcggcgacggcaatcgcgacttcctcgtttgccggatcggcgcgcacggacacccggacgcagccgggttcgttgcagaacttcatggcgttcgtgacgaggttgatgacgacgcggcccgccttgtcgctgtcgcagtagacgtcgggcacgtcgagggccgcatcgacctggaagtcgatgcgtttgacggcggccttttgggccaaggccggcgtcacgtcggcgaggatgtcggccacctgagcgcggcgccgccacgcgccgagcaagccagcttcgagacggcttacgtcgagcatgtcgtcgaccatgttgttgagatcgttcgcgcgaaccgccgccacgtctagcatgcggcattgctcttcgttgaccggcccgatcgttccttcgcggacgagcgagatatagtccttgatgacggttagcggcgtgcggaactcgtgcgacacgttgtcgacgaagcgatgggccgtcttgtagagcttccgcaagcggcggttcttcgcttcgagttggccggcttgctgggctaacttctgctcgctcgcctggacttcggccagcaagcgttcgatttgcgccagcgactcctggcgctggatggcatggcataggacgcgctcgagcgtgtgcggttgcgactcgcccttgacaatgtaatcctgcgcgccggattcgatcgcctgcgtttcgatgcgcgggtcgtcgagcgcggtgaggacgacgatcggcgttgccgcgtcgatctggcggatgcggcggaccgcttcgagcccgtccgcgtccggcagcgaaagatcggtcagcacgacgtcgaatcggccgtccgcgagcgcctcgattccgccggcgaggttctccgcccacgccaacgcgagcggcattcgggaatggagcaggctcttccggagcaattgatgaaagccaggatcatcctcgatcaacaaggcttgggtggcgctgcgcggcatacgtcgcatccctcgttatcgaatcgcgatttactcaagacgctcgcgggggcaatcgcttcgcggtgcaaggagcgtggtcgccgggatccggcggttttttcatacgcaggtatacgaaccggcgtatttcgcggaccagggccgatgcgtcgaacggttttttcaatacccgcgctgcacccaagtgccggacgcggccccagacgtcgccgccgcgccggcccgtgacgacgatgacgggaatgctccgtgtttccggattgcggcgaaggcattcgatgagcatttcgcccgaaccttgcggcatgcagaggtcggtcacgatgagatcgggtttggcgcggatcgcttcccaaaaaccttgttcgccgttgaagtcggtgagaatccggacgtcgaacggttgcagcgccgcgacgatcgcgccgacggcgtcgggatcgtcgtcgatgcagaggatcgtcggccgcttgcggcgccggacgctcgatcgacggaaacttggaacgtgagcgatgggcacgcgagggtctcccgtggcggcctggggagtgctttcgctgcggacacatgtcggaaaaaacgcaagcggcgtcgaggaaggagctttccgaggcggggccgacggcgaatccgagttccctgccgtgccgatatctcggtcggcgaggggccgtcaactgttgaaagcatactttgattttgagggcgacacgcttcggatgtccgcaataacatcccgcattcgcgttttacgcgccgcgccgttcggtcaatcgcgacatcgacggatatgtggcgcagggcgagtgcgtttaccctattccgcggcgcaggaaagccatgcggccccgccaatgacttggcgcgatgcgcgtggccgcgcgctacgagcaggaacggtccaagaacgggcctgctgtcgagccaatcgccactaaaaatcgcagcgcacgccagtcgctcaatgacgttatctcgcgcgccgcctctccgtcatgcagagcatgacggccacaatcacttcagctctttgatccgcacgttcttgaactgcaccgtcatcggcgggccggcgtgcagttgtagcgcgagtatcccttccgcgacgaacttcttcgggtcgttgtccgtcacttcgatcgtcgtcttgccgttgatgacgtgcttgagctcgcggcccttggcgatgatcgtgtagtcgttccaatcctcgtgcttgatcgcggcctgaatcgcgtcgctcttgccgacggagccggtgacgtcgcgcttgccgttctcgtcgaacacgaccttctcgccgcgctgggccatgattccgcgggtcatccgctcttcgtacagtatgcccgtgtaagtcttgcccgcttcgaagtcgccctggtagccgccgacgacccagttgccgaagtccttgctgcgatactggatgccgctgtttccgccgacgatcttgtacgagagccgcagctcgaaatcgccgaccttgccgcccttccagataatgaacgtgttgccgctcgtcggattctccttggtcgtcttgccggtgagcgcgccgtcctggacggaccagaacttggggttcccgtcccagccgtcgagcgtcttgccgtcgaagatcggcttgaagccctcttcgtcgtctttcgcgctgcccttggcgtcgtcgttcttggcggacgttgcttgcgtcgtcgccccgcccgccgcttcccgcgccgcgcgccacgcttcgagcatcttctcgatgcccgacttgttgaagttgtcgggcaccttctcgtcgtgattggcgagtagatcgtcgaccgtcagagacttcgacgcgacgccgccctcgggcacgtccaacttcgcgcaccacacgatcgcgttgagcaccagcttgcggaaatcgtcgtggccccagttccagtgcacgtgcccgccggtgatgccgaagccgcgaccgccgtccggccgctccgccgcccaggcgacgtgctccggcaagcccagccgcgagcgaaccgtcgggttgccgctgtgcggaccgtcgccgcccttgcgcgtcgagtccggcggcgtcgccgtgagaatcggcgtaacgcctttcatgtcgccgcgaaaccgcatgtggtaataccactcgtcgttgatcgcaaacggccgcacgccgcgcgcgaccggatggtccggcagcttctcgaacttcgccacccagtgcgggttcaccgaccagtgcgtctcgaaatacccgccgatccagtcgacgaagtaatcgccggcgtcgcccttgggcacttcgacggcgtagtggatgcaaacgattcccgtccccttttgggcgatgccggccatgcgttcgagcttccgcatcaccatgtgcccgccgccgccgtcgccgtacatcacgatgcagtcggcgtcgtcgagggccgcgtcgtccttcggccacccgccggtaaacacgaccgccttcgcccccggcacgttctcgttcacggccttcgccaaaatcatgcacccggcctgatgatcgtgcgccccgaagccgtggctcgggttgcccgcgatgaagacgatcttcttggcggcgccgttggccggctctcccgcggccggttcgccggtcgccggttcatccgcccggccatcccgcgccgccagattgacggccgcccccatcgccagcccgcccaacacgatccaacacagccaacaaaccgcccgattccgaaaccgcgccatgatcgctctcccatcgaatgcggaaatcaaaagccaacccaaagccaagcgaaaaccaagaactgccgcccaccgcaagcaaaaagcccagcgggcaacgccaaaaaaacaaaccacaaacgcccgcttatgatacacacccgccgcgcgaagcgaaacaaaccggacgctcgccaaccccctcttgttgtgcgtttcacgtgaaacgcacaacaagggtgagaaaaaacaggccttgacaacgacccagcttgccaacgcctatgcgaaaagacgacgaaagaggctgccagccacgcccccagcgcaaagaaaaagccgccctacctcacggcattgcggctggttgccccgtagggcagtgcctgcgaatgtttcgtcttgttacgaaaagtctcgcagagcaggagcggatacactgaacggaagtatccgttagaataggtgccttgtcaatagggcaaagaataaaatcactgcgggggtacgcggatatgggaaatcgcactctcggtctcgatctcggcgcgaactcgatcggctgggcactcgtcgacaccgacgaaaacaaaatcctcgccgccggcgttcgggtatttcccgaaggcgtcgacaacttcgacaccaagaaggaaaagtccaaaagcgaagcccgccgcatcgcccgcgggatgcgccgtcagatcgctcgccgcagccgccgcaaacgcaagctccgcgaagcacttgtcaaagccaagctcttgcccgccgatcccgcggaacaacaacgactcgaagggctcgatccctaccacctccgtcgccgcgcgctcgacgaaccgctcgcgccctatgaactcggccgcgtcctgatccacctcaatcagcgccgtggcttcctctccaatcgcaaaactgaccgcgaacgcaaggccgaaaccaaaggcatgctcgccgagatcagcgccctcgaaggcaagatcaaggccgccaactgccgcacgctcggcgagtatctttgccaaaaggccgagaccctcgaccatcgaaaccgcgccgaagacgaccacgtgcgccatcgccacacgttgcgggcgatgtacgaatgcgaattcaatgccatctgggacgctcagcaacgaaaaaactcgctgctaacggacgaactccgcggccgcatccaccgcatgatcttcttccaacgcaaaatgtattggcccgcgtccgtcgtcggccgctgcgagcttgagccaacacaaaagcgctgcccgcgggcggaccgcctcgcgcaatggttccgcctgctgcaagaagttaacaacttgcggtacgtcgacccggcgaccggcgacgattgccgcctcgacgagcaacagcgcacactgctcatcgacaagctcgcgcagaaaaaggaactgtcgttcaacgacatccgcaagacgctcaacttctccgagaacgtcacgttcaacctcgaacgcggtaaacgcacaaagctcctcggtatggtaacggacgcgacccttgccgcgaaaggattgtttggccctgcctggtataaacgcccggaaacccagcgcgatgaaatcgtccgcacgctcatccacgccgacgacgacgaaatccgccgccgggccataagcgactggggcgtatcgcccgatgttgccgaagcgctcgtcgatgtcgacctgccgtccgagtacctgggtctcagccgtatggctctcgaaaaactccttccgcacatgcgccacggactcctctacatgaccgacgacgacacgccgtctgcactctcggaagccggttacctgcggcgcgaccaaatcatgcgcccgcaactagattgcctgccaaagccacccgaggtcacgaattccgtcgttcgccaggcgctgcacgaggttcgcaaagtcgtcaacgccatcattcgcgaatacggcaagcccgaccgaattcatattgagcttgcccgcaacgccaaggcgacttccgaagagaggaagcgcattggcgaagccatgcgcgaacgcgaagccgtccgcgacgatgccgcgaacaagattcgcgagcacggcgtaaaggtcacccgcgacgcgatcgaccgctatttgctgtggaaggaacaacgcgagacttgcccctacagcggcaaaccgatcagcatcgcccaactcctcagcggcacgggcgaaatcgacatcgaccacatcctgccctactcccgctgcctcgatgattcgatggccaacaaagtcgtctgctttcgcaccgccaatcacgacaagggacaagaaacgccccacgaatggctcgcggcgcgccagccggcagaattcgagcaattgaagcagcacgtcgcatcgctgccatacaacaaacgcaagcgatttacgcaaaagacgctcgaactcgatgatttcattcagcggcaactcaacgacacacgctacatcagccgcgccgtgctggaatatgtccgctgcctagtcgcagatccccaccacgctctgtgcgtcaagggagagcaaaccgcgacgctccgccggcattggggactcaactccgttttgcgccacgacgacctcgacatcaagaaccgcgacgaccaccgtcaccacgccgttgacgccatcgccatcgccctgacggatcagaagcgcttgcaacaactggccgagatgaatcgccgtggcggcgaagatgtcaccggcgaaatcatgctcgacccttgggataaatttcgcgaccaagtcattgaagtcacaaaccgcatcgtcgtttccttccgaacgcaacgccggatcgcaggagcgctacacaaggattttatgtatggtgcgacggtgaagccacgaagcgcgacgatagaccgtccttgggcaaagacatggacagaagatgcgacaacgtacgtgcgccgaaagaagattgaggaactcgatagcacgaagcacattgcgaaggtacgcgattcagcgattcggaaaactcttgaagagtatcttcgtgttcgtggaatcgatccgtcgctcccacaaaagttcagccccacggtttggaaggatggcccaaccatggcatcaggcattccgatcaaaaaggttcgcttgctggaaaaaggcgagtcctatcacagcattcggacacacacatacgtcgaactcggcagcaatcaccacatggagatcgtggaattacttaacgagaatggtgaccccattctgaatcgtgacggaactccgcaatgcgaaggtatcttagtttcaatggtcgaagctgccgaacgaattcgtgacgcacaaagagcgcttcgtacacgacgacaagaattatcgcacctgacgctctccgcatcaaagctcgagcggagtattcaagtgacgaaaagagagaccgcagaacgcttcccggtcatacagcgcaaccacggcccgacacgccgtttcattatgtcactgtcgattaacgacgtcattctgttggaactcgataacgggtctacgatgccgcatcgcgtacagaaaatgtccgaagggagcatcatccttcgtccgcacacatacgccggcaaagtgagtgactacgacaagccaccgctcatccaacgtcgcacgccaaatacgctgcgcggccgcaaagtcacggtcgacccgctcggccgcatccgctgggccaacgactgaacgcatcgccagtagtttgcatggtacgctccaattagggtaacaagcgcgcccggaagctgctcggctgccagggagggttcttcgcccctgccctttcccttggcctaggccgcgcggatgatcaagcggaccatcgaaatctcgcgcgagccggcgcatctgaccgtgcagctcgagcagcttctgctcaagcgcgacgggcagaccgtcgccagcatcccctgcgaggacgtcggcgtcgtcctcgtcgaccatccgggcacgacctactcccacgccgctctcgcccagctcgcctccgtcgacgccgccgtcgtcgtttgcggccgcgatcatctgccggccgccatcctcctgcctctcgccgatcattctcaggtcgtgtggcgcgtccgcgaccaggtcgcactcgccggcccgctgcgaaagcaactctggaaacagatcgttcaggcaaagatccgcgcccaggccgcgaacctctccgccggtcccgcgcgcacgcggctcttggaactcgcccgcacggtgcgcagcggcgacccgaagaaccacgaagcccaggcctcgcgcgtgtactggtccgcgttcttcgagagcatcgcctttcgccgcgaccgcttcggcgacggaccgaacccgctcttgaactacggctatgccgtcctccgcgccgccatcgcgcgggcgatcgtcgccgcgggtctcttgccgtcgctcggcatcaagcactcgaaccgcgcgaacgccttttgcctggccgacgacctgatcgagccgctccgcccgctcgtcgacgcccgcgtcaaagaactgctcgcaaacgagcgcaacgagctcgatcaacagaccaaggcggcgctcctggaactgctcacgatcgaaacccaagtcggcgacgaaacgggaccgctgatggtcaacctccatcgcatggtcgcctcgctcgtcaaatgcttccaaggcaaggcgaaagcaatcgagtttcctgagccactcaaagcggactccccaaatgccgaatcccgaatcccgacccccgattccccagcccccgtcccgtgcaactgagcggctaccgatgtatgtgggtccttacgctcttcgacctgccggtcgacacgaagaaagcccgtcgcgcctatgccgactttcgcaagggcttgctcaaggacggtttcacgaagatgcagttctcggtttacgcccggcactgcgcgagcgaggagaacgcggccgtccacatccagcgcgtcgagcgcatggtcccacccgacggcgaagtgcgaatcatcaccatcaccgacaaacagttcgagcgaatgcgcatcttttggggaaaaatccgcaagctccccgcgccgccgcccgctcaactcgaattattctgacctcgattgctcacaaacccactctgcgaaaggctttaggcgtgagatagtgtatccgctcccgccccgcgagcaatccgcaacgagtcggcaacgatacgtcgagttgtggtttttgcgtcggcagtctacacgtcgaggtttctcacctcaagcgcatgcttctcaataaactcccgccgcggttccaccttatcgcccatcagcacgcggaacatttcgtcggcgccgccggcgtcttccatggtgacttggactagcgtgcggttggctgggtcgagcgtcgtttggcggagctcttcggcgttcatttcgccgaggcccttgaaccgggtgatctgcaaacccttttcgccggcggagcggacggcggcgagcaggccgcgaaggtcctccaggccgatctcctgttcgccgcggcggaacgagtagcgggcgtcctggctgccggtccgctcgaccggcacgagcgcgtcgatctcgaagcccatcgtgcgcaagtcggcgagcaggttgttgatcgtgcggacttcgtggagctcgacgatgtgcaagcgctgggggtcaggggtcaggggtcgggggtcagggctggaggttggaggttcgaggtttgagattggggcttgagcgttgggcgttgacgattgagcattcgtccccgacccctgacccccgaccgctgacccctgaccgttttcgacttttagctcgccttggatcgcttcccgttgcgccaaaaactgatcgagcgtttcgcgggtgctgaaccagtgctcttcgcggccgatgtagacgtggaagtacggcaatcggcccgtgacgggatcttgccgcagggcgtgcagtttcaggctgatcccgcggcgctcgagcgcgacgagggcctcttccagcgccgcgagcgtgcggcacagccgggccatctcctcgccggcgatcgttcgcccgtcgcgcgggtcgaactgggcgtccttgaggcccatgtccaacagttggcccttcatctcctcttcggtttgcacgtaatagacgttcttcttctcgcggacgcggaacagcggcggttgggcgatgtagacgtgcccgccttggatcaggtggtacatctggcgatagaagaacgtgagcagcagcgtgcggatatgcgagccgtcgacgtcggcgtcggtcatgatgacgactttgttgtaccgccgcttggacaggtcgccgtcctcgccgaaaccgacgccgatcgccgagatcatgctccgcacttcttcattcgagagaactttgtcctcgcggctcttgtaggcgttgatgatcttgccgcgcaagggaaggatcgcctgatattcgcgcaagcgtccgccctcggcgctcccgccggcggaatcgccctcgacgaggtacagctcgcatttggccacgtcgcggctggtgcagtcgcggagtttgcccggcagaccgcggccggaaagggcgcccttgcgatcgcggacgagttggcgggccttccgcgcgctctcgcgggcttcggcggcaacgacggccttgccgaccatcgtcttggccgacttgggattctcttcgaggtatttcttcaagaactcgccgaccgccgagttgacgatgccttcgacttcgccgttgccgagcttggtcttggtctgaccttcgaactgcggatgcggcacgcgaacgctgatgaccgcggtgaggccctcgcgaaaatcctcgccctgcggcacgaggtccttgaacaggtcttcctgcttgccgtaagcggtgagcgtgcgcgtgagcgcggtgcgaaagcccgacaggtgcgtgccgccttcgatcgtgccgatgttgttggcgaacgagtggacgttttcggtgtattccgacgaatactgcatcgcgacttcgatgccgacgtcgtcgacgttcgtctccaagtagagcacgtcggcgtggatcggttcgctcgcgcggttgaggtgctcgacgtactcgatgatcccgcgctcgtaatagaacgcgtccccttcgccgacgcgatcgtccttgaacgtgatccgcacgccgcgattgaggaacgccagctcctgcaaccgcttgtagagcaccgggtattcgaatttcgtgacggggaagatcgtcgggtcgggcttgaacgtcgttttcgtgccgcggcgatcggtggcgccgacgcggcgaacatcgccggtcggcacgccgcgttcgtattcctgctgatagacgtgccctccgcggcagacctcgacctcgcaccattcgctcaagaaattcacgacggtgacgccgacgccgtgcaacccgccggagacctgatacgcccccttgtcgaacttgccgccgaacttgaggaccgtcatcacgccttgcagcgtcgagaagccgaggtcgctgtgcacgtcgacgggaatgccgcggccgtcgtcttgcaccgtcaccgagccgtcgccgttgatcgtgacgaacacgttcttggcgtgccccgccatcgcctcgtcgatcgagttgtcgacgacctcgtacaccaggtggtgcagaccgcgcttggtcgtatcgccgatgtacatgctcggccgctggcgcacgtgctccaagtcggaaagatgcttgagatcgtcggcctcgtactcgccatccgttggacggcggtgcgtgagatcgggattgtcgctctgctgcggttgttcggcgtccatgaagtcgagggtcaagggtcagggaccaagggtcggggaagagaatagttatttgtgggcagtggacagaggacttttcgctcaccatccactgcccgctgctcactctcccacacttcccgttcggaatcgaatgttcttgattttgtgctccggcagccgcttggcgagttgcacaatcaactgcgctttgcgaaacgtgagttcttgcgacacggcggagttggcgacgacaacatcgagcacaccgcgacgaacggcgccgatacgggtgtacgtcgcggttgcttcgccaacggcttcgcgccatgccgcggcgatgtcggccgaggtcgtttcttgggcataacctcgccgggcaagcaactgcgacacgacatcgcccatccgcttcgtttttccgcgcgaaaagttgcccggctccccgcgtcgccgattgatgtcgccgacgagccgcgaaaactcgccgctcgcgtgaatcgactcactcgccttgctcttcgccatgcgacgttccgaaagtaggtcaggtcaagcgggccaaagaacgtttgattatcgttggaatcgacccgcgctggcctgacagcatagcgctggtcgccgcatccgtcaggccggcgcggataacgcctattcacaaatcaaagtcgttcaccgcttagcctgacctacggaatgctcgtcattctgcattcctcattttgccttttgcatttcgctaccgttcgcgggccaagggcatcacgacgtatccgtacccgtcgtcggtcgagaacacgccggcttgttcgccgtctttgacgtcgaacgtcaccgtccggtcgacgtcgagcactttgaggaaatcgctcacgtaccgcggatcaagcatgatcgcgatcttcggtccgtcgtaggtgatcggcagttcgacgtgcgactggcccgcgtccgcggctctggccgtaagcgtgagcgtgccgtcggcgaactggaagtcgacgccgcggctttcttcactcgtgacgatcatcgcctgacgcacggccgagtgaaacggcccgacggaaagctcgatcttggccgaatccgaccgcatcgggaacacgtcgcgccaccgcggaaaccggccttcgaccagacgcgagtagatcgtcgcccgcggactccgcacgagcacgtcgttatcgcgggtggcgatttggatttcgctgtcgccgtcggagagcgcccgttcgatgagttgcatcgaccgcgtaggtacgatggtggcggagttcgcggcggtcttctcgaaaccgccgaccgcctggcccgggccttccattttcgagagccgccggccatcggtcgaaacggcagtcacgctcttctcgccgaactccaagagcacgccgcccagggcataccggctgctctcgctgtcggtcgaaaacaccgtacggcggatcatctcgcgaaacagccgtgccggcagctcgaagaacttcgcatcgttgaacgaggccaccgtgggaaattccgcgggattctcggccggcaggcggaactcgctccgctcgcccttgacgatcgtcccttgaccgtcggtttccagccgcatcttctcgtcgctcgattcgcgcaagatcgaaccgaatctgccgaccggcagcaccgccacgcccggcgtctcgacgtcgatccccgccacgtcgatgcgaatgccgatctccaagtcggtcgcgatgagcgtcgctttttccggtgtgacttcgagcttgacattctggaggatcggcttcgggctgcgagccggcgccaccgcggcggccgtttggaatgcgtgcaggaacttttcgcgctggcaggtgattttcatggcacaatcccttttgggccgacgctcgagggcactgggtactcccacgaacaatcgtcggcgatgatgaaacctaattgttgttttgaatacggtattgttataagagcggggcgaatccgtgtcgctcgtgcttgcggcggaggcgaaaaggaacgtcgtatccgggaaattggcggacttctaccgtgttcgctggggcggaaaacctgtttgcggctcgttcgcggtgcgtcgagcgttcgttcgtcaccggcgtgcttttgcagttgtctcttaggcgttgtgcgtaagtcgttcttttgcgagcattctcgaacgcgccgctaacacgttttgcggcgcaatcggaatgcaatccttcatcaccatccttcggcgtacaagcgctctttgatgcgggttatcgccagggtcgtttccgcgacgccggccgcgagttcgcgttccactttgcggacgttgtaggcgaccgtcgcgtgatcgcgtcccgcgaaatgccggccgatcgcttccaggctttcgccggtcaattcgcgtgccaggtaaatcgcaacacaccgggcggcaacgatttctttacgccgcaccggcgagcgaagttctgacggcttcacgccgaaatgttccgccacgtgctgcgtaattgtccgcagcgttgccccagtctgtcgattcgcggcgacgcgctcggccacgaaacggtcgtcaagcgcgaccccttccgatcgggcttccatgtcgaggcgcaggatcaatcctgcaagctcgggcacgctttgcaaatcgcactcggcgagccgttcgattgcggccgacgatagggataatccgcggatgagcgccagctccgcgaggatggcggttcgcgcggccttgcccggcttgccgagcggtaggaccaagcctccgtccaaacggctcacgagcccctgcgagaagcgaggttctcgcgccggattacatcgggccgtgacgattgcccttccgccggaaaccgccagcgtatcgagggcggcacacaattcgcgttgcgccgccggcttgccggcgaggtcgtcgatgttgtcgagcacgaagagcgcgatcattttccacgcggctcggcgcggctcgcgcgttcgcgatgtggtgtcatcgtcgccgaagtcttcggcgtcgtcgctgtacggccggtcccatgcgcgagcgaagtccgcgcccgtcgtcgccacgatccgcgcttcggaatgcaatgtttgccaacgtcgggcgagcgccccggcgaggtgtgtctttcccacgcccgacggaccatagagcaacacgacgggcggcggcgaggcatcgtccagcaccgcatgagcggccgcgatggcatacgagtttgcctggtccaccacgaacgagcgcaaccgcggcgcagccgtcaaccgttcggccgcaagccgctcgtcgtgcaaccgcacgggaggtaacggaagatggatcgcgccgtcgaccactcggctccgtccgcgaacttggaggaaaaaatgtgcgaaaaaccgccggggcaacgcgcgcaccgccagccctaaaactcggcccagattataccggttttcgatcgccgccgggagtatccgcaccccggaaaatcagctaatttcccggcccgcgcagcccggtttccgcactcgcaactcgttggctaacttcacgatacgggcgaccgcatcaccgacttccgcaagcgtgttcgggcggccgaaactgaaccgcagcgccgagccgacaacctcctcgtcgcagcccatcgcccgcagcaccggcgacggctcgttcgacccactggcacaagccgaaccggtcgaacagcagatgcccgccatatcgagggtcagcaacatcgcctgccggtcgactccgggaaacgcgacgttcgaggtctgcggcaaccgctcggcctcgccgccgttgacgatcagcccgggccaggcggcggcgagttgggcctcgaatgaatctcgaagttcgcgcagatggcgttcgcagtcggcggcccgatcatgccagattcgcaaagccgccgccatcccgacggccagcgtcaccgattcggtccccggtcgcagccccgcctgctgaaacccgccgaacagaatcggctcgattggaacgccgccccgcaggatcaacgccccgatcccccgcggcccgtggaacttgtgcgcggcgaccgtcatggcatcaacgtccaaatcgcgaaacgatacgccgatcttgcccaccgcttgcaccgcgtcggtatggaccacgattccgcgggcccggcaaatggcggcgatctcggcgaccggctcgaccacgcccgtctcgttgttgccgagcatgacgctcgcgatccgggtttcgggcgaaagcagccgctcaagttcgtcgagttgggccacgcccgcccgcgaaacgttcacgcgatctacgcgccagccgagccgttcaagctgttgcgccggtccaagaacactcgggtgctcaatggcggaaattacagcacggggcggcaacgcggcggtctcggcgctccgctctcctgtctcctgtctcccgctggcggtcttgagcgccgccgcggccaatcccagaatcgccagattgttcgcctcggtcccgccgctcgtaaagatcacacgatccgcggccattccggccagattggcccccagcagcgtcccaacttcctcgcgagccgcttccaaaacccgccgcgccgttcgccccgcggcgtgggaactcgccgggttggcataaccttgccggtcgcactcggccatcgcgtcgacaacggcggggtcgattggagtcgtcgagttgtgatcgaggtaaatcccggtcaatggacgcacccagtcgcaatcgaacgctatcgtggaatgagcgccccgcgacaacgaagtcgccggaacaatcgacgaggatgagccagacgacgacaagtgtcgccacacgcgaggcgctcggcggtccccggatcgatcgccctcaaggccgcttgggcgtattcgcgggtgaaagcatccgcatcgcgagctagtacgatcaactgagggacggccgatcgagccggtgggccaatttggcgcaacgcgtcgatgtattggcgtcgcgtagccccttcggaagaattcattcccacgacgtaatgatgaataaaatatgccgcctcttccgcaagaatggcatcgtcgctactaacgtccttcgcaacactccgcagcgacgcaagcatctggtcttgttgctcgaagtgcaggtgtgctccgtcaagaaacgctgcctcgtgttccggcgacgttcgcagcgacgcggcaatctctttgacgcggcgacgatcgttttcgacaaccaccaatgccccgccggcgcagatgcgcacggcctcgctttcgtcggtcaataaacgtcgcagcgccggaatcgcgtctctcgcctctgggccgaagttttcgagaatcccgagggcgaatagacgcatcgcgatcggagtcggtcgttcggccatttcgatgagatgagggacttcttggacggtgcggttggcgttggcgagcatgcaactcagatagaacgtgccgttgccgatggagtgcagacactcgggcgtcaattcgagagccaaagctgcgccgcattcgtcttgtaaacgtcgcatccccgcttgcaatatgggaagcacgggctcgtccacgggcacgagtcgaactagcgctagcatcaatacttcgtaattgtcgtcagaggaattcgccgtgatcgcgagccaccgtcgcttgagaatcggcagcgcggcgcgggctttcggaccgatggccgctagcgcgtaggttgcgcttgttcggacggtcgcgtcatcgctcgacaacgcgtctatcaacttcggcagaagtggctcagtctcgtcgcggagtcgccgagcgtcttcgcttatcatgaacggactgatgtccaagtgttcttccgccaatcggtcgagcatggagcacgccgccgcgcggacctgcgcacgggggtcggcaaggtcgtcgatcgcttgcgga

SEQ ID NO: 3046 - DNA, 23033 bp, synthetic construct
  misc_feature 1..23033: note = Synthetic
  source 1..23033: mol_type = other DNA
ccgcctcccacatgcgccgcacctcgcggttgcgtccctccaccagcaccacatggaaccagcggttggcgccggtgccgcccgattcggtgatctcctcgaagcgggccgggccatcctccagggtgacgccatgggtcagggtatgcagcatctcaggcgtcacctcgccgaggacgcgcaccgcgtactcgcgttccacctggagcgagggatgcatcagcttgttggccaactcaccgcgggtagtgaacaacagcaggcccgaactgttgatatcgagccgtccgaccgctatccagcggcccttccgtagcgatggcaggccactaaaaaccgtcttgcgaccttccgggtccttgcgggtgaccagttccccctcgggcttgtaataggcaatcacccgcaaagggccttgcgtcctggcctcgtcccggacctcgaatacccgccgtccccagcgcagcttgtcccccggcttggcccggtcacccagttgaacctggcggtcattgagctggatctgcccgtcggcgatcagccgctccaactcccggcggctgccccaaccggcattggcaaggatcttctgaacacgctcgccctgccccgcttcattctgctttttcatcgcttctcgaaaccctcagcacatcaagacccggaactatacccttgaacacccaagagagccccatccgattccaccagccagccagcgccgcgcgatgcatcccgcatatgggataaacttgagccccgtcgcaacaaccccaggcccggtccccatgaacgaaatcctctgtgagcacaaacccgcccccgtcaaactcgaagtgctgggggtctacgactggcccatctggaaaaaggaggtctccaccttcccctggacctacagcgataaagaaacctgctacatcctcaaaggccgcgtcatcgtcacccccgacggcggccagccccaggaattcaaacgcggcgacctggtcaccttccccgccggcctctcctgcacctgggaaatcctggaggccatcgagaagcactacgagcttggatgatcaccgggtcgataagcccgccacagaccgctgaccagcgccacggcgagcgggaccgccgccgtccacaggacatggatcgtgtcgagcggcgcgaggccgagcgcccaggcgcgtaacgcgggcagcagcagcgtgacgccgagataaagcgccgcggccgcgacggccaggggcacgcgcgcactggcgctgccagcgagctgtatccacagacagaggaaatagaccgcgatgccgatcaggcggtggctgtccccctgcgacaggccgccgagccgggcaagcccgtcctccgcatgcaggatcagcaggatacgcagggcgttggcggccagcgtcgccgcccaggctgcggcgaacgcgccgagcagcctggccgggcgcagcggcaacgcccgcccgcgccacagccaggcgagccaggagatgagcaggaaattaccgccggcgcaggccttgacgatgaggatgccctgcccggcatccagccagtctccggtcggcagcggctggaacctgagatcgctcaccacctccagcagccgcgccagcggccacagcagccattgcagttccgttgcgtccgccatgccgtagagctgcttcagggccagtgcgagcagggcgattaggccccactcgccccagcggcgggggcaagcccgctcggcgcgggcttgcgttgcgagggacggcccttgctcagcggcaggcatggcggagcttccgcatcagactgaccagcgccatcagcgcgacgagccagtagagttccggctccggcacctgcctgggggcgagcgccagttccgagacgccctgcggcaggggcaacggctgctgcacctcttggccctcgcccttcggattgaccaccacctcgtccaccgcgacgaaggaggtgtgggatgtcaatatcgaatgggcaagccccaggcggacgatctcgtcacgattggcctccgcgtccgtgccttgcaggtccgcgatgcgcatcaggcggtggcgcgggcagcagttcggtacgcccctcaccttggccctgcacgagcggcaggcgagtgcggtattcgccggaagccgcctggccggtgatctccaggccggcggacttgccctcgccgcgatatttgccgaacacgacgatggggcgctccgccagcatcaccgggatctccgccggctccaggtcatagagttccacgccatcgccatggatcgcgatcctgccgagcagcggcgactggatgtaacggcggaagcgcgcacccgcctcggtcgcctcggcgggcgaggtcacgatgaagggttcgcccgcgccggcatgggccatgccctccagcaaatggcggttgaccgagctgccgatgccgaaggcgaacaggttgctgcggttgcgctcggcgcggatcagatcgtaggcctcgcgttcggcgccgatgaagccgtcggtcaccaccaccaggctgcgagcgaggtccgccgtgcgcggcatggcaaaggcgcgttgcagggcgggcaacagctcggtgccgccgccgccatcgatgccctgcatcatggcaagtgcgcgttgcacgttgtccggcgtggccggcaggggttcgggcgacagcacccgcgagccgccggagaagaagaggatgttgaacgactcctgcggcttgagggcgcccagcagctcgcccatcaggtggcgcgcggtatcgagggggaagccgtgcatggagccggagacatcgaccacgaacagatactcgcgccgcatcacctgctgggccaccacgcgccggggcggctgggccatcatcaggaagtagttctcgtcaccctggcgataggtcatcagacccgagaggatctgctcgcccgcgaggcggaagcgcagcacgaagtcacggttgccggcctgggtctcggaggggtccagggtcacctgggcggatttgtcgctctcccaccgggtatcgaccttgtgttgcaccgagtgcaaatcccgcaccgggaccgggctcgacagcgcgacacggatgccggtggcggtcgccgccgggttgccgcccttggcgtcgtccgccgcgtagggattggcgatccacttcgcatcgtcttcgatccgtagcggatctgcgccatagcgcggcccaaccaccgtcggatagaccagctcgtagaccccctcttccggcaccagcagctcgctgtagcgcagcgtcagctcgacctcgtcgccgggcatgatgttggccacgtccatcgagaacacattgggccgttgctgttccagcagcgccgcacgcttgccctcgcgcttgcccgcctcgaagacgcgcgcggcctcggccttctccttgatctgggcgcgcaccaagcggtccccgatcttcatcgtcagcccatgcaccgccgcgcgggtggagccgggaaagacataacgggcattgagggcgcgcgttccggcgttgccgtagcgttgcgtcacctcgacctcggcgatggggccgttgatgcggatctccgcgtggctcgatttcagcggcaggcggtccacggcgggatcgccgtccggtatccacagccgaggcgccaggctgcggtcgcagccgtcgcattccgccgcgaaggcgggtggcgtcatcagactgaagcaggcgaaaaggaaaaatactaagcgtttcatggcaaatacccctcgttctggttggtggtggaacgagcttatgcaacgcctgtggggttatcgtggggcttctatgggattttcgtgtggattgcgaggggatctgacaccggcagactgaaacaggcccgcgccccaccctcggggtggttggcgagttcaatgccgccgccatgcagccgggcgacttcgcgcacgaggttgaggccgagaccggtgccacgctccccgctgccggggcggggggtggagtagaagcgttcgaacaggcgcgaccgggcgtaatcgggaatgccggggccacggtcgcggatgctgaggcgggcgagccccccttcttcatcgaggcggagatcgataccaccgcctgggggactgaagtcgatggcattgtcgagcagattggccactgcctggcgcagcaggaaacggttgccctgcacatgcagcgattcgagcagggtcacgacggcaaggcccctggcggcgagccggccggcgcgggtgtcgagcagatcgcggacgagcccggcgaggtcgatctcctccacatcgtccaaccgaccgcggttctcgacacgggcgaggttgagcacgccctcgatgatgcggtgcagacgcccggtctcggcggcgatgttggtcaaaaggcgcgcgcgctggtcgtcgccggtctcgtcctgcaacaactcgaccgcgccgcgcacggcggcgagcgggcttttcagttcatgggcgagcagttgcgagaccttctccacatgggccttgccgtccaattcggcgcgcaggtgttccagcgccacggccagccggcgcagttcgctacggccttcgatggggatatgctcgcgtgtgccttcggcaacctcattggcgtaatcgaccaggcggcgcaggtcgcgggtcatccagtaggagaagccgagcgccagcagcagtgacagcgcgaacagccagagcgcggattgccaggcgccggcatgggcgaggtcgatgaagccctggaaagcgcgctcgggcttgcccacggagagaacccccgcaatgcgcccgtcacgcaggatgggcgccgccacatacatcatgctgctcaggggatcggccgcgtcctcctgcgtggcacgggcgccgtactggccccggagggtgagactcacgtcgtgccaacgggagtaatccttgccgatgtcctgcccccggctgtcgaacaccaggcgcccaccggcgtcggtgacatagatccgcagattggggtcgtccttgatgacgccgtagatgttggccgcgaaacgccgcttttcgtaggcgcggaatactgcctcgataccggccaccccggcatcgcccggcgcggcgttggcctgctcccttcccgccatctccgccagcaggttggcggtctgcaacagcgtctcctccgccgactggcgcacgccgggcagaaacagcccggtgaacagcttcatcgccagcagcacggccaccacggtgaccagcacatagccggcgaaaaaacggacgaagaagttcatggctcgcgcgccaggctgtagccgaggccgcgatgggtgcggatggggtcgtgccgcggggccagcaccgtgagcttggcgcgcaggcccttgatatgggtatcgaccgagcgttccaggctggcctcggcgagaccggcggcgtccatcagctcggcgcggctgaacaccttctccggccgcgcggccatcgccttcagcatcaagtattcggtgcggctcaggtcgagcggctggccgaggcagagtacgcgggcgcgctcggcatcgatatcgatgaacgcaggcgcggcggcgggtgtggctggggtatcgggcgcagccacgcgggcacggcgcaggatggttctcacccgcgcggccagctcgcgcgggctgaaaggcttgagcacatagtcgtcggcgccgatctccagaccgacgacccggtctatctcgtcggcgcgggcagtgaggaaaatcaccgggatgtccgaaaacccgcgcagggcgcggcagaggtcgaaaccgttgccgtcgggcaggcccacatcgaggatcgccagatcgaaaccgccctggcgcagcaatgccagggcctcggccaccagcgtcacatgccggcaagccatgttgtcccgcgcgagggcgaggatcacgttatcagcgatgggacggtcgtcttcgaccagcaggatggagatgctcatgcgaacaggcgtagagtggagtcctgccgagtatagctgccacgggggagcggtgtgttgaaccagtaatggcttgttgcggcaccggctcaattggccccatccgcaagcaccacctggccatcaccggactgatggcggggtgggcttcgagtccctgacatgagaaattaatacacctcggcaagacagcagggggcaggcagggcgagggcatctctcgggttacactacaccaacgccaatcccttccggcggcaaacagcaagaacacacagccatgaacacccaaacccaccgccaacttgctggtttgatctggcaaatctgcaatctgctgcgcggcccgcatcgaatttgacgaccgcgacattgtcagcttccatgccgatagcgttccggcactgcgagaggcctttgaagaggctgcggagaagcccgccagtatgaaacaacgggccgtttaggttaccgccagctcaacccaccaaatcatccagatccaggcgcagtgcctcggcgagttttttgagcaaatcgaccgatagtccccgcttgccgctctcgatctgcgagatcgccgccggagttacccctgccagttccgccagccgggccgccgtcaggccgcgatattcgcgccataccctgactttgttttccccgctcaacaagcggtcaaccagctcggcggggaaggtctcctcgccccccctgatggcggctttggcggcatcagcgtccacgatgtcttgcagctcctccagtcgttccatgatggcctgccactcatcccagggcaccacggcatattcaggcttgccactctgttcgataatctgcgcactcatttgtacaggtctcccctcgggccaatcttcaacaccagcaacagcagctctccctcccgcacctccagtatcgcccggtaaccgccagcccgaagccggtgataggggctgttagtcattttgatcagatcaccggcgtaacccgcccaatcggcagcaaccgccttgagttccttttgcagcatgccgcaaggactcgattaactccagtaagcaggtcgggctacggtgcgcagaaccctttaccggaccagccatctcagcatgcttgccaagttacagctccctgtccgtttgccgccaacacccaacccaccagccagccagcgacgtcaaaggacccggcacagtacaatagccccatgaccgacccagcctccccctccgcccacacccccatgatgcagcagtacctccgccacaaggcggagcatccggacaagctgctgttctatcgcatgggcgatttctacgagctgttctacggtgacgcggagcgggcggcgctgttactgggcatcaccctgaccaagcgcgggcagtcggcggggcagccgatccccatggcgggggtgccctatcacgcggccgagggttatctggcgaagctggtcaaattgggcgagtcggtggcgatctgtgagcagatcggcgatccggcgacttcgaaaggcccggtggagcgcaaggtcatgcgtatcgtcacgccggggacggtgacggacgaggccctgttggaggaacgccgggacaacctgctggcggccctgtgcgaggcgccggagcaccactacggtcttgccaccctggacctgacgggcgggcgcttccgggtgcaggagctgaaggggctggaggccctggagagtgagctggaacggctgcgccccgccgaactcctgctcagcgacgagagcagcctcttcccccggctgcaaaggcggggcgccaccacccgccgcccgccctggcacttcgagctggattcggcgcggcggttgttgaccggccagttcggggtcaaggacctgggcggcttcggttgcgagggcatgcccctggccgtccgcgccgccggctgtctgctgcaatacgtccaggacacccagcgcaccgccctgccccacctgcgcggtctggcggtggagcagcggggcgacggggtcatcatcgacgccgccacccgccgcaacctggagatcgaccaggcgatgagcggccaggtccgccacagcctggccggggtgctggaccgcaccgccaccgccatgggcagccgcctgttgcggcgctggctcaaccggcccctgcgcgccctcggccccatccgcgaacgccaccaggccatcgccgagctgctggaaatgcgcggattcgaacccctccatgaccaattgaagggcatcggcgacatcgagcgcatcctggcgcgggtggcgctgaaatcggcccggccccgcgacctctcgaccctgcgcgactccctcgccctgctgcccgccctgcgccaggggatggtggcctacggttcgcccctgctgcaacgcctcgccggcgagatcgccgagcaaccggaaaccgtcgcgctgctgcgccgggccgtcatcgaggccccgcccatgctgatccgcgacggcggcgtcatcgcccccggctatgacagcgagctggaccggctgcgggatctctccgagaacgccgaccagttcctcatcgacctggaacggcgcgagcgggagcgcaccggcatctcgaccctgaaggtcggctacaaccgggtccacggctactacatcgagctggggcgcgtccacgcggagcgggtgccggacgactacacgcggcgtcagaccctcaagggcgccgaacgctacatcaccccggagctgaaaaggttcgaggaccaggtcctctccgccagggaaaggtccctggcgcgggagaagcatctctacgaggcgctgctggagctgctgctccccggcatcccggccctgcaagccagcgccgaggggctggccgagctggatgtgctctgcaacctggcggagcgggccgagcggctggacctctgccagccggtcatgtccgaaacccccggcatccgcatcgagggcggccgccacccggtggtggaacaggtcagcgaccagcccttcgtcgccaacggcgtcctgctcaacgacgagcggcgcatgctcgtcgtcaccggccccaacatgggcggcaaatccaccttcatgcgccagaccgccctcatcgtactcatggcctgcgccggcggcttcgtccccgccaccgccgccgagatcggcccggtggaccgcatcttctcccgcatcggcgcctccgacgacctggccggcggccggtccaccttcatggtcgagatggaagagaccgccaacatcctccacaacgccagcgaaaggtccctgatcctgatggacgagatcggccgcggcaccagcaccttcgacggcctctccctggcctgggcctgcgccgtcgagctggcgacccgcatcaaggccttcaccctcttcgccacccactacttcgagctgaccacaatgcccgaggaacaccccggcatcgccaacgtccacctggacgcggtggagcacggggattcgatcatcttcatgcacgccgtcaaggatggccccgccaaccagagctacggcctgcaagtggcccaactggccggcgtgccaccggcggtgatcaaacgggcgcggattcgcctgcgggaactggaagcggcggcgcgcaaacacgccgaccaagtcatgaaccagctctccctcttcgacccggaacccgaagtatccccgccccccgcccaccccgccatggacgctctccaagcgatagaccctgacgacatgacccccaagaaggccctggagactctctatcggctaaaggggatgctccagcaatgaaggggggcaaaggcccgtaggccctgcccatcggtggaaggcagatagaacacaggctcaatctctgagcctgcccatttgttatcctcataaaaaagcccccgccaaggcggaggcttggggtttacccttgcggggtatcctgcgaagcattcagcttcttgttatgaatgcaagacaggcatcggtcagttacaacgtgttcaaggatactggatgggagcggaaagatgaagaaccggaatgtgatcggaatcgacgtggggaccaactccatcggttgggcgctggtggaagagaatgaaaacgggttacctcaatctctcaaggctgcgggggtgcgtatttttcaggaggcggtggaagccaagacccgcaccccgaaaaaccacaaacgccgtcaagcccggctcgccaggcgcgtattggcgcggcgggcacggcgcaagcaacggttgcagaatctgctgctgaagcatgggctgctgccgggaggggttactgatcccgtacagcgggaagctgcgttcaccaccctgggcgacccctaccagctccgggccaaggggttgaatcttcccctcggtctgcacgaatttggtcgagtgctgtttcagttgggtgcgcgccggggctttctcagtaatcgcaagacccgatacggccatttgaacaaactggatgaactggccgatctgatcgaggcagaggatgctgcccccaaaactggggacgcagaggaaggcatcatccgcaaggaaattggcgaactgcgccaggccatgtccgccgccggatcgcgtaccctgggcgagtatctggcgggcctggctaaagaggaacgcaagcggtgccgccacaccgaacgggccatgctggaagaggagttcgagcggctttggatggttcaggcccggtttcatcccgaactcagcgacgagttgaaggtacaggtccacactgtcatcttctttcagcgccccctgaaatccaaccgcgcctcattgggcaaatgcagtcttgaacccagccgccgtaaggcggcccgcgcctggcccgaagcgcaacggttccggctcctgcaagacctcaacaacctggaaatcctcgacccccgcaccggcgagctgcgccggctgcgcgataccgagcgggccattctgttgaatgccctagaacagcagaagtccatgacttggaacgccgtccgcaagaagcttgggctgcaccaaggggaaaaattcaacctggaaaccggtgccaaggccgagaccggtctcaaaggactgcaaaccctggcaagcctgcatgccatcctgcaaggctggttcgacgaactgggcgataagcgcgacctgctcatcgaggatctcatcaccatcgaggactccgcagggctttatcgccgattgcgcgagcattggggcttcgaccgcgaaaccgcctttcgtcttgccaccctggaactggaacccggctacgccagcctctccctcaaggccattcgcaagcttctgccccatatgggggcaggccatcgctactccgaagcacgtcaacaggttggctatggctatgaaacagggcaacgcgacctgcaagaaaggcttggtgaaccaccagatccccgcaatcccgtagtcgataaggcactacacgaactgcggcgggtcatcaatgccttgatccaccgcttcgggcggcctgacgtggtgcgcgtcgagctggctcgcgatctcaagctcgccaagcgcgacaaggagcgtctggagaaacagaaccgggaaaaccaaaggctcaaccgcaaggccgaagcggccctggcagagcttggcttaggccagccttcccgcgacgacttgatcaaataccggctgtgggaagagtccaaagggctatgcccctacaccggccgggagattgggctctccaccctcttcagccccgaagtggacgtggagcacatcatcccctattcccgttgcctggatgattcctacatgaacaagactctctgcatgacggaggagaaccggatgcagaagggtaaccggaccccctgggaggcctatggcggtgatccggcgcgctacgagcaaattcttcagtgtgcccggtattttcccatggccaagcgtaagcggtttcttgaacagggttcggatttcgtggaccaattcattcagcgccaactgaacgacactcgctatatcgccaagctcgccaaggagtatctggctgccgtttgcaccaatgtgcaggtaaccaagggcgggaccaccgccatgttgcgccatcattgggggctgaatcggttacttggtgaggacgatggtcagaaggagcgcggcgaccaccggcaccatgcgttggacgcggcagttatcgccgtaacgagccgttcactctatcagcgccttgcgcgtatagcccatcagcggggccatgccccaagccagcgcggtttctatatcgatccgccctggcaggggtatcaggccgacttggcacagaccttggccggaatcgtcgtatcacatgccactaatcgcaagctgaccggggccttgcatgaggaaacagcctacggccatatcccccatgtcggtttcgtttaccgcaagacactgaataaggacttcaaactcggagacatcgaggcgatctacgacccctcgctccaggaattggtgaaggcccatctggaacaccacggcaacgaccccaaacgggcctttgccgagggcatccagtgctatcacaaggacgggcacactcccatcaaacgggtgcgcatccgggccaaacaggtctcggaaaagggcaccttttcgatcagcgaccgggcaggcagggcctacaagcaccacaaaaccggcagcaatcaccatgtggaaattctgcgccaccgcgcaaccggcaagatagaaccggtctatctcaccaccaaggaggcgacggagcgggcaaggcgaggtggggaacccgtgatccagcgcgaccatgggccggaatgggagttcatcatctccctctgcatcaacgacatggtccggctgggggagggaggccaagtggcctattttcgtgttcagaagatcgaggctaccaacaatcgggtcactctccgttcccatctagccgcaacgctggatgatgaggacatgaaggtaacaacaagtgttccgaagcttgccgttatgcccggtttccagaaagtcctggtcaccgccgtcggcgaggtgctggaactccatgattaaacgcatcctggtggtggaaaacggaacctacctccaccgcgctcaccggcaacttgtggttatgcgggatgggcaacgggtgggacaggtcccctttgaggatctaggggtgttgatgctggaccaccctgccatcgtcctgacccaggccgtgctctcggcctgccaggaggcaggcgcggtggtgatcgtgagcgatgggcgccatctccccgccgccctgttgctacccctgagcggtcatagcctccatgcccgcattctcgaagcccaggtcaatatcgggctgcccacccgcaaacgcctgtggcaaaccctgattcaggccaagatcaatgcccaggcgctgaacctggaagcagatttccccgaatccgcctcccacctgcggggaatggtgaagcgggttcgaagcggcgacccggacaatctggaggcccaggccgcccagcactactggcccgctttgtttggaaacagtttccggcgcggggattcgagccaggctatcaatggggcgctcaactttggctatgccctgctgcgttccgccgtggcgcgtgccctcgtcgggtcggggctccatccggcagtcggccttcaccaccacaatcaatacgacgatttccggctggcggacgatttgatggaacccctacgacccctggtggaccgccatgtccggcaactagaccagaaaatgggcggggtgcccgaactgaaccccggactcaagcatgaactattgcggatgctggaagcggaattaaggctgggaggacggcaaacgagcctctttgccgccctgagtgcctacaccgccagcctcgtggctgtggctctgggtaagggtaaagtcctggagatcccagtgccatgatgtacggagggtttcgttccatgtggattttcgttcttttcgacctgccggtggacacccccgaggcgcgccactgctatacggattttcgccgcttcctcctggatgacggcttcctgatgctccagtactcggtttatgcccgccacgccgccagcgaggagaatgccctggtccatgccggacgggtacgggcgaatctgccgccggatggcgaggtgcgaatcctgaccataaccgagcgccagttcgaaaggatgcaggtattccacggcgaaatacgcgccgcgacagaggccccgccagagcaaatcagctttttctgattggccctggcgggattagtgcttcaagaacagaaggttggggaaaggcgattgtaactgaccgatgcctgcccgcgattcacaacgtacccgttcccgtacccgtacccgttcacattgtaactgaccgatgcctgcccgcgattcacaaccttcctctgcccgcgccgcttcctctgcccattgtaactgaccgatgcctgcccgcgattcacaacgcagaacgcgagattgagcggcagcgcgagattgtaactgaccgatgcctgcccgcgattcacaacacttcgttgatagcgggcttcagtattcggattgtaactgaccgatgcctgcccgcgattcacaacttgacctgaaaggagaaaacattgaggcgcattgtaactgaccgatgcctgcccgcgattcacaacagcccgttcgtcatctcgtcgaacttatgattgtaactgaccgatgcctgcccgcgattcacaacgaactctttaaccaagaaccctttagtgatattgtaactgaccgatgcctgcccgcgattcacaacgatgctacgcgagcggatgcaacccaagtcattgtaactgaccgatgcctgcccgcgattcacaactgcggcttgctccttgccttttgtcaactcattgtaactgaccgatgcctgcccgcgattcacaactacctgctgcaactggatgacaacgtcctgattgtaactgaccgatgcctgcccgcgattcacaacggtgggtctcggagcccgtcatgggaatggattgtaactgaccgatgcctgcccgcgattcacaacctatgctaaaaacagcaaatggggaggtaaattgtaactgaccgatgcctgcccgcgattcacaactgcgcgcccaggtggtgcggcagatgaacgattgtaactgaccgatgcctgcccgcgattcacaacgaggctcgatggcgggcagccccccggccgattgtaactgaccgatgcctgcccgcgattcacaactcgatggtcaccacctgccgccactgcccgattgtaactgaccgatgcctgcccgcgattcacaaccaagaacagcaagagcaaatcgattcagcgattgtaactgaccgatgcctgcccgcgattcacaacgatgccatctacgaccagatcgcgcctttcattgtaactgaccgatgcctgcccgcgattcacaacgttgtggcgcaggtggtcttgaccttgaagattgtaactgaccgatgcctgcccgcgattcacaaccagatggcgatgaagcgtcttccctctatgattgtaactgaccgatgcctgcccgcgattcacaacagcaatctcccataccacgcacaagcgctgattgtaactgaccgatgcctgcccgcgattcacaacgggctatgctgaaagcgtttgccgacagcgattgtaactgaccgatgcctgcccgcgattcacaactatgcggcgcgcggccatctttccaacttgattgtaactgaccgatgcctgcccgcgattcacaacttggaggggtgatgctcaccgcgtaacccggcacaaagcgcctgcggctattgcgcttgggcttcctcacgatcaggagtcctcctttctccccggcccaggcggcaatagacactccgccggattggcaaaaatgaaccagccaaccgccatcacccccggcaatgccaaaaaccactccggttctccggtcagtcgaagccccacaatcccgatgccaaggccaagcagaacgcagaacaacagccaaaggagccgctggaagtatgaacgacttaacgcggccaactcacgggcaccttttctgcaaaccagggcgatgatccgaggaggatgacatctccctgttgggctaacttaggattgcggggcaaggttggctagtgaaaggtcctaagcgtaggcctttccaaggcttccagctccgaatgggagatcgcggccaggtcccaatcggcgctctttgccccctcttccagcaatttgaccagcacatggagcagtttgcggtccaattggaaaccgatggtcttgccgtcgggcaggcccagggtgagcaggatcatccccctgtcgatccgctggtatttgatggaggagagcaacaccggggcctcgccgagggggtgttgggtggcggatctgtcgtagacggtgccgaagtcggcgccgatcagtgcggcatcccgctggaaggacttcatggcggcctggaccggaacgggatcggccttgccttgttcctgatcgaggagcttgttcaagacgccgagcagcagccgggtataacggcgcgtcaaccaggcatgaatctcgctgtcgtcatccatccgcacccggagtatcagccgatcttcctgggatacgaattgcacgttcatctggtgcaactttgccacaagcccatctccgttgattaatcaccctgggatagtagccgagtagaggggcgtttggggggaactggagcacaaaaagagggggcgctcagcctcgcgatccacgccttctggcaattgcggcggcggttttgttccaggatctcgcggatgcgcgcttccaccttggacaagggaatgggtttgcccggcttgatcctttcgcagagcaggatgtggaagcctatctcggtttcgatgatggggctgatatccccctccgccatctggaacaaggccctgtccagctcggggtagagctgcccctgtttcacctcccccagcttgccgccctccatggcggtggggcattcggagtggcgccgggcaaaatcggcgaaacggttggtccgtccgctcagtttttccgtcaggcgttccatacgggcgaacgctgcctcgcggctgttttcgggatagccggggttgagggtgatcagaatatggcgcgccacccgccgctcgggggtgatgaaccggtcgcggtgcatctcgtggaagaggcgcaggtcgatgtcgctgacggctgcgctttgggccgccaccttttgcatcacgcagtcgaagaccagttcgcggcggagtgcccggcgcagcccttcctcgtcgagaccgttggtctccaggtcctgggcgaactcttcggggctggcatagcggccggcgacctgggccagggagcggtccagcatctcctccccgatcgtcacccctttggcctcgggcgaggccagcaccaaggattccagctcgtaactcttgcgggccttgcgctggacctggccaagctcctcgggactgagttgagacaggttcttgcggtaactctccagggcgttgcgcagcaggtggtagctgaattcgggggtgctgttcatcctagaaacctcttttcaaccgcaaaggacgcaaagaacgctaaggaaacccatccgatgcatttgttcggcgcatccctgtgcctcaccccttcggggctggcgcgaaaatccgctcccgacggttttttgttcggcgcatccctgtgcctcacccctccggggctggcgcgaaaatccgctcccgacggttttttgttcggcgcatccatgcgcctcacccctccggggctggctcgaaaatccgctcccgacggttttttgtctgtgcccccaccttcctggtcaggggcggaacctaagcaagccaatgaattccttcgcgtttcttcgcgttctttgcggttaaatgaggaaattaggtccatgtctcaccagcctcctcgctgggatgcagaaattcgagggcgctctccggcgccagcagggtgcggccgctgaaatagacatggtaggccggcccgccggggtagtcgtgcagcagcttttcgatctcgcccgcgtcgccgggccgggcgatgatttcaccctggatggcgaggggaagcctcggcgtcaccctgtccctgaattcgaagcggttgggaacccaggggtcttcggcgggttgcaactcctgctcgcggcagcccacgaccttaccctgatcgatgaaatccaccgagtagatcagttgatcctgcaagaaggtccccacatcccgcacatagccgacgctgccgcgccggacgagcagccggccggtgggggcgccggggtaggtcccgtcgttgcgcaggttgcggatcacccgcaccgcctcgccgtattcaaaccgggggcgcactcataacccccttgttgagatccggcagcgggaccatgacccggaccggttcgtgcaggcggaagacccggaataccttttcggtgcgggcatcggatttgacgaaatcctcataggccccgcgcagccggtcggcatggacccggcgccgtccggcttcgtcctccggcatggcttccaccccggcgagatagtcgtggaagcgttgcaggatgtgcagccggttgacccgcaccaccgccggatcgtaatcgacgccgaagtagtcgaggaaatcctccgcgctgctgagttcttccagttccagatcaaagttgctttggttcattgacgcatccattccaggccctccccattgatttcccggtagaaaccgcgcagatcctgctcctccggcggacgcttgtggcgcacggcatagcggcggacccgctgcaacagggactcggcctggcggcgattcagggtcagacccatgccggcataggcgtggatgacggcatggctgccggagtgctttcccaggacaaaatggtgatcgcgccccagttccaggggatcgaccccctgatagttgcggcggtccttcatcatgccgtccacatgggtgccggcctcgtgggtgaagacaccggtcccgaccaggctcttctgccagccgacgctgcggcccgaggcccgctccaccagacgggagaccgtggaatagtttgccatgtcgatcccctgcccctgatcgaagaagcggcgcaggcccatcaccacctcttccaggggggcgttgccggcgcgctcgccgaggccatggaccgtggtgttgacatgggtcgccccgccgcgaatggcggccagggtattggccgtcgccagacccaggtcgtcatgggcgtgcatctcgatctccagatcgctcatggcccgcaggtcgcggatggtctcaaagacttggaaaggctccatgacgcccagggtatcggcaaaacggaagcgccgcgccccagccagttccgccgcctccaccacccgccaaagaaactcggggtcggcgcgggaggcgtcctcgccgccgatgcagacatcgaaccccagctccagggcctcgcccacatgccggccgatccgggccagtacccagtcgcgggaacggcccagcttgttgtggatctgttggtccgacagcggcatggagaggtcgaggctctgcacgcccaggccacggcactgggcgatgtcctggctccgcatgcggcaccagaccatcagcctggcgttccggacgacttgggagacggccttgatcgactgccgctcctcctcgcccatggccggaatccccacttccagctcgggaacacccaattcgtccagggcgcgggcaatcgccagtttttcctccaggctgaaggagaccccggccgactgctccccgtcccgcaacgtggtgtcgttgataatgacttcaggttttgcttgtctcatggctcgctcctttttcaagggaggtgcaagcgctgtgccatgggaataattaatggactatcaacaagatagtaagaagcaggcgccgatgtgttcgaagcggacggtgacattgtcgcaaaggcgacaaggcgccccggggaggctgtgtgggggcaggtttcaaacccgcccctacccggcgccgtcactaatagcttccatccaataggtatcgcaatcttccagcagatgctggaccgaccccatgccgggaatcaccagttccggggcgatctcggccaggggcttgaggacgaaggatcgatcggggatgccgggatgaggcacggtgagccgctccgtctcgatgatctcctcatcgtagaccagcagatccaaatccagggtgcgcggcccccagcgctccacttgacgcatccgcccatgggcgttctcgatccccaccaacacatcgaacagctcctctggccccagatcggtttcgatctgcaccacggcgttgaggaaatcgggctgggcctgcggccccatggggggattgcggtagaaactcgacttcgccatcacctcgatgcgggggtggctggccaaggcctccagggcacttcgcaactgggtctcggggtgttcaagattactgccgaggccgacataggccgttgtactgctcatggctcagctcaggtcacaggggtttgttttttcccgccgcgcgaacgcctccggcgcttgcggcggccactctcttcgccggacggcatgatcatcgtccgctgcacttcctcgccggatgcctggaagcgggtccaccaatccgccagctcctgttccgcctcgcctgccctggcgcgcaacaccagaaaatcataggcggcgcggaagcgggggtgggtgaggagccgttgcgggcgcttgccggagcggccctcgaagcgcggctgcaactgccagatctcgcgcatatcgaggctgtagcgtttggggatggcgacccgctccagggagcgggtcaggatctcgctccccgcctgctgcaaggcgaggacctcatccagcccgtcgttttccacatactcttccgccaagcggcgcaccggctcccagaggagcacggcgaacaggaaggccggtgtcaccggcttgtcttcctggatgcgggcgtccgtattggccagtccgtggatgacgaaggtgatgggaaaatgttcctcctcttcgcccaggcagcgctccgtctccgggaagagccagtcgaacagacggtagtggcggagtttttcgaaggtttccaccgcctgcccgccgtggaacagcttcaggcattcgtcgaacagccgggccgaaggaacctcttgcatcagggacgccatgcccggcatcagccgttccgacgccgcgtcgatgttgaagccgagcttggcggcgaagcgcacggcccgcagcatgcgcactgggtcctcacggaagcgcacttccggatcacccagcaggcgcagcatcccggctcgcagatcggccatgccgctgccgtagtccaccaccgagaaatcggcaatattgtaatagagggcgttgaccgtgaagtcgcgccgcagggcgtcctcctcgatggtgccatagacgttgtcgcgcaggagcatgccgttgccggtctcctgatcgacggcatactcgttgggaatggcgcggaaggtggccacctcgacgatatcgcggccggagcggacatgggccagccggaagcggcggccgatcaagtggcagttgcggccaaagacatccttcacctgctcgggatgggcgttggtgaccacgtcgaaatccttgggttcgcggcccagcagcagatccctgaccccgccgccgaccagataggcgtcgaatcccgcctcgcgcaactgatagagaacccgcagggcgcttctgctgatattggcccgggagatattgtggtccggccgggcaatgatgctgggcgttcttatgatggttcccttcgaacgccctttggtcagggcgtcaagtaatgcaagcaggaaggccgccgcaaaattacgcgcaatgagccaaaagttcaacaggcgcgggcgagcaggtttaaatcctgtggttgtcagtttcttgatctcctgaaatcaaagccccaaggcatccagcagtggatgcactgccgattctaccccaccccgaaccgaatctccccctcttccacccgcaaccgcactttgtcgccctccttgcattcgccgcgcaccatcatcatggccagggggttttccacttggcgctccacctcgcggcggagggggcgggcgccgtaggcgggttcgaagccgtccttggccagcttttggatcaccgcttcatcaatctccaggctgatctggcgttggttcatgcgccgggcgagttcgtcgatgtacatgcgggcgatggcctccacgtgctcccgctccagatagtggaagacgatgatgtcgtccagccggttcaggaactcgggtttgaagaacttcttcacctcgtgcatgaccagggtccgggcctcgcggtagtcgggggtggcggagtggacgaagccgatggggcggttctccggcgagagggtctcggtgcccaggttggaggtgccgatgaggatggtgttgcggaaggagacggtatgcccctgggcgtcggtcaggcggccgtcctccaggatctgcaacagcatgttgaagacgtcggggtgggccttttccacctcgtccagcagtaccacggagtaggggttgcgccgcaccttttcggtgagctggccgccctcgccatagccgatgtagccgggcggggcgccgatcatcttggagacctcgtgacgctccatgtattcggacatgtcgagccggacgatgcgggtctcgtcgtccaggagaaactgcgccagggccttggccagctcggtcttgccgaccccggtggggccgaggaagaggaaggagccgatgggccggtgggctgagttgatgccggcgcggttgcggcggatggcgtcggccacggcgcgcacggcgtcctcctggccgacgatgcggtgatgcaggttctcctccatgcgcgacagcttgttggcctcgctctccaccatgcgcgc

SEQ ID NO: 3047 - DNA, 7352 bp, synthetic construct
  source 1..7352: mol_type = other DNA
  misc_feature 1..7352: note = Synthetic
gcaacatgaagctggaccggcaaccgttggggatcgccaagcaagacctggacctctccgggctttccccgggcttgtacaccgtgcaattgaccgccgccgacggacagcagggaatgaagaaactggtggtggagtagcaccgcagcgcactgcttgaacaaagggccgcccgatgggcggtcttttgtttgttcatgtgggttgcagggcgtgaaagaccgcaaccccgcgcactggcgcgggtgagcaagctcgtgcctacgccagtgcatgttgtcgttgagctgccacaacaaagcaggtaaacgagggcaacagcctatgcattaccttcgtgaacatagaaccaccactgaaggagaaacgcgagaccacctgcttaggtgcaggtgccggatttcgaaccttcaggggttgttcgttttcacgggcataaagcagtaggcatacggctaggccgagaaggcgaaggtggtgcgggcccgcgttgccggcacgaggccccctgacggaactatgggcgtgtgcacatgacacgcattgaatgtggatttggaggatgaccgcaggcccggcgtgatggcgcggcgcatgccaataccataagccatgcccattgaaaggtgcgtatgcaccatgctgccaccggggtttacggtcgactcatcgacgggctgggcaaatgtgggttcaatgccggacgaatgtgttgaaattgggtaagattgtaacagtgggcaaatgccttcgccatttgccgatagtctatcgtgatgacgtccgatcaaaagaaaagccccggaggaaccggggccaaggtcaaaagacctgtagaatggtctttatcgtgataagctctcggcacgaaagtagctgttaccttgtccaactccaaattccatatgaaatgagccgtacgttaggacttgatattggcacgaacagccttggttggtgcttggtggaagacgggcagggcatcgtcgccatgggcagccggatcttccccgttggggtgaaagaggacagctacgcgaagagcggtacggaagaaagccgaaatgccgcccgtcgtaccgcgcgaggcatccgtagaggctacgcccgctacaagctccgccgaacggaactcgagcagttgctcaccacgaacgggatgatgttcgacaaaacggtgagcctcccaaccaagcagctctatggcctgcggcgtgatgccctggaccgcaagctcgaactggaagagctgggccgcatctttttcctgatgaaccaacgccggggcttcaagagcaaccggaaggagcaggccaaaggcggtgaggaaaagaacctgaccgtcaccaaacaggccatgcgcgacttcgaagcgaagatgcaggccgcgggctgccgcaccgccggtgagtacctcgccaccttgttcgatgacctgcccgaaaattggcacaacaagaacgaacccaaagaacggatccgcgaacggcaacgagtgcgccgggaactctaccagcaggagttcgacctgatctgggagaaacaacagcaataccacccgcaagtgcttacgccggaactgaagcaccaactgcgcgaccgggtgatcttcttccagcggaaactgaagagtgcgaagcacctggtgggcaaatgccggttcgaacccgccaagcacgtcatgccacggagccatccgctcttccaggagttcaggatcctacaggccttgtccaacatccggatcaccgaccgcgaccgggtgaacgacctgctcaccttggaagaacgggatgcgctcgccgtgcagttgggccaggcggagaaagtgaacgtaagcctgatcaaggaatggctggactacccacgcagtgcccgtatcaacgacctgggcgacctgcgcggccacaccacctggagccgcatacgcaaagcggtgggcgatgactggttcgaagagcagagcaaagaggcccggctgaaactgtggcacaccctctacttcgctgccgacgaaggttggatcgaggagtatgcccagcgtgccttgggcatgaacgatgagcaggccaaacgttttgccgaagtgaacctggaactggactacggcaacatcagccacaaagccgcgcagaagatcctgcccttcatgcgcgaggggtatgactttgccggggcctgtgagcaggccgggtaccaccacagccagaacgaactggacaacccggaccgggagctgaaggacaagttgaccggggccgatattgacgagttgcgcaacccgttggtgcaaatgaccgtgaacgaaaccgcccgcttggtgagcgccgtgatcaaggagcacggcaagcccgacctggtgcgcgtggaactgctgcgcgacctgaagaagcccaaggccgtgcgcgaaggcatgcgcaacgccatgcgcaacaaggaaaaacaacgggatgaataccgcgacttcctgaaggaaaaagggatcatctccaacccctaccccagcgacatcaagaaattcgagctctggctggaactggaatactccgaaagcgatgtggccaggctggcaccggacatggacctgaaggtcttcaagaagttcgcggaagccgtgaagcccgccgacaaggaaaaataccggctgtggctggaatgcgagcgcatctccccatacaccggcaaggcaatccccctgagcgccttgttcaccgaggcctaccatgtggagcatatattgccgtacagccgcagcctagacgacagctttgcgaacaagaccttgtgcgaggacacggtgaataccgagaaaggcaacctcaccccgttggaatactatgagcagaagcggacgcccgatgaactgaaagccttcaagcaacgggtgaagaacttcagcgaaggcaagctggccaaattcctggccaccgaggtgaaggatgatttcctgaacagccagttcaccaacagtgcgtacatcggcaccgaagtgcgcaagctactccgcaaggccttcaaagatgttcgcgttaccaacgggcagctcaccggcctgctgcgcaacaaggtgtggaacctgaacaccctgttgaacacggccgatgggcagaagaaccgtgacgaccaccgccaccatgcgcttgacgccttggtgatcgcctgcaccagccaaagcctggtgaaccgcatcagccgagaaagccagttcgacttccgtggcgtgcaacgtgtgcccgatgtgggcttgccctggcacaacttccgggtggatgccgccgaaaagctgaatgccatgctggtgagctacaagggcggcaagcgcctattgaccaccaagacgaacaagtaccggcatagcaaggcgcatgagggcaggccggaaaagtggcaacggaccaaggccgtgcgtggccccttgcacgaagaaacgctctatgggcgcattaccctgcagcacaagggcagcaaggaggaagcctatgtggtgcgcaaggcattgacctcgttgaccaaggcggaacaactggagaacatcgtggatccgatggtgcgcaagaccgtgcaggaccatgtggccaagcacggcagcctgaaggaagcgttgaagacgcccgtgtacatgccggtgaaacaacagaacgaaggcaagctggtcccaatccggaaagtgcgcatgcgggtgaacagcgccgaaatgttggaactaaggccacgcaccttcgtggaaccaggcaacaactattgcatcgccatatatgaggatgccaagggaaagcgggccttccgtacggtaagcttcttcgatgcggtacagcgcgccaagcgcaaggagcccctgtatcccgccgaggtggagggcaagaagcacctaatgactttgcagcaacgagatctcgtagtcctgtacgacaagcatccggaccagatacaatggaatagtccgaattggatggccgaacacgtctattctatcaggtcattggatcgaaaaggtgaagtacacatggtgctgcacaaagctggaaatgcgagctcaggtaatgccgctcagaaggctgctgccatctacttgcgccgaaaagtgggtggcctgactgtcgtgccgatcactgtcgatccgcttggcacattggttcgccgaaaatgatcaaacgcacactctacttcggcaacccggcctggctgagcgtggaccacgggcaactggtgatccgcgacccggcactgaaggcggcaggcggtagcgatgaaaaggcccgtgtgcccatggaagacatcgggttggtggtgctggaccaccagcagatcacggtgacccatacggtactgaacaccttgctgcaccacaatgcggctgtggtggtgtgcgatgagcggcggcatcccagcggcctcttgttgaacctggagggcaacacggtgcaggccgaactcttcaagtaccagatcgaaagcagcgagcccttgcgcaaacagctctggaaacagaccgttgaagccaagatccgcaaccaggccgtcgtgctggcccgcataggggccgatgccggcctgctcctggaactggccagcaaggtgcaaagcggcgacagcggcaaccgcgaggcccaagcagctgcatactactggccacgtgttttcaggaatgtggccgccttcaagcggttccgcgaaggcccacctcccaacaacctgctcaactacggttatgccattctacgggcccttgtggcgcgaagcctcgtgggcagtggtctgctgcccaccctgggcatccaccaccgcaatcggtacaacgcgtatgctttggccgacgacatcatggagccctatcgcccctatgtggacctggccgtggtggaattggtgaacaatttgggaccacccgagaccctgaccctggaacacaaaggtcaactgctgaagatccccacggccgatgtgctgttggacggcaaagcaggcccgttgatggtggccgtgcagcgcaccaccgccagcctggcgcaatgtttcgccggggaacaacgcaaattgctgtgcccaagccttccctgagccatacctacttcaacgcctaccggatcatgtgggtgctggtgttcttcgacctgcctacggacaccgccgccgaacgcaaggcagcggcccgtttccgcaaggacctgatggccgacggtttcaccatgttccagttcagcatctacatgcggcattgcagcagccgcgacaacatggaggtacaccaaaagcgggtgatcgcctgcctgccggaaaaagggcatgtgggcatgctcaccatcaccgatgcccaattcgggcggatgcagatctggtacaatgccgaagaaaaagaggagaaggaggtgccgcaacaacttgaactgttctgaccaaccagaacagccaaaggacggccccggaagtgcttgcgcacctccggggttcatttttctgatcctgcaaaccgcacagaacctgcgtccagcaaggctttcagccaagtctggtggatcaggtccttgtcaaagatcgcattgagagcaaaccacgactgcgaaatcatttatgagctgcacagaggtggtggatcaggtccttgtcaaagatcgcattgagagcaaaccacgactcaatggttccaaatagtctggcaatatctggtggatcaggtccttgtcaaagatcgcattgagagcaaaccacgacatgcgcggattcgatgggttcgccttcagcggtggatcaggtccttgtcaaagatcgcattgagagcaaaccacgacactccgaggtgatcgtaacctccccatcggggtggatcaggtccttgtcaaagatcgcattgagagcaaaccacgacaagaggacatcggggaccgggaatttgtgtggtggatcaggtccttgtcaaagatcgcattgagagcaaaccacgacctgtacaccgtgaaccgcgctacgccatttggtggatcaggtccttgtcaaagatcgcattgagagcaaaccacgactggcttctacctcttcaatcttcccctactggtggatcaggtccttgtcaaagatcgcattgagagcaaaccacgactatccgccgggcaacctgcttggccagtgtggtggatcaggtccttgtcaaagatcgcattgagagcaaaccacgacaatgcaccgtccacccaatatagcaaaaaaggtggatcaggtccttgtcaaagatcgcattgagagcaaaccacgacaaaggtggcggggttttggggtgcccgcccggtggatcaggtccttgtcaaagatcgcattgagagcaaaccacgacccatacgtgcgagcctcttccacaacttccggtggatcaggtccttgtcaaagatcgcattgagagcaaaccacgactaacgggaacggcttatgtgatattcggagggtggatcaggtccttgtcaaagatcgcattgagagcaaaccacgaccaaggcagcgatcttgctgtccgtttgtgcggtggatcaggtccttgtcaaagatcgcattgagagcaaaccacgactagctcagtgaggcttcgccgtagacggtgggtggatcaggtccttgtcaaagatcgcattgagagcaaaccacgaccaggcggtgcgtgttccaatcgctcttcgcttggtggatcaggtccttgtcaaagatcgcattgagagcaaaccacgaccaatgacgccccgataagctgtcccaagcaggtggatcaggtccttgtcaaagatcgcattgagagcaaaccacgacaagaacggatgggatgtggacgaggcgcttggtggatcaggtccttgtcaaagatcgcattgagagcaaaccacgacttgagaagcaggtgagtagcttgaacatcaggtggatcaggtccttgtcaaagatcgcattgagagcaaaccacgacatggaagtgacgcttgactgcctcgaagcgggtggatcaggtccttgtcaaagatcgcattgagagcaaaccacgacacatgcccgtgacggggtgccgagcgtagcgggtggatcaggtccttgtcaaagatcgcattgagagcaaaccacgacaggtgcagcgtggggcactgcgaacggatcggtggatcaggtccttgtcaaagatcgcattgagagcaaaccacgacaagtcgaagggcttgataaaatgattacatggtggatcaggtccttgtcaaagatcgcattgagagcaaaccacgacaaggctcatcgcgccgccgccacgcacccaggtggatcaggtccttgtcaaagatcgcattgagagcaaaccacgacgggcgcacttgaagcattcatca

SEQ ID NO: 3048 - DNA, 5846 bp, synthetic construct
  misc_feature 1..5846: note = Synthetic
  source 1..5846: mol_type = other DNA
ccaagaacccttcgggccctgcggatcctctgatcgtgcaccccaacatccggaagctgctgctcacgcagcgcgcctttgccgagggcagccgcgccttcctgtactggctctgccggcaggtcgacaccatggaccgctcgcccgatgccgcggcgcgcaagcaggccgaagacctgatggcgctgctcacgccggtgggcaaggcctttgtcaccgaggtgggctacgaggccgcgaacctcggcatgcaggttctgggcggtcacggctatgtgcgcgccaacggcatggagcagatcgtgcgtgacacgcgcatcgcactgctctacgagggcaccagcgccatacaggcgctcgacctgttgggccgcaaggtgatgggcaccggcggtgccctgctcaagtcctaccaggaacacatcgaggcgttctgcgtggcgcaggatggccgcgaggacatggccgctttcgtgcaggcgctgcgcgccacgggcgcacggctcgaaggcctcacctggaagatcgcggaatccgccatgaagaacgccgaagaagccgacgccgcggccttcgagtacctgatgatcctcggctatctggtgctggcgcacatgtgggcatggatggcgcgcgttgcggccgatgcgcttgccgccggcagcaccgagacagagttctacgccgccaagatcgagactgcgcgtttctacttccagcgcgtgctgccccgcaccgagagcctggcgatctgcgtggaggccggcggcgcttccatcaccgccattccccagaaccactttgccgcctgaggtgcaccatgcgacgtgaagacgagatcagcgaagaagaccgcgcgcgcgtgaacaaggtcacgacgagcggcatccactcggtggagcgcaagcctttccggccgttctacatgatgctgatgctcacggttgtgaccttactgctcagcgtggtcgccatcgtgatcgagaagatgtatatcccctgacggggaaatttgattacaatcgcgccgccttggcaggtccctgccaacggttttcggagtgtagctcagtctggtagagcaccgccttcgggaggcgggggtcgaaggttcgaatcctttcactccgaccaatttcccatccttgatcccaagtcacacctcggcatccctgcgctccgagtgccctacggctgcgagccttgtatgcgttttgttttcgcatacgcaaaaaacagaaagcccgctttcgcgggccctctcatttggtgcaatctttcagcttgttagcggaaggagcgcaatttccgatcatgtacgggtcggaggttagccgcggttcccgcacgttgcaatactcgaacagcagcagcgacaaggaagggcagcatgaaatacaggctcggcatcgatttgggcaccaattcgctcggatgggccgttctgaggctcgacccagcggggcagccctgcggcctggtgcgcgctggcgccaggatcttttctgacagccgcaacccgaaggacggctcatcacttgccagtgcacggcgcctgcctcgtcaaatgcgcagacgcagggatcggtacctgagccgtcgcggcaagctgatgtcgctactcgtcaagtacggactgatgccgacagatattggcgagcgaaagaagatcgagaatctcgacccttggacacttcgcgcggaaggtctcaaccgggagcttgcgccgcacgagttgggacgtgcgctgttccatatgaaccagcgcagaggtttccagagcaaccgcaaggccgacaacgccgacgaaaacgagaagggcaagatcagctctgccatagagcggatggcacagcacctccgatcgggtggtgggcaattcgcgacgatcgggcaataccttgcagaccgccacagccgaaaggaacccgtccgtgcgaggctcatcggctcaggtgccaaggcgagttatctcctctatgtacaccgggccatggtcgctgaggagttcgacgtgctctggtctgtccagagtgcttaccggcccggtctcctgacatcggaggcctgcacggccatccgtgactgcatgttctttcagcggcctttgcgcgcggtaaagccgggcaaatgctatttcgagccggccgacgacagggcgccgattgcgcacccgctgtcgcaacaattccggatttatcaggaactcaacaacctccgcgtcatcgacgcacatatgacggagcggcctctcacgctccatgaacgcgatacccttgcggcgaagctcctggccggttccgaattgaagttctcttcgatggcgaaactcatcgggttgccgcgtgatacacgcttcaatctggagtccgagcgcagggacaaactgaagggcgatgaggttgccgcaaagctggcgggcaaacgcgggattggcggtcgatggattgccctgcctcaggaacagcagaccacgatcgtcgagttgctgctggccgagaccgacgaggccaagctgctcgaccgcctgaaaggcgagttcggattttcaaccgacgacgccctccgcctcagtgcagcagtaatgccggatggctacggccgcctcagtgtgaaggcgctctccgcaatcgtggccgaactcaagcgtgacgttgtgacttatgccgatgcagcaaaaagggcaggctacaaccactcggaccagtacaccggagaaatccgccggcagctcccgtactacggtgcggtgttgcagagatacgtcacccccgggaccaatgacccacgcgacaacgatgaagcccgctacggccgtatcgcgaatcctacggtccatgttggcttgaaccagctccgcaaactggtcaatgccgtcatcaagcgttacggaagacccacagaaatcgcgatcgaactggcccgcgatctgaagatgagcgcaaaagccaaagaagacctccggagggagcagtcggagaaccagcggcgcaacgagggccacgcgagaactctttccgaactcgggctgccctccaactacgagaacaggctgcggctcaggttgtgggaggaaaccaacgcagacccccaccgacgcacctgcgtatacagcggcaagccaatttcgatgtcccaactcttcgaccctgaccgggtccacatcgaccacatactcccgttctcccgcaccctcgacgacagcatcgcgaacaaggtgctgtgcttccgcgagcacaacaggttcaaggccaaccgagggccgtgggaagcatttggcactgcaccgaactattcatgggaggagattctggggcgggcgaatgctcttccgcagaacaagcgcgggcgctttgctgaagacgccatggagcgttatgccagcgagaagagcttcgaagcccggcaactcaccgacaccgcatacatggcgcgcgtcgcacgggaatatctgtgtggggtctgcccgccgaactgcatacgcaccagccctggtcgcctgacggcgttgatccggagcaaatgggggctgaacaggatcctcggtgagggaaatgcgaaaaaccgtgacgatcatcgccaccatgcggttgatgcggtggtggtggcgctcacagaccgggggatgctgcagagagtgagttctgcggccgcgcgtgccgagcagcgtcagctcgacaggatccttgaggacatgcccgaaccgtgggccggtttctatcaggagatcgaaagcgtcatcgaccgcgtcgtggtgtctttcaagcccgatcacggccccgaggcggcgctccataacgacacggcctacggcatcgtcggcgctgcaggggcaaaagatcagtcggtggtccgccaccgtgttccggtgacgaacttcgagaacccgaaagagctggaaaagatcgcggaccccgaactgcgcaggctgctggagagccgcatgtccgggctcgccgacaagaagcagatcaaggctgaactgcagaaattcagcgaggagaccggtatacgcagggtgcgggtcatcgagcagatgcgggtgatccccatcaaggatcgcgacggccgcatctacaagggatacaagggcgacagcaattactgttacgaaatattcgaggccgaaggcgggaaatggggtggtgaggtgattgccacatttgaggcgaaccagcgaccgtaccaagagttccgtaaaagcgtggcttacgcacacagggccttttgtggcgcgccgttggtgatgcggctttgtgtagatgacatgcttggtattgaagaaatgggggagcgccaagttcttcgagttgtgaagatttcgacaggacgaatttatctggcaggacatagcgagtcggggagtttgaaggcaagagacgccgatccggcagacccatttagatacctcgttaaatcaccagcggcgctgattaacctaaaggcagaatcgatatcggtcgatatcctaggctacgtgatcccacggaaggccacgcaatgccaggacgtatcgtagagattgcagaagacggcaggcatctggagctgtaccggggcttccttcaggtaaaggcgggcggtgaactgctcgggcgtgtgccccttgatgacatcatcggggtgatcgcgaatgcccgcgcgctcacctactccaacaacatccttgttgcacttgccgagcgcggcgtccccttcgtgctgtgtgcgagcaacttcaagccggtgggcatggtctggccggtagagtcgcatcacttgcaggctgcccgcatggatgcgcaattggccgccacgctccctctaaagaaacgcctctggcgcgacatcgtccgcagcaaattgctgtggcagggttggtgcctccagcagcgggggcggccgcatgtcccgctgacagcgctggtggcgcgcgtgcgctctggcgatacgggcaatgtcgaagcgcagggtgcccggcggtactggccattactgctgggcaagggctttgtgcgggacagggatctgccggatgtgaacgccctgctgaactacggttacgcggtgctgcgcgcctgtgtggggcgcgctgttattgccgcggggctgcatcccggcataccgattcaccacagcaaccagttcaatgcacagcgcctgtgcgacgatctgatggagcccttcaggcccgtcgtggatctcaccgtggcaactttgcatgaggcgggtgttgtcgaggttgatcccgcaagcaaggccgagctcgtgcgcgtgctgtcgagggaccttcccttcgggcaggtcaaaagcccgctggaccagtgtgcccaacggctcgcctcatcgttggctgccgtctatctgggagagcgtgaagaactggagttgcccacgcctgattgggctccgccggcgtgagcgatgagccatctgagcgggtaccggttcatgtggctcatggtgatgtttgatctgcccgtgatgacagcgcctgagcgaaaggcggccgcgggcttccgtttcgacttgctggacttcggcttcgagatggcgcagtactcggtgtatctgcggtgctgccggggcaaagatcatgtggacgcggtggtccgcaaggtggagcgggccctgcctgatggcgggagggtcgacatcctttgcttcacggacaagcagtacgaaaacatcctcagttttcagaggggcgcagccgccgcgtctcgaaaaacgccaggacagttcgcccttttctgactctgaagagcgatttttacaggctgatatccttataaaaaacattaaaaacaataggttgcgcgcgacgggagtgtacgtgatcggaaattgcgcgccatccacaacac

SEQ ID NO: 3049 - DNA, 23735 bp, synthetic construct
  source 1..23735: mol_type = other DNA
  misc_feature 1..23735: note = Synthetic
ccatcaagacctaccgtcgctttgaagagggtatggggcagaacgctgttctggcaatgtataaagatgaggccgaccgcaattttggcaaggagctttacaaggccgttatcaacaataaagagaattaccgcgccatcatggacagctgtctggacaccaaggtttgggaaacagaacgtctggcctacatggatgtgataatcatgctgacggcaatggccgaaatgctcaacttcccctcaatacctctcaaagttactctcaatgagtatatagagatagcaaagagctactccacgacaaaaagcggaatgtttatcaatggacttctcggcgtaataattgcaaaattacaacgcgagggattgttgatgaagacaaacgcagatgtaagaaatatcaagaagcaataagcaagttatttctgcaattgctacgagattgaacaaaaaaaacacactaacaaagcaaataaaaaaaatctgataaatgaacttcttgaatttgattttggctgatcaggcccaaaggggtggcggcggcatgagcggaatcttcatgattgtagccatgattgtcattttctatttcttcatgatacgtccgcagcagaagaaacagaaaaaaatcaaacaacagcgcgaagcacttggcaaaggcgacaaagtggtaacagccggcggcatccacggtcgcatcacagccgacaaaggcacttacttcatggtagaagtagccaacggtgtcaacatccgtgttgagaaaaccagcatctatccgctggaagagaatgcgccggtggcaaagaaagaggaacccaaagcaaaaaaggctgagaaaaaagaggcagaagaagtagaagccgaagaggtagacaacaaggactgatacccattcggattttccgcccatgggcaagcgattggcaaacgccaaagagaagtggatccggttgaaaaaatcagccggctttcacaatattctgctgtttgttttatttgtggtcatagcctcccttttctggataatcatggccatgaacgattcggcgcaagtaacactcgatgtgaacatgcgcataatcggcaaaccggattcactgacctttatcaacgaaccgccgcaaaccattcatgtaacggtgagcgataaaggcacctcgctgctgcggtcggcttttgcccgtaacccggtgatacagttcaacttcaaagagtatgccgagaatggcgttttccgtttgaaggcgtcggatatctatgctcagattcgcgcaagattcggaactcaggcacagatttcaaacatctcggtagactcagtttcactggcatatacagcgcttccgcccaaaactgtccccatagaaattgtttctcacttgtcggccacaccgggttatgtggtggacaaacacctgacgccgtcaaagaaatttgtcttagtatattcgaccaacaacacccttcttgacacgttgatgcgagtgcggacaaagccaatcacaggtgccaatcttgcgcacaccacaaactataaaataggctttgaacctatcaagggggcgcgcatagtgccatcaagcattactgtaagcgtcaacgtggaaccccttgttactaaagaagttaaggttgaggtcaaggcaataaatgtgccggagggagagaatatttcactcttcccgtcgatggttagcgtcagcgcatttgtgcccatgagtcgctttaacgagccattgacagatttggaggtggctgtgaattacagcgacatagaccaagccaacggttacaaacgcctgccggtgaagattctcgatgctccacggtatgccatcgacccgaagcctaaccccgcctctgtagagtatattttggtaaaatgacagcactaagctcagacacaactccgttactctgcggcattgcaggcggcataggctccgggaaaagcatcttcagccgtttgctgcgtatgcgtggttacaaggtctttgattgcgactatgaggccaaactgctgatgcaatctgacgctcagataagagcttcaattgagaaggaatttggaggagtccacgttttgggcaacaaggagtttgcaagaaaggtgttccataatcccgaaatgcttcttaagctgaacgccattgtgcatccggcagtaaagcttcggttaatagaatgggcagaagagccttctgagaggaacattaagtttgtggaaagcgccatacttgcttcgtcgggtattgcagagcaatgcgacgccgtttgcagaatcataacgccccatgagcaatgcatccgcaatgtggtgtgtcgcagccaactcaaccgtcaggagatattttcacgcattgaggcgcaggctgaggaaacggccctgcttgaggaccttaaggtggattgctatcccatatacaacaacagtgagcgctcgctgctgcagcaggcagacacgctgattgaaattttagaatcatacaaccaacacttaccaaaatgttgaagaaaatactttcaataaccggtcgtcccggactttttgaaatcaaaggtcagggcaaaaacatgatcttggtagaagacatcacgacccacaaacgtttcccggccaccggacgcgacaagattgtggcacttggcgacatagcaatgtatactgatgagggcgacacccctctcggcgatatcctggaccgcgtatacagccacttcgagggtaaagaaatagattacaagaaattacagaaagagggcaaactggcagagaccttcggtgccatagttcccgatttcgaccgcgatcgcgtttatgacagcgacattcgcaaactcttcagctggtataatctgctgattggcgccggcttcaccaccttcgcagccaaagaagaggagaagggagaagagaaggaagaagagaaagctgaataaaacaaagagtaagcagatttagcttaatctcaactttgccgggtaaaattgcctgaaaattcccccaataattttcgggtctccctcaaaggtaaaaaattggcattggcctctaaaagagaatgagtcagcaacgacacattctctttttggccgccagccataatccatccacatttttccgaacttttcgggcaactgaatcatcaactttaagagtggatttgcccaaaccaccaaaaagcattaaatttgcataatttttggaataccctatatgcgtcaactaaagataaccaagtccatcaccaaccgcgaaagcgcctctctcgataagtatcttcaggaaataggcagagaagagctgatatccgtacaggaggaagtagagcttgcccagcgcatccgcaagggcgaccgcaaggctcttgacaagctcaccagggccaatctccgcttcgtggtatcagtggcaaaacagtatcagaaccagggtctgagccttcctgacttaatcaacgaaggaaacctcgggctgatacgggctgcccagaaatttgacgagactcgcggattcaaattcataagttatgctgtatggtggattcgtcagtcaattctccaggccttggcagagcagagccgcatagtgcgactgcctctgaatcaggttggctcactcaataagataaacaaggaattaagtcgctttgaacaggaacacgaacgcagacccagcgcagaggagctggccgagcgtctggatcttgccgccgacaaagtggctgatacgctgaaagtgtcaggccgccatatcagcgttgacgctcccttcgttgacggagaggacaactcgctgctcgatgtgctggtgaatgacgacagtcccatggcagacactcgtctgaatcaggaatcactggccaaagaggtaaacagagcccttcagcagcttggcgaccgtgagcgcgatattctgaagatgttcttcggcataggctgtcaggagatgactcttgaggagattggtgccaaatttgacctgacacgcgaacgtgtgcgtcagataaaagaaaaggccatacgccgcctcaaaggccagaaaagccgtctgctgaaatcttatctcggcgaataacagagcatagttaaggcgcatgatgatatgaagcgtttgctgtcgatacttcttctccttttcactgttgcgcttacggcagctgcagatgaaaaggctgacagcacggcagcttttgattcaagcaacgaaataggttctctcttccccgacgcgcggcggccgggtaaatccaaacatttaacttggggtgcagaggtgggttcatctgtggatctcaccggcaatgacctcactactttcgatgcacatctgaattgcggatacaccaacagtctgtttcgtatcataggcgttggcttaggtgtgcagcgttctgtgagcaatgccaacacattcattccgttctacggcgtgataagtacaagcttccgcaccaagccctccaacttcttcttcaacctgaaagccggatattcgttcaacacggtgaactcaggcagaaacaaaggcggctttctctgctccacaggcctcggcatgatgcttaaacgcagtcggctggtgagcgcctatataatgctcgcttacagcttttaccaccttgacagaacggtggtaagcgagcagcaactcgacattaatcatgttgactttgcgcaaataatatttggagtttcattctgaatgagcccccaatcctttacattaatttacatttaaacggcgctattcttaattaatactaaaattacagtcaggtgcaaaacaggctgtaatattggaacgagttttgcattatatatatgttaacaaacccgattaacacttgaatatagaccaaaacatcacatatatgagaagaaaaacatttggccggatgctgatgataagtgcagctgtttgcgcggcattaggcaccggtacagctatggctcaggatgggcggttcatacaaactgctcatacaccctcgtttgagacagactttacggtagccgccgagaaaacggtcaactcagtggtttgcatacaaagttacgagaccccgcgtcagcaacaatacttcaatccgtttggcgatttctttgatttcttcggcttcggcatgcctcagcagcaacagcctcagccccgcaagaaacagaaacaggaaccgcagcaaaccggcacaggctcgggcgtcatcatctcagccgacggttacatagttaccaaccatcacgttgtggtaggcgccgagaaactggaagtactcctcaacgataactccacatacacagcaacgctcgttggcagcgatgaggctaccgacctcgctctgataaagatagacgccaagaacctcaagccgataaccttcggcaacagcgacgatgtgaagataggcgaatgggtactggctgtcggcaatcccttcggcctgaactcaaccgtaacagccggtatcatcagcgccaaaggccgcgctctggcaggcgcacgcaacaatggcaaaatgggcattgaaagctacctgcagactgacgctgccattaatcccggcaactcgggcggcgctttggtaaatctcaatggcgaactcataggcattaacgccgccatatattcgcgcaccggttcttatacaggttactcattcgctattcccacctcaatagtgtcgaaagtggtaaccgacatcaagacctacggcagcgtgcaacgcggcatgctcggcattacctgccgcgctcttgatgccgctttggctaaagagctgaaaatcactgccaccactaacggcgtagtagtaatggaagtggaagaaggctcaacgggaagcgacctcggattagagcaaaacgacgtgatagtaggtgtaaacaacacgcctatacataccttccccgagctgcaggaacgtctgtctaccctccgtcccggcgaccccatcacggtaaaatattaccacaacaacaagctggtaacccgctcagctaccctcaaagactctcacggcaaagcctctgtaacggttcatcgcgaatacagtatgcttggcgccaagtttgagcctcttacggatgcagagaagaagacgtacaacgttcgccacggcattaaaatcactgaggtagaaaaaggaagcctgctagctgccgaaggcatcaagaaaggcgacatcattctcaccgtaaatgatatgcccgtaaactccgaacaggacttccgcaaggcttatctgtcaatcatcaacgacgacgagtcagagccggtaatgtggattacaggcctgaaagaatccaccaaacgcaaattctattgcgccgtggctttgcccaaagaagactaaagctcttagaaagcctcttcacagaaagagatttccccaaacataaaacacccggaaggatgtgccgacaccatttggcgcatccttctttcttttcaccctttcgcttatgaaaataagctcttaaggcattgccatttcgcgttcaaataattctggatttgcgcaaacagttgaaaattcactttacataggtttataaatgaacttctgaaatgttaaaccaactccggggaggctgatgtatcttttatctccattacctttgctttcggacatattactatatccaaataagaattctcacacttatcaacaaaaacactcactatgagaaaaaaatccacattcacagcaaaagtgctggcaacaatggctatcaccgcctcagcactactgttgcctcagcaaggatggtcacgcatcatcaacttcgagcaagatgacatcggttatggcttgaacaccgataccaaggaggccaccgtcaccaatctgcgcaacatctcctccacggccaacatccccgacagcctggtgtataaaaacgcagtctacaagataacggccatcggccctgacgctaactaccgcaacgacaggattaaaaaggtcgttctcggcaaatatgtgcaggtaatcgactcctgtgcatttcaaggaaacaagcagctgttctcaatcaatatccccaaagggatgaaggtaataggcggcaaatcattccaagactgctacgcactcgaatcgatagagcttcccgaaggtttagaggctatcaggacatttgccttttactcgtcgggtctgaaatcattccactttcccgccagcgtgaattacctgggtgtaaaccctgttcgcgatacacaggacctggacacaatcacaatatccgctgccaatccttatttcaaggtggtgaatggcgtagtcttctccaaagacggtcagacgcttctcttctccggcgccggcatagcggccgactcatacaccatccctgacggtgtgattagggtagctccttttgcaatgcgcaacacatacaaagtaaaaggactcgttttgccggcctctgttaggactttaggcgacgaagcattctgccgtatgggtctgaagactctccacataggtgccggactgaaaaacataggagaatgttgcttcggctactgtcctgacctcgccacaatcaccttagatgccgctaaccccattctgaagttggttgacaacaacatactcagcaaagacggcaaaactctgcttattgtggtagcgcagaacgcagaatatactgtacccgccggtgtcgagacaatagctccatacgtcttctacggcatgaccaagatgacaggcatcaatctcaacgatgtcataacaataggtgaatgtgccttttatcatacagataatctggcaactgttaactgggtcaccaagctgcaggaaatcggcagaatggccttccagtatagcggcctaacttcgataatacttcctccttcggtacgcgcaatcaaatatcaggcttttaccagctgcagtaagaacacaaaaatagttctgccagaaggtgtcaaagagattgccacaagcgctttctacggaaataaactggtgaaagaagtacgtgtgcctgcatccgccaccaatttaggtgaatccatattctattattgcgattcactgcagaaagtgattttgcccgacaacttgacatatatccccaaacagactttcaaccactgcagggcactgaaagaaatcaactaccctgcgtctctgcgcgaaatcggccgttcagctttaacagattgtcctataaccaatttcaatcttcctgaaacggtagaagttattggcggcatggccttcgaaaacactaaaataggtcccgaaattacgctccctccgctggtatctgtaattgatgaattcacttttgtagattgcaaaaacctgaaatctgttaccacttctcctaatctcaaagagataaaagaagcaggtattcagtacaatacgattctggaggaaatccatcttaacgaaggacttcttaccataggcagaataggattagcaggtaactataagatgaaaagcctgacaataccgtccaccgtggttagtgtcggttcgctgttcgtcagatcaaatattgcgcagaaagatcttatcatgcttcctgccactcctccggccaccaatggtgatgttacagacgacgcccgttatgacatcatcactctgcatgtgcagaaaggcagtctggaagcctataagcagcatccaatctggggtaagtttacaaagattctaggcgatgccggagtaaaacccgagttcatggatgagcctacggtagttgagatttacgacatcacaggaagacgtttacccgaaatgacacccggcacagtcaacattctgcgcatgagcgacggctctgtacgcaaggtgatggtgcccgcaaactgtcgttaacaaaacatagaaggcgctgagtctgtcagccccaatgttagcttttaggtgaatcccgagggtgtatcgtaattcgattatgatgcaccctttctttaaacatcattgctattttttgcgcccacggatgcgcgacagatgtaggggtgtgataccaatgtatgatgctatatgcttgagaggcaccttgttagctatgtcaggccgatgctcaactatagcccggtattgctcttcagctgagccacgcattattttattcttgttctcaaagcaatagagttggatcatcagccggccaagaaaccatttatacacttccgcattagctgccataaagcggtttaaatcgtcacggttgataacaagcatccttaccggcccacaggcttcgcggttttctgtggccggaaaatcgtacatataaccgtgcatcgacatacagacagtgccttccaaaccgaaatagagagtcttttccctattaccttcgttgtgccaaaccctcgtaatgccggatatgacaatggccagacatgtaaaaatctcaccggccttcataatcaattctccattagaatattcctctatatgactcaggctgattagtttgtcaatatttgcgcgactaagaggataaggggaaccgtcacatacccttaaaggcaacacctttagttcatcatcagcaggattaagaaatcgtttcataaatgagcataattatctgcaaatttagcgttaaaagtttgtaataaagacacaatatccccaattacaacacctatcgacagcattatttatccatgcttaaaaaatatctctaacccctttcttcccctcctccccaattttaatccaaaagtacccctaaccgatttcatctcaaggaaataagaacacctaaaacaataatttcagaaatggtgagaaaaagacgggagagaaaccttacggcttccctccccgaatgttttcacaacggaataatccttattgtgatttgctttggtttatttttgcgctacaaaattacaacgaaaaaattaataatgcaaattattcatgcttgaaaatccaatttttatttattaactttgtaaaaattaaccgccacatatcaggcaaataaaattctatattatgaaagtactcggacttgacctcggcacagcatcaataggatgggctgtaattgataccaacgttgaaaatcccaacgacatccaactccttggcaacggaagccgcatcatacaatacgataacaacgaagcatccgacttctcagccggtaaaggtgaaactccttgcacacaacgcactttcaggcgcactgcccgcaaatgtcttgatcgctatcagcagcgtcgcgacaagctgagggccttcctcgttgagacgggaatgataaaaccggatgaaaaattcccacccctcaatcctcttgaaacatggaagttgcgcagcgatgccgccactccgggcacaaagctgtcaacgtcagaaattgccagagtcttgctccatatcaatcagcgacggggatatcgacatgcaaaatctgatatgtctgactctaaacagaccgaatatgtagcccgcgtaaacaaccgctttgcggagattaaaaatctcaatcaaacggtaggacagttcttctacaccaagctgaaagcatcagagtgtactaccgtgcggggcaaaaaacattacacttatagaatcaaagaggaggtattcccccgcaatgcctatgccgaggaattcgattccataataagcgctcagggggaattctatccgcaactgctcacaaccgaaaatgttgctgagctcaggaatctgattttctatcagcgccctctgaagtcatgcaagcatctcgtatcgtattgcgattttgagaagcgggtcttcaaaaactctgccggcaaggaggttgacggcggacctaaagtaacaccaaagtcctcgcctttggcacaagtttgcaggatttatgaggccatcaacaacattcgtcttgtcaattcccgtcttaaacgcaggaaagctgccgtggcgccatcgctgttcgatgacatcgaaaatctgccccttgactacagaaaacagcaacctgaatttattcttaacgaggaggagaaacagagaatcttcaattacctcaacaccaacgagcgtctcaccgaaaccaaactccttgaactcatagggctaaaacgcgtcgacggcttcaaatctgatatgtcgttggcaaaaggcatagcaggcaacaaaacctattgcagcatagcgaaagccctggccaatctgcccaacggggagaatctgctgcggtttgacctcaaaatcaccgaaaagctggacaaaacctccggagccctcgaaccggttattgacctcgcttatctcaacgagccactcttccttctgtggcacactctttattctatatccaacaaggaggaactgttcaactgtcttggcgccaaattcggtatcaacgaccccgaaactctcgaaaggctctatgccctcgactttgttaaagagggatatgccaacaagtcggcaaagttcatcaggcgcatacttccgtatttaatgcaaggatacggttacagcgatgcttgcgcaatgtgtggtgttaatcattccaactacatcaccaaggaggagaactcagagcgcgaactcaaaccccgcctcgaacgccttaataaaggagaactccgtcagcctcttgtggaaaaaatactcaaccagaccatcaatctctccaacgccatcctcgacaggtttggagaaatagacgaggtgagggtggaacttgcccgcgaactcaagcagaacaaggaacacagagccgaaaccacaatccgcatcaacaaacaggaaagagagaacctgatgcttgcgaatatgatttccgaacttaacatttctcccacccggcgcagaattcagaaaatgcgtatgctcagggaaacggacaacaaatgtatctattgcggagctgtggtaacgccttctcaattcattgagggccatggctacgaggttgagcatatcattccgcgctcgcgtctgttcgacgacagcttcaccaataaggtatgttcatgccgcgaatgtaacgcggccaagggcaacttgaccggttacgactttatgaagacccaaagcgaggagaaattcaacgaatatctcgaccgcattgagcggctctgcaaagacaacaaaatctccaaagggaaactcaagcgacttaagatgtcggcctcagaaattccctctgattttattgagcgcgatttaaggcaaagccagtatatagccaaaaaggctattgagattctctcagcctcgttcagaaatgtatatgcctcctcaggtgccgtaacaagtttcttccgccatgtgtggggctacgacgatatcctccatgatctcaacctgcccaagtatcaaaaggccgaacttgttgaggatgtggaatataccactcacggacaaacacataccgcccaacgaatcaaagactggacaaaacgcaaagatcaccggcatcacgccatagatgcactcgtcatagcccttacccgtcaaggctatatacaaaggctcaacaatcttaatgcctctgccaataaagagttcggcaagatgaatctggagaaatgggccgctcagcagcctcatttatctgtgtctgaagtcaagaaagctgtcgacaacatctctgtctccttcaaagccggcaagaagctttccacacccggtaagcgttacgtcagacgcaatggtgtgcgcaaatgtgtacagaccgggatactcgttccccgggcagccctgacaaaagaatatgtctacggacaaatcaaagttcaggatgggaaaaaggatttgaaatacatatttaagaatccagaagctattgccgatgacgatatccgcacggctgttctcgaacgcctcgccactaatgacggtaatgtcagcgccactctgaaacaacttaagaaaaagcctctcgaagtcaatgggcgaaccatagagcaagccgactgcttccgtagagaattcgtaatcaactatagtgttgacagcatcaagacacaaaaagatatagacagcatcatcgatccggccatacgacaaaagttccgggagcgctttgaacaagtcggagccaaagactttgtaaaaagcatagcggaaaatcccatctgctctgatgctgaggggaaatgtgccatacgcaatgtccgttgcttcaccggattaaaacccgactcactggcgtgtgtcagaaaagatgcgtcaggcaaggaaatcggcttctctcagacacaaaacaatcatcatttggcgttctatcgtttgcccgacggcaaaataatagaatctgtggtctctttctggaacggcatattgcgaaagagatacggcgtacctgtctttgttcatgacccggctgctgtctgggaccgcatagccgagatgaacgagaataacgacatccgtgccattgccgaatctctaccccctcgcgattctgagttccttatgagcttgcagaggaatgagatgttagtactcggcatgagcgacgatgaatggaatgacgcaatatcagcacatgatatcgcagccatcaataagcacctctatcgggtatggaaattaggctcaaaagattataacttcaaattccacaccgacacaactgcacaaataaaagaaggagataaagagatgaagatgttccatagaattggatctattcaggctttacttgcgctcaatccccgtaaggttagcgtatctatacttggagagatagatttagaaaacctgacacagtcatgataaaaaagacactgacattctccaacaaagcttatctgtcgtataaacttaaacagttagtgatacggcgggagaatcctgttacaaatgaagaggaggttataacacgccctatagaagacataggcatcataatgatagaaagcggacaggtaactcttacatccgcattaatttctcatcttgtggagaacaatgtgggagtcatattttgtgactcccgccacatgcccattaacatgatactcccattgcaggctaatacattgcaatcggagaaatccatagctcaaattcaggcttcccttcctttaaagaaacaattatggcaacagactgtggcggccaaaatattcaatcagggcgtcgtcctcggtaaagttgcaggagttgaaaccggcaatatgttcaaatggagcaccggcgtaaagagcggtgattcagataatcttgagggtagggcagcggcatattattggcgaaatatgttcccggaaacaggtggcttcaggagagataaagatggagaagattccattaactcatttctcaattatggttatgccattttgagagccatcattgcccgaagcattgtgggcagcggacttatcccattaatcggcattcatcattcaaacaagtataacgccaactgtcttgccgatgacatcatggagccttaccgcccttatgttgatgtgttggttgccgatatggtctataaatataaaatgactggcggtcttgacaaagaagctaaaaagatattgctttcaatacccacacttgatgttcattttgggaaaatagttcgacctctgcttgtagcagcatcttacaccacggcctcacttgcaaaatgtttctcaaaagagagccggaagattgcttatcctcgtatcacaatagattgattttaatcaatggcacattatatatcatttgatcgtatcagctcttatcagcttatgtggatattaatcatgttcgaccttcccacagagactaagaaacaaaggaaagcagccaccgactttcgtaaaagtctgattgcagatggtttcaccatgtttcaattctctatatatgtcaggaattgtgcatcacgcgaaaatacagatgtgcatgtaaaaagaatcaagaatagccttccagaagaaggcaaagtctgcatcataaccatcaccgagcgacagtttcgtgagataatcctttttgaagggaaaaagaagacaccacccatcccggatgctatacaactcgaattattctgaaaagcaagcgccggacaaacacgagtaaaaagcgtatctcaattaaaaaagctccccattacgaggagctttttataatcctataaatcactgtaagtgtctatatatcagacagatacaaatattgtggtgtgatttatagtgcaaaaataataaatccaaagcaaatcacaaccctcaatggcagccttcagtacctctaagggtgtgatttatagtgcaaaaataataaatccaaagcaaatcacaaccagttgcagccatgccaagttcggctaacgggtgtgatttatagtgcaaaaataataaatccaaagcaaatcacaactcccagttgctgtaatacgtcgttgtcgacggtgtgatttatagtgcaaaaataataaatccaaagcaaatcacaaccgatagtactcgttgtaaattaactgatatggtgtgatttatagtgcaaaaataataaatccaaagcaaatcacaacacttcgcaaactatttcaccaacatagaataggtgtgatttatagtgcaaaaataataaatccaaagcaaatcacaacatagcctgaaagcgttgataaataggtatgaggtgtgatttatagtgcaaaaataataaatccaaagcaaatcacaacggcgctgctccccattggcaacggtggcaaaggtgtgatttatagtgcaaaaataataaatccaaagcaaatcacaacacttatcctctttcactttgtagatgctgtggtgtgatttatagtgcaaaaataataaatccaaagcaaatcacaaccggcgttggtgcctgccttctcaaagacggggtgtgatttatagtgcaaaaataataaatccaaagcaaatcacaaccaagaaagaggcagttgacatggtgccggaggtgtgatttatagtgcaaaaataataaatccaaagcaaatcacaactgcacctccttctcctcggccgtcggcggtggtgtgatttatagtgcaaaaataataaatccaaagcaaatcacaaccagaggtccggcaggccgttgggcgccgggggtgtgatttatagtgcaaaaataataaatccaaagcaaatcacaaccggcggcggcaacctcagccggggaaataggtgtgatttatagtgcaaaaataataaatccaaagcaaatcacaacaactatgcggagcttttacagcattgtggccggtgtgatttatagtgcaaaaataataaatccaaagcaaatcacaaccacgtaccgccgctgtttttgctgacctgtggtgtgatttatagtgcaaaaataataaatccaaagcaaatcacaacagcgctgcggcatggagcagttcgacgataggtgtgatttatagtgcaaaaataataaatccaaagcaaatcacaacgcggtcagtgcgtggccacctgaggcgccggtgtgatttatagtgcaaaaataataaatccaaagcaaatcacaacaaaagactacctgactcttccgccgctgaggtgtgatttatagtgcaaaaataataaatccaaagcaaatcacaacagaaccgcgacaagctgtgggcggaggctcggtgtgatttatagtgcaaaaataataaatccaaagcaaatcacaacgagtatcttggtggcggaaagcagcctgtaggtgtgatttatagtgcaaaaataataaatccaaagcaaatcacaactaagcgtcgttcttctctactaccgggaagggtgtgatttatagtgcaaaaataataaatccaaagcaaatcacaacgtttatctgctgctgattctcagatgttgggtgtgatttatagtgcaaaaataataaatccaaagcaaatcacaacctcatcagcgaagagttaaatatgtgtcgcggtgtgatttatagtgcaaaaataataaatccaaagcaaatcacaacagatgataagccccgaccaccaagagagccggtgtgatttatagtgcaaaaataataaatccaaagcaaatcacaacggtggccgcattctaaatcattcggtcgggggtgtgatttatagtgcaaaaataataaatccaaagcaaatcacaacgcaagacaagtattgtcaaagataccgcagggtgtgatttatagtgcaaaaataataaatccaaagcaaatcacaaccggcggcaactccgttaccgatatttatatggtgtgatttatagtgcaaaaataataaatccaaagcaaatcacaactgggctactggcggcaatggcacggttacgggtgtgatttatagtgcaaaaataataaatccaaagcaaatcacaacagcccggtattggacgtgatgtcgtaatatggtgtgatttatagtgcaaaaataataaatccaaagcaaatcacaacgctgcgcaacaccaccttcaatacgttctaggtgtgatttatagtgcaaaaataataaatccaaagcaaatcacaaccgcccggcaccctctccaccgccgaaaagcggtgtgatttatagtgcaaaaataataaatccaaagcaaatcacaaccggagatagcagccaacggcgcggtgctgcggtgtgatttatagtgcaaaaataataaatccaaagcaaatcacaacactcgcagatgcgcgacgtcatcgcctccgggtgtgatttatagtgcaaaaataataaatccaaagcaaatcacaacgtcgtcgaggacgggagaggtaaatgaggggtgtgatttatagtgcaaaaataataaatccaaagcaaatcacaacgcaattcctttttcgtagaaaattttacttggtgtgatttatagtgcaaaaataataaatccaaagcaaatcacaacagataagatgtagatggtggctgctagcccggtgtgatttatagtgcaaaaataataaatccaaagcaaatcacaacggaattgttactacttctccttctcctttaggtgtgatttatagtgcaaaaataataaatccaaagcaaatcacaaccgggtaccgtagacgagagagcggcggcagggtgtgatttatagtgcaaaaataataaatccaaagcaaatcacaacataccgtccattactctgaactacgggcttggtgtgatttatagtgcaaaaataataaatccaaagcaaatcacaacatgacggtacgcgcttaggcggcggaaagaggtgtgatttatagtgcaaaaataataaatccaaagcaaatcacaaccggcagttgcgactctgcaacctcctgcttggtgtgatttatagtgcaaaaataataaatccaaagcaaatcacaacgccggacctttgggggcagatcttttgtctggtgtgatttatagtgcaaaaataataaatccaaagcaaatcacaacagttgtgaaatcagacacggatgtgccggcggtgtgatttatagtgcaaaaataataaatccaaagcaaatcacaactaacttcgggtcggcaaagtcaggtattaggtgtgatttatagtgcaaaaataataaatccaaagcaaatcacaacgatgactttcttgagcttcggaacggagtaggtgtgatttatagtgcaaaaataataaatccaaagcaaatcacaactaattgttttgaatactgatattccgctaaggtgtgatttatagtgcaaaaataataaattaataaatccaaagcaaatcacaacaggtgcggtgatagccaccgtgcgctgcgcggtgtgatttatagtgcaaaaataataaatccaaagcaaatcacaacctgtgtactaagaggcgcggcacgccgttgggtgtgatttatagtgcaaaaataataaatccaaagcaaatcacaaccgatgtcgattttgtcaagttctgccaaaaggtgtgatttatagtgcaaaaataataaatccaaagcaaatcacaacaagcacctcacccgataatgcgacaaagaaggtgtgatttatagtgcaaaaataaggaattataagggaatatcatgataactggtgtgagaagaggggagaggcagggtcggatgcgggtgggtttcagattttttagtaactttgtgggcgaaatctgtattcgagtgtaggttttttgcatacaaaggagtgaaatgaaatgctcaatttggaaacggcatttattcttaacctactatgaatcaggcacttcaatgtaatcaataacgaatcaagtatatgaggaaaattctacaacttcatctgcggcgtatgctccttgtagcaatggtcgctgtgggcatgacaatgcctctcgtggcacaaactttcaccgccaatcgtctcaactattctatatctaacggcgaagccaccattgtcagcttcgtaaagggcgaaaaaatagacacactccgtattcccgacgtcatagaatacaacaatgccagctatccggttgtggctattgctgacaaggctttccgcagctcttcgtcaacggtggccgcgtacatgggagcaaacatcaaaacgataggcaatgaggccttcgccatggactcaaagcttgacacggtgtatctcaacgagggtctgctgtcgataggtaactatgctttccaaaacagcaaactgacgttcatctccctgccggcttctcttacgcatttcggcgaatgtgtgttctagggcaataaaacgctcgtcggtctgagtctcgcggctgccaacactcatttctcctacaccaacggcatcctggtgaacaacactgaacactgtattgtgctttgtccgggacaatcccctgaatcggtaaccatcgcttcgggcatgactcatatctgcggctctgccttcaccggcaagactttacagatgctctctctgccttcctctctgactacgataggggagtcggcttttgagaactgtaccgcgctgacaacggtgcagggtgccgacaatatcacttcttacggccagcgcgccttttcgggttgcaccaagcttgcttctctgtccttcacctctgctctgaaagagattggtgcatcagctttcgccaacacaggatttacggaaatcaaccttcccacttctgtaacaaccatcggcaatacggctttcatgcaatgcaaagctctgaaaaaagccaacatacccactgctaatgtgaaaatgggtaaaggcatttaccagtcatgctctgcgctgaccgacatctcaatgcccgacggacttacagtgatacccagagatatgttctccaacacggcgctcagcactgtggctattccggcttcggtaacctggatcgacaacggcgctttctatatgaccaaactcaaacaggtggaactgcccgacgggctgcgtcatttaggacagaatgttttctacaacacgccattaacttccatcgtaatacccaatcatgtcgacaccattggacagggctgtttcaatcaatgcaaaaagctcagaaaggccgttatcggcaccggaacacgcgttattgccaagagtgccttcaacagcacagctctcgacagcatctctctccccgagggtttggttgagattcagcagctcggcatatccgtcaatccctacctgaagtccatggtgctgccttccactctgaccaccttaggcgcccgctctctgttccgcaattcctttacctctgtaacggccaagatgacaaccccgccgaatatccgcgaagacctcactaataaaatctttgccgattacacagactggcagggtgacagcatttacacatattgcaccctttatgtgcccaaagggagccttgaggtatatcagtcggcaagaggctggaagctcttccagacaatcaaggaagatgacgcttcagttgccggtttggacgccgaggctgaacgccggctcattggcatcttcaccattgaaggcatacgcataagcgaacctgtacgcggcgccgtaaacatcttccgctacagcgacggcacagttcgcaaagaaatagtccgctaatttgcggtaacacataaacagaagtaggagataaaccctcatttcaaggtgtttatctcctacatatttaatttcactgtctgttcaatcaggaagcagattcgctgctttcggcattattctccgacgctgtcagtgtgagttcgtcagaaccttccgtatggtctacgtcaaccttcgtgccgggcagatgagcggcattacgctccagaagaagttctgccaacgggtcctcaagatacttctgaatgctgcggcttaacggacgggcaccatattgagggttgtagcccttgtcggccaggaacgttttggcagcatcggtaagctcaagatgataaccgagtttatccatccggctgatgaaaccgcgcagctctatgtcgataatcttcacgaggtcttcgcgcttcagtctctcgaacatcaccacatcgtcaatacgattgaggaactcaggcgagaaaacgcggctcaaagctttgttgatgacgctgtgagtctgctctgagtcgggagtgccggtgttgaagcccacaccgtggccaaactccttcagctgacgcgacccgacattgctggtcataatcagaatcgtattcttgaagtcgatgtggcggcctaacgagtcggtgagacgcccttcgtccatcacttgcagcagaagattaaacacatcgggatgcgctttttcaatctcgtcaagcagaaccaccgaatagggtttgcggcgtactttctcggtgagctgacccccttcttcataccccacatatcccggaggcgcacccaccagacgactgacggtgaatttctccataaactcactcatgtcaatgcgaatcaaagcatcggtggaatcaaacagatactcgctgagcttcttggcaagatgagtcttaccaacgccggtaggaccaaggaacatgaaaacgccaattggcttctcagggtctttcaggccgagacggttgcgctgtatagcctttacaattttacttacagcgtcatcctgaccgataaccacacctttcagcgcttcgggcatcttcagcagacgagagccttcggcctgagcaatacgggcagtaggcacgcctgtcatcatggccacaacttctgccacctgctcttcacccacaggctgacggtcattttcaagactcttcttccattcttcctgcgcattggccagcttattgcgaagttcagtctctttgtcgcgcatctctgcggcaaggtcatactgctcgtttttggcggcattgagcttctcctcatgagccttttcaacgctctgttccagcttctcaatctcttccggaaccagaatgttggagatatgtacgcgcgaaccggcctcgtcaagagcgtcaagcgctttgtcggggaaagtgcggtcgctcacataacgctccgtcagatttacgcaagcctgaagagcctcatcgctgtaacatacgttgtggtgctcttcatatttgctcttcacctgcttgagaatctctaacgtctcctcaggcgttgtggcttcaaccatcactttctggaaacgacgctccaaggcaccgtctttctcaatgttctggcggtattcgtcaagcgttgttgcgcctatacattgtatatcgccgcgagccagcgccggtttgagcatattggctgcgtccatggaaccgggggcagaaccggctcccacaatggtatgaagctcatcaatgaaaagtataatctccggatgtccgctcagctcgtcgagaattgctttgatgcgttcctcaaactgtccgcgatatttagtgccggcaaccaccgaagccatatccagagccacaacgcgtttatcgaagagtatgcgcgataccttcttctgcacaatgcgcagcgccagaccttcaacaatggccgatttacccacaccgggttcgccgattagcactggattattcttctttctgcggctgagaatctgcgccacgcgctcaatctcgcgctcgcggcctaccaccgggtcgagttttccggcagcggcattggcggtcatgtcaacaccatatttgtcgagagccggagttgacgacgaaggtttgtcggaatcacctttccttccggaccgacggcgaggctgttcgttttcttcatcgtaatcttcatcttcagcctggaaacctgcgcttgggaatccaccgttttcctctgagaatggattattcatgctcatagaaatatcaaaattcagatatttttgtttgaattcacgcaggaattcattgtcaagagatcgcggatcgtgaataagcgccaacaaaagatgtgccccgaataagccgggactgcgcatgcggcgcgcctctgccaatgccagcttaagataacgcacagctgccggatgaataggctccgagcccagatgtggcatatcggcatctgctacaaaagtggcattctcctctttaatgtgattttcaagctctgtaatcatctcgtcaacagggagcttgagagtggcgaaaattcttcgcatcgtagcttcgcgcggacgcatgctgcccaaaagcagatgctccgacgtgagtacaggcgaagaaagactgcgggcttccctcactgctcgatctattactggcttgaattgctgttcaaagttatgagtcatataatagaattagattaggggaataactttccctttat

SEQ ID NO: 3050 - DNA, 23729 bp, synthetic construct
  misc_feature 1..23729: note = Synthetic
  source 1..23729: mol_type = other DNA
tacatcgcagcaggcgacaccgagcgtctccgctggaccatcatcaagaccggttgcaccgaaatcgcaggtgaggatcagttcgacaaattcatccagaacaataccaccaaggactcctatcagggcggtgtgacgaattccgagttccaggactgtaagaaactgttcggatggaccgacgattacatgacaacccgctatctcatcaagccgtcgcagcataagtcggcacgtatcatccgcaagtatttcgtacctctgtcacagcgtcccgaggtgtacaacatctgcaagattccgttgaaccaccgcatcctgcgtttcgccgacgtgctcctgatgtatgccgaggcttgtcaggccacgggcgacgagggcaacgcacgcacggccctgaaccgtgtgcgcacccgcgtcaacctgcccgatgtaacatccagcggtaacgccctgcgcgacgccatccgtctggagcgccgtctggagctggccttcgagcagtgccgactttacgacatacgccgctggaagggcgacagtggcaaatcggtcatggccgaactgttcggacccgacggctcgttcgtgaagtacaacaccggcgccgacgccgatatgtacgagaagaacaaccagggcgaaccctccgacaagggtacccgcttctcggaaagccgcgacctcctctggcctattcctcagtatgaaatccagcactccaacggtgctatcgaacagaacccaggattctaatatgagactaagtaagattctattactgtgcatggctgcggcatgtatgcctgcactgatatcatgcgatgaaaaacccaccggcgtttccacgaaacgcccggtgggcagtggcggcgacgagcctgacactcccgatcctacgcccggcggcgacatagtgtcgcctaaacccggattcacgtgcacgtcgcagaacacggtggtcaacaccgccgacacgcgtcaggtcatggagggcttcggtgcctccgattgctggcttcccaactggattggccaatactggacgggcaaccgtcagcaactggccacatggctgttctcgcagcgtatctccaaagggaagcccgacggcatcggactctcgatgtggcgcgtcaacctcggcgccggtactttcgaggcaggcgatgcttctggcatcaaccaggacaacgccaataaccgtgccgaagcattccttgttaacggctcctacaactgggacaagtgcgccggacagcgctacttcatggaccaggccaagcagatgggcgtggagagtttcgtgctgttcagcaactcccccttagtgcagtggacactcaacggacagggacgttccgactcccgctgggaggcaaacctgaaggaggactgctacgacgatttcgccggctatatggccacggtggccgagcatttcatcggccagggatacaacgtgacgcacgtctcccctgtcaacgaaccgcagtataactgggacggcaactcgcaggagggttccggatggctcaaccgtcagatcaagcagctggccgtggagatggacaaggctttcaaggataaaggtatctccacaaagatcctcgtgcctgaggccgcagcctggaactatctgtatgagtacgacaacaacaaccgtggccgcaccagccagatccaggaactgttcgacccggcgtctgaaaactatatcggcgacctgagtagcgtcgacaaggttgtggccggacattcatactggacgttcgacaactggaaccacatgcgcgacgtacgtaaaaaggtggccgacgcagccgctccgaaaggcctgcgcgtatggcagacggaatggtccatgctcgacaaggagccttcggaactgggcggttcctatggcgatgtatcggaattcgacattgcccagtacatgagccgcgtcatccacaatgatatcgttatggcaggatgcacgtcgtggtgctactggacggcgatgtctgtggagcgttacgatcagaagaaccgcttcgagctgatcaagaccacaccgagcggcggcaactattccaacgacttcaccggcggcggcaacgtcgatgccacgcacaacctctgggtattgggcaattacagccgcttcatccgcccgggctatatacgcgtcggtctgaaggccaatgaaaacaaggacttcttcggcactgcatacgtatcgcccgacggcaagaccgtcgtggccgtatataccaactatgacaaggagaaaggcgtgacattgaccaacagtttcgacaacggcaagacgccggcgaccgtgacacgctacacaaccacggccacgcgccatctggaggaggaccgtttcaacgtagccgacaaggtcttcctggagccggcctccgtaactaccatagtctatacctttgagtaaatcccgactgatccttatattgacagagcgcatccgccacccggcagatgcgctctaatattattttaatggcgtaggcactccgcgctacgctgctattcaagcaggtcgcggagccgttctgtcagtagctctgctactgcccccatctccacctcgcgtcccagttccctctgcattgacgtgaccgccttatcggtgataccgcagggattgatcagcccgaatgcgccgaggtcggtattcacgttcagagccaggccgtgcatagtcgcgccgtggcttatcttcacgcctatggcgcatatcttacgcgcagtgggcttgccccagtccagccacacccctatctggtcgtcgttgctggtcgtggctatgccgtacgcctccaaagtctcgcgtacggcccgctccagtatccccacatattgcttcacgccaagatgatgacgccgcaagtctatcagcggatacaccaccaactggccgggaccgtgatatgtgatgtcgccgcctcgctctatgcgtatcacctccaccccctcgcgcggctttaccagcaggttgtccgcattgccgtgaaatcccaacgtgtagacggccggatgctcgcacacggctattgtctccgcttctgcatcaccttctatcagccgccgaaacagttccttctgtctctcccacgcatcgcggtagggtatcaggccccagtattcgattttcatcttatatgtttctcagcgtggtaactgctgcgcaccataggagccgactcaatatgggcgaaccctttctctattcctttcagccggtattcctcgaacttgtcgggatgaatatagtcctgcaccggataatgcagcttggagggctgcagatactggccgatggtcattatcctgcatcctacggcgcgcagatcatccatagccagaagcacctcctcctcggtctcgcccaagccaagcatgatgccgctcttggtgtttgcgcctttatcggccagatacttcagtacctgcagcgaacggtcgtaggtggccacccgacgcacctcgggtgtgaggcggcgcacagtctcaaggttatgagatatcacgtcgggatgctcgtccaatattatgtccagcaggtcggtccggccctgcatgtcgggaatcagaacctccatcgtcacgccgggacattcctcatgcagacggcgaatcatcgcggcccagtgactggcgcccccgtcgggcaggtcgtcgcgcgtaacggacgtgattaccacatgcttcagcttaagttcctttacgctacgcactatgtcctctatctcctgcgggtcaaggggaccgggcttgccgcctgtaacgttacagaaacggcagttgcgcgtacacacggcgccgcacaacatgaaggttgcggtgccgttgccccagcattcggcacggttcggacacatgccgctggaacagatggtgtggatatgacgctcgttgagcatttccaccacctgactggccttgaagccccgcggcaactttatcttaagccattccggtttgcgccggaaacttacttcctctttcttttccatggtatgattaggttagcagcccaacagctgtttcaacggattctcgccgtgtacggcctcgtagtccttgatatagaacggcacggaatacgccaggtcaagaaaatccttttcgcggaaacttttttcagccaaagccaccatatcgaacgccatcggcagcacatcgtccatccagtgtgcgtttggcagctttattacatccttggtcttggccgcgccgtcgcccatgaaccatatctggcggtcctgtggcagctccttgaacgaatcctctgttataatcatggccttcggcggaatcagcgcgtcaagcctgaaatcgtatgcggcggtgtagacctccatgcggcggggggcgaccatcggcaccaatatttcctcgcccgtgaagttgaggttgcggaacatggccttgacggctatcagcttcagtgtctccacgccgatcagaggcacgtcgagaccgaacgccagccctttggccagcgacataccgatgcgcaggccggtatacgagccggggccggtgctgaccgccacggcgtctatcttaagttccttgcgcgtcacttcctccatggcctgtgccacgaatggcgccaggtccgtggcctgatgcatggcctcgcgctccaccgcgctccattccacattgccgtcaacgctaagcgcaacgctgctggcgctctgcgatgattctatattgagtattgttgccatatttctttaaagttgataaagttgaaatagttgaaaaagttaagaggaatgtgaagtcttgcgaatgtctgtaccattatcttaactttttaaactttctaaactctgtaaactcggcgcagccgcgtacgcagccgcgcatttcataccatcgagggctgcggagacgatgcctccggcataacctgccccctcgccggcgggatatacgttgtcgagtcccacgctattcagacgctcggggtcgcgtgtcatgcgtataggcgaacttgtgcgcgattccagaccaatcatcacgccctccggcgtcatgaaacccttggccttgcggccgaaatcgcggaaaccgtcggccaaccgccgggatataaatggaggcaggatggtgttgaaatccttgctctgaatgccgggcgcgtatgacgtagccggcaatgtggccgacaccttgccgtctacaaagtccgtcatgcgttgggccggggccacgatgctgttgcctgcggctgtaaacatatcatgctctaaacgctcctgaagctccagcatctgcaacgcgccggcctcctcaaattccgggaagtctccggggcgtatttccaccaccattccggaattggccaggcgaccgctccgcgccgatgccgacatgccgttaaccaccaactccccgtctgccgtaccggccggaactatgacgccgccgggacacatacagaaagagtacacgccgcgaccatcgctctgcgtcacaaacgaatattcggcaggaggcaaccatttgcccctccccttcggattgtggtattgtattcggtctatcagttcctgcggatgctccaggcgcacacctacggcaatccctttcggctccatagtcatgccttgtgcgtgcagggctcggaacgtgtcatgggccgaatgacccgtagctaccaccacggcgtcacaggctatctttctgccgtcggccagctccacggccacagctcggccctcctttatgtcaaggccggtggcctgcgtgcggaaacgtacatcgccgccgttattgattatcgtgttgcggatctccttgatgacgtgcggaagtttgtcgctgccgatgtgggcatgaacgtcaatcagaatattttccgacgcgccatgctgcaccaaaagctccagcacctgctgtacgttgccgcgcttcttgctgcgcgtgaaaagcttgccgtcgctgtatgcgccggcacctccctcgccaaagcaatagttagactgcgggtttatctttttctgtctgcttatctcggccagggccacgcggcgcgagtccacgtcctcgccgcgctctaatactacggggcgtatgccgtgacgcaacgcctcaagcgctgcgaacaatcctgcaggtccggcgccgattatcaccatcgttttggcatctggcgcgaccggctcgaatgtcacgggtgtatagggagccttgacttccttgtcatcgcccgtggccacgcgaacagtcaggttgatcatgacctgacgtttgcgtgcgtcgatgctgcggcgcactatccggtagtcgttcacgctccccttattacgcacgttatcctgaatcgctttccgaagcaatccaggattccctgccgtctcgggtgtgacccgcaattgtatatcttctatcatagcttcataccgccactcgttttattcccgacgccattccactacctcgcctgactccaggctgcgcgccacgtctatgatgcgctggttggaactgccccggaacaacaggtccctctccttgagagcctggatgaacggcccatctactataacgtcaatttcccttaaaacctgtgtcaggacaggatttttttgcagttcgtcccacgtgaatccggtgtagagccatacagtgtggcccatatcgtgcactttacgtgctattattttcacttcctcggaatgatacatggggtcgccgccgctgaaggtgacgtcgaagtcctcctcgcgcaccacgtccatgatctgcgccactgtcatttcctcgcctccgtcgaagctccacgactcgggattatggcagccgggacaggcgtgtcggcatccggccagatagatactggtcctgaaaccgggaccgtcgacggtcgtgccccggactatgtccaggacacgtagccgacgttcgttatcattgtcagtcagttcgtttgtcatatctgcgccacgcagtcgatatgtgcgtggtcattaatttatttgtgaaccacgcggtctttcagttcggcgagcttgccgctgttccagcggtcggtggtacccaccaggtagccggtgatacgctggatggtctcgaaacgcgcgccgcacttcggacagcatgtctcgtccttctccgcgttctcgtagccgcagttgggacagtggttgcggttgtggttcaccgatccgtaaccgatattgtattggtccatcatgtccacgatctgcattatcgactcctcgttgtgtgtggcatcaccgtcgatctcaacgtagaagatgtgacctcctaaagtcagctcgtgatatggaccctcgatcttggccttgtggcgcggcgagcagtgatagtacacgggcacgtggttggagttggtgtagtaatccttgtccgtcacgcctggaatcacgccgaacgtcttgcggtccttcttggtgaatcggccggagagtccctcggcgggcgtggccagtacggaatagttgtggcggtagttttcagaataggtgttcactttctcgcgcatgtggcttacgatgcggaggccgagttgctgagcctcgtcgctctcgccgtgatgcttgcctgtcaaggctatcagacattcggcaagtccgatgaatccgatgccgagcgtaccctggttgatgacgctctcgatgctgtcgttgggcttcaggccctcggtgtgattccacaacacgcgcatcagcaacgggaactgcttggcgaatgcggtcttctggaactgatagcgctcgtcaagctgacgagccgtcagatccatcacctcgtcaagacgctcgaagaatttggcgatacgctcctccttgtcctcgatacccatctgctcgatggcgatgcgcacaatgttgatggtagtgaacgacaggttgccacggcctatggaggtcttttcgccgaaacggttctcgaacacacgtgtgcggcatcccatagtggccacctcgtgctcgaagcggcgcgggtcgttggcatcccaggcctcgtcacggttgaaggtagcgtctaagttcaggaagttggggaagaagcggcgagccgacaccttacatgccaatttatacaggtcgtagttgggatcttcgggcaggtagctcactcccctctttttcttccatatctgtatagggaagattgcggtggaaccatggccgacgccctcgtatgtggacttcagcaactcgcggatcacgcaacggccctcggccgaggtatcggtgccgtagttgatgctggagaacaccacctgattgccgccgcgcgaatggatggtattcatgttgtgtatgaacgcctccatcgactggtgcacgcggtccacggtcttgttgatggcgtgctggcgcaggcgttcgtcaccctccaggccgtcaagttccaccttcaggtaatcctttatctcggaattctgcagatgcgacaggtcgcggcccgtcagtttctccagattctttatttcctctatatatgagttgcgtacgaatggagccaggtagaaatcgaatgccgggatggcctgaccgccatgcatctcgttctgtgcggtctccaggctgatgcaggccaatacggaagcggtctctatacgtttggcgggacgggactcgccatgacccaccacgaaaccgcgctgcagtatgcggtccagaggatgctgcacgcaggtcagcgacttggtgggataataatccttgtcgtggatatgaatcagattgtcgcgcaccgcgttgcgcacgtcgggcgacagcaggtagtcgtcgacgaacggcttggtgctttcggaagcgaacttcatcatcatgccggcgggagaatcggtgttcatgttggcgttctcgcgcgtgatgtcgttgttcttggcctcgataatctccaggaacatatcgcgggtgcgggccttgcgtgctattgaacgctggtcgcggtactggatatactttttggccacgtcctttcgggccgacttcatcagttcgacctctacgcagtcctggatctcctccacggtcatgcgctgcttgcctgcgatgccgatgcggtcggctattttctggatcagggcctcgtcctccccacgctcggtggtgagcatcgccttgcgtatggccgccttgatcttttcctcgttatatcccactacgcgcccgtcgcgcttctcgactatctgtatcatgctcctgggtctgtttatattttgttaactgtgtgttttgactgtcattaacggtatgcgtgttttgactgtcattaacggcatgcgtgttttgactgtcattaacggcatgcgtgttttgactgtcattaacggcatcggaatgatatcgaaatggtatctaaactgagcacatcccaattccgatacaaagttacaaaattaattctttacgacaactataaacgcctaaaaatttcaaaagattttcgttttggaaaacttttcaacctttataaatttccacatatcttattttcaaccacttacaaaatattttggacaactctattccaatcctaccatttatccgcttatattttgcacatccacccgatatccgcgacacctattatttccaccatcacccgctctttttttgctgtgccatctgtttttgttccagcccgaagctttagcgacggcatctgtctcccattaccagcacttcttatcagtcgggcccaccctctttattttactgcgttgaaccgatgccatatttgggcattacgtcataattatataagcatccaacattaaaagacaggagagaaatcatttgatttccctcctcagatgttttcacaacggaataatccttattgtgatttgctttagtttatttttgcgtcacaaatttatatcaaaaaaacgaattattcaaataatagtgcaaaaaattgttttcatgaacttattttattagttttgtaatcaaaactgcaatttataattataaattatatagtcatcatgaaaatactcggacttgacctcggaacagcatcaataggttggagtgtaattgatatatcagacaaagattccaatgtcattcaacttttgggattaggcagccgcattattcaatacgaaaacaatgaggcttctgatttttcagccggaaagggtgagacgccctgttcgcaacgtaccgcaagaagaaccgcgcgtaaaatgcttgatagataccagcaacgtcgggaatctctcagatcattccttatagaactcggaatggtggataaatcagaagtctttccgcctctgaatccacttgagacctggaaactccggagcgatgcgtctactcccggcatacaactttctaaatcagacatcgcacgtgttttgttgcatctaaataagcgcagaggttatcgccatgcaaagtccgacatgggtgattccaaacagacagaatacgtaacacgcgtaaacaatcgatactccgaaatcaaagccttaaatcagactatcggtcaatttttctacaacaagttgaaagaatccgaggcagaaagtagtcgaggcaagaaacaatacacatataggataaaagaagaagtattccctcgagaggcgtatgctcaggaatttgatgccatcataaatgctcagaaggaattctatcccgaaatccttactgatgagaatatcacaaagttgaagaatctcatattctttcaacgtccgcttaaatcgtgcaagcaccttgtatcctactgcgattttgaaaagcgaacctttaaaaattccgcaggtaaagaagtggatagcggaccgaaggtaacacctaagtcatcgccattagcacaggtttgcaaattgtacgaatcgattaataacattcgtctggtaaatccacgtctaaaaggaaggaaaattgtgcaaccgtcattgttcgacgggatggatacaacgccaacagacgtgagaaagttacagtatgaattcccgattaatcctgaggaaagactgcggatattcgattatctaaataccaacgacagactatcggaaagcaaactcctcggcctattaggtctgaagcaggctgacggatttaaatcagatcaagctcttgctaaaggcatacaagggaataagacgtattgcgccattgccaaagcattggctgattaccccgggaaagaggaactactgaagttcaaggtcaagataaccgataaggtcgacaaaaatacaggtgctttagaacctgtaatcgatctgtcgtatcttgacgagccgctttatcagctatggcatacactatactccatcaaagacaaaaaagaactgtttgattgtctttctcgaaaattcaatatctcagatgctgagactcttgagaagctgtatgccatagacttcgtaaaagatgggtatgccaataaatccgcaaagtttattcgacgtatcctccctcatctcatggagggtaatggctatagtaaagcttgcgagctgtgcggggtgaatcattccggctccatgactgcagaggagaacaatgcccgcacacttaagcctcgtcttgacaggcttaacaaaggagaactccgccagcctattgtagagaaaatcatcaatcagaccattaatctgactaatgctgtgacagaccgttttggcgaaatcgatgaggtacgcatagaacttgcccgggaactgaaacagaataaagaagatagagcggaaactacgacaagaatcaacaagcaggagaaagagaatcagaaattcgccgacatgatagcggaactcaacatctctcctacccgtcgccgtatacagaagatgcggatgcttcaggagaccgggaataaatgtatatattgcggtgctgtggttactccatctcaatttatcgaaggtcatggatacgagatagaacacatcatacctcgctcccgcttattcgatgacagtttctccaacaaggtatgctcatgtcgtgagtgtaacaaggctaagggtgcgctcaccggttatgatttcatgaaaaccaagagtgattccgaattcaatgcatatctcgaccgtgttgaggaactttataagaatgggaagatctcaaagactaagcgcaacaatcttaagatgtcttcctcggaaattccttcggattttatagagagggatctgcgcgaaagccagtatatcgccaagaaagcacgtgagattctctcccaaatgttcagaaatgtctatgcttcatccggggctgtaacaagtttcttccgtcatgtgtgggggtatgacaacgtgctgcatgacctaaatctgcccaaataccgcaatgcagatcttgttgaagaagttgaatacactacccatgcccagacacatacgacagaacgaatcaaggactggacaaaacgaatggatcatcgccatcatgccatagacgctcttgtaatagcacttacgcgacagggatacattcagcgacttaataccctgaatgcagattcggataagtcagcttcagataaggtgaatctggataagtgggcgtcggcacaacctcatatatctgtcaaggaagtgcaggatgctgtcaataacatctcggtttccttcaaacccggtaaaaaacttgccactcccggcaagagatatgtaaagcgtaacgggaagcgcaaatgtgtccaaaaaggcattcttgttcctcgtgctgccctcaccaaagattccgtttacggaaaaattaaggttccaatcggtaagaagaatctgaaacatatattcaacaatcctgatgccatagtggataacaatatcagaactgcagttttgaatctactgaaagaaagcgacggaaatattagtaagatcttgaaacaacttaagaagtctcctttggttgtcaatggacatacagtagaacaggctgattgctacggagaggagtttgttatcaaatatccgattgaaagcataaaaaagcaatcggatatcaacagtattgttgatttatccatccgccgtaagttccaggagcgttttgacgaagttggagagaaggatttcgttaaaagtctgattgaaaattcgatttgctcggatgagaatgggaagtgtgcgatacgtaatgtcagatgctttacaggacttaaagcagatacgttggcatgcgtcaagaaaactctaaccggaaaagaaatcggtttctctcaaaccagaaacaatcaccatcttgcattctatcagaatccggatggaaagattactgagtctgttgtatcgttctgggatggcatcaagaggaaacgctatgggattcctgtaatcataaccgatccggcttcggtatgggatatgattgcgaatatggaagacaattccgatattcaggagattataaccaaattgccgccacatgactctcagtttgtcatgagcctacagagaaatgagatgatagtgcttggactgagtgaagatgaatggaacgacgccatcgcatctcggaatcattctgctatcaacaggcacctatatcgagtgtggaaattgtcaccaaataattatagtttcaagttccatacagatactacagccaaaatcaatgaaggagataaggagatgaaaatgttttataatacccaatccataagctctttcttagcccttaatcctcataagatcagcatttcacaactcggagagatagacttcgacaatatgtcgtaatatgataaagaagacattggtattctctaagaaagcttatctatctttaaaattaaagcaactggtaataaagagggagaatgagcttacaggtgaggaagaagtcataactcgtccgattgaagatatcggaattatgatgatagagagtggtcaggtcactctcacatcatctcttgtttcggaactgatacagaataatataggagtcattttctgcgactctaaacacatgccggcaaatatgattcttcctcttgaagcccatacacttcaatcggagaagtctatcgctcagattcaagcatcactaccattgaagaagcaattatggcagcagacagtatcggcaaaaattctgaatcaaggggctgttctacgccaggtaactggactgaatatcgggaatatgattaaatgggcgtcaagtgtaagaagtggagatccggaaaatcttgaaggaagggctgcagcttattattggcggaatatgttcatggaatcaggcagattcaggagagataaggacggagaagatgacatcaacatttttctaaattatggatacgccatattacgagcaatcattgcacgtagtatcgtggggagtggtctgacgcctttaatcggaatccatcattccaataaatataatgccaactgcctcgctgatgatattatggaaccatataggccgtatgtcgatttacttgtcgcggatatggtgttgaaacagaatctgaataatggcttggacaaagaagccaagaaaacgttactgacaattcctaatttggatgtgagtttcggaaaaatccgacgtcctctgctcgtggcggcatccataacaacatcttctcttgcaaaatgtttctcaaaagaaagcaggaaggtgatctatccgagaatcccgatttaatagttaatccatcgcaatatggcgcattatgtttcctacgacagaattagttcttatcaactcatgtggatattaatcatgtttgacctccctacggaaacaaagatgcaacgaaaggatgcctcggattttcgtaaatatttgatctccgatggcttcacgatgtttcagtattccatatatgtcagaaactgcgcctccagagaaaatacagatgttcatgtaaacagaataaaaaaacagatacccaatgagggtaaggtatgtatcattacaataaccgaacgccagtttagagagatcttgctatttgaaggaacgaagaaaagcacgccacttccggatgccatccaacttgaactattctgatatagcagagtatgatttctaaaagatagaagatatctctaataatgtggagaatgctattctcctacagaaaataaaaacgctccaatttaaaggagcgtttttttattctacgaatcactataccactgtgaatatcaatacaatacacgcattgtgatgtgattcgtagtgcaaaaataataaatctaaagcaaatcacaacactcctcttggtcagtctaatattgctaatgatgtgattcgtagtgcaaaaataataaatctaaagcaaatcacaaccttatgtcgtcgtcaacgttacaggcgcacgatgtgattcgtagtgcaaaaataataaatctaaagcaaatcacaacaggggctggagctgggagacgaattaacaagatgtgattcgtagtgcaaaaataataaatctaaagcaaatcacaacgaggaggtgacgctggtcatgcaaagtctagatgtgattcgtagtgcaaaaataataaatctaaagcaaatcacaacgctgattcaccagtactttcgtttgttgcagatgtgattcgtagtgcaaaaataataaatctaaagcaaatcacaaccggggccagctctttaacggtggctattaagatgtgattcgtagtgcaaaaataataaatctaaagcaaatcacaactaatcagatccatagcaaaatgctacaatagatgtgattcgtagtgcaaaaataataaatctaaagcaaatcacaacgatggcgaggacggtttccacaaaaagtacgatgtgattcgtagtgcaaaaataataaatctaaagcaaatcacaacttacggcatcatacaccaacgacagctcctgatgtgattcgtagtgcaaaaataataaatctaaagcaaatcacaacaagcacgagattctcaatttcataaccaatgatgtgattcgtagtgcaaaaataataaatctaaagcaaatcacaacggggaccaacggatagatggccgtatcgtcgatgtgattcgtagtgcataaataatagaactatttccttgattccgtctttgccatgaatcgtaatataaaaattgatcttgtttacatctatcagctacttgtggaatgcggtgtattaattagctgttgtcaaagtaatagccgcttctcaagcattactcttccacgttggccaaaacctcgcagtcgcagtatcctcctttggattgaagccacgccacggcattgtctatattccggactccatgattcctgagataggatatggtcagacgcaaatcattattacattcttctatacttaacgcctcgtcaagatagtcaaacaactctttcaggacctttctgtcgatgggtattagttcgggttccggctcaataggaatattattattaggatcagcacctgttgccattccgattttatcaatgaattccgataccgacacctcctttcctcgcctatttctcataggcgacacaagtattatgttcaccttacgctttttcaacaccggatatatctccgacatgaagtcttcatacgacattggagtcgggattgtatcttcccagccgtctgtacactcataccgagcatggatttcctcagcccagacacaaaactttttaggtctaccctcggaaatgggataagacccgtcggaagccttcaatacccatatcgttttattatcctttatggtctggacagaatacttgaaccgtcccatccagtcaaatttttgcagaaattcttcaggtgtcatatcttgatgttttataaatgcctaaattctccgataaaattaatgattgaatttcatttatacaaattcatttttgtaaattcaagtatttcgagattagacttttggctatgtcaattattcttagtacttttgtgtatgagaagattacataaaatattagcaatatgtgccgtattggcatattgcggaaacctcggtgctcaaaacaagtttcagtatataagagatcagttattccaagattcgatatatgcaatatgggaattatctgcgagtaaggatgatgccaaatatttcattccgaaaattaaacaggatttaaaatcgggcaaagccaatctgatgctgcagggaagcatagcccctgtagtctatccgggtaaacgagaaaagttcaaagccaaatatggcataggatggatggatttcggatgtgttgtggaatgttccgaacggcagatggtcaaggtcaacactgccatcatggattacctgacagggagtttcggcaatgaatggaaaaaggacatccgtccagatatcccgggaattgacaaatacggcacaaaggctttcaataatataatatacggtaaaacaggcaccgcgactgtggtggtaccggcagtttttaagtccaccggaactgccgggactgctaccaggactcttgacacccagaatgtttcagtagtcaagaatcttacaggtagtgacccaactatatcaatacaatttttgtacagaggaatcgaatacagtttccccatatcatgtgatgtgcaaatcacaaagcaaccaacggaaaacgaactcataggattaatcatagagatgtttaatccccaaaagttcggatattcatccgacatcagaccctatccctacggcgtggtgaaagccatatatttcatgagataacttattattagtttcgcaagattcgtagtttatttgttcaggaaaaagttgtaactttgcagcatccttggaaggagacgccgagatagtcttgcagccctcgacaggacaagtaatgttcatatattattatgagttggataatcctaatacttgccgggctgatggaggttgccttcaccttctgcctcggcaaaaccaggacggccaccggccatgagctgacgggctggtgggtcggtttcgtagtggcgttggcactgagcatgttcctgatggccaaggcctcgcaaaagattcctatcggcacggtctatccagtctggaccggcatcggagccgtaggcgcggtgctggtcggcatattcttcttcaacgagccggccacattctggcgcatattcttcatcaccacccttatcctatccattatcggcctgaaggtcttaggatgattacagacacaatgcacaatgggtaaaaaaagctattaatcagcttgcataattcagatttattgcgtatatttgtgtcaaaatattatctgtattatggcgcaaaatggaattaatgataacatattatcattattagatagctatacactcgataatcctgatgatattgcaaagcaggtagccgagaatttccgcaaacgacgtgtagaaaggaatatcacacggcaacatatagccgagcggtcaggagtacccatttctacggtggcccgttttgaacgtaccggtcttattgcctttgagtcgcttataaagcttgccatggcattaggttacatagccgacatcagaaatttgttcagcacggcaaaattcaacaccatgcaggaacttgagctgatccgccgcaaaaaagatgacaaacgcgcttatcccattaagaaatgacacataccgataaactgcaagtcctgtttcgcgggcgacgtgtcggaacgttgtcgctcactcccgacaaccgtctcaacgtatttgaatacgactccgcatggatagccgatggattcagcatatctccacttgagctgccgttgcagcccggtgtctttgtagcgaagccccagccgtttaaaggcaatttcggaattttcgaagacagtctgcccgatggatatggtcgatatctgctgcataagacacttatgcgtcagggtatcaacgattccgatctttcctcgcttgaccggctcgccattgtaggagacaacggaatgggtgctctaacttacaatcctgccataactctggaagcagaagaatcaatagccgatttcgacaaactccagcagatggcccttgaagtacttaaggaacaacaggacaacgatgccggattgttgctgtataacagcggcaatagcggaggtgcgcgtcccaaagctgtattttccgactcggagggacattggattgtaaaattccggcatatctatgaccccaaagacatcgggagacaggaatatctgtataattacactgcccgcagatgcggcatcattgtcccggactttaagctaatcaacgacaagtatttcgcatcgcgcagatttgatatagatttaaataccaacaggttacatacagccaccgccggtgctctgctggggctttcactcagtcagcccttcatggactatgccaatctgcttgccctcactggctatgtgacccaacgcctggacgatgttgagcagatgtaccgccgtatgctattcaattacttcactgacaataaagacgaccattgtaagaatttcagtttttacgtaattccggatgacgataactgtaattggcagtggaggctcgcgcctgcatacgaccttacattatgcaccgatggatataacggggagcatgctacctccgtcaatggcacaggacatcctaaattatccgatttcatagcagtaggcactaaaatccgattgcccgaaaaacgctgtcttaatatcatcgacgaagtcctgtcaggatgccgcgatctactccgctataagatatagtcactattacttatttggtggattggcatgaattttgtaaatttgtagcaacaagagtttgaggccccggtatggggcgactggctctataagacgtcttatcaatgaaatttacaagattcgcaaaaatcacaaacgttgcgggtgtgatggcgctgtgcgctctccagtcgttcggctggagtcagaaaggacatgacaccgtggcattcatagccgaaaaccacctgacaccggccgccaaggctgcggtcgactcgttgcttgacggtaaatcgatagtttactggtccaactggctggacaatgcgtcgcatacgcccgagtatgcctacagcaagacctggcattacaagaacatcgatgccgaccagacgttccgcagcgctcccctgctgccgagcggtgacatagtgcgcgccatcaacgagcaggtggccgttttggccgataccaacatggatgacagccggcgtgccctggcgcttaaaattgtaacccacctccttggcgacatccatcagcccatgcacttaggccacgcatcggaccgtggcggcaactcctggaccgtgaagtacttcaaacagcctacaaatctgcactcgctatgggattcgcgcctggtggagtccggccacaagtggagctacaccgagtggcagcagcagatagaccgcgccactcccgcagagatcgaggtgatactcaccgatgcttatcccgaacactgggccgaggaaacgtacgagatatgcaagcaggtgtacgacgcaacgccccatgacaccaacgtaagctatgactacatagctcaatggactccaacagtagagcagcaatttttgcgtggcggcttgcgtctggccgacatactcaacaccgtcttcgaccccgactacaagggccactggtcaccgttaaagaagtaaagtccggatacagataatggcagaaaatcacaaggactttccgacgttaaaccttcccccggtcacgcttaagctgcagatgggggcggacggcgtggagcgtgtatgggatccgttgcgcaagaagtacgtggcgctcactcccgaggaatgggtgcgccagcacttcgtcaactggctcattaccgaccgcaagtttcccgcctctctgctcggcaacgaggtgggcattcacctgaacgggatgtcgcgtcgctgcgacaccatcgccttcggtcgcgacaccaagccgttggtgatagtggaatacaaggctccagacgtcaagataacacaggacgtgttcgaccagattgtgcgctataatatggtgctgcatgcccaatacttagtggtgagcaatggactgaaccattactgctgccgcatggactatgccggcaacacctaccatttcataccgcgaatcccgcagtacgcggaaatcgcattacctttcagcgaacaatgacccagcaaccgactccggattacagatatctggacagactgaacgaccagcagcgcgccgccgtggaatacctcgacggcccttcgctggtgatagcaggcgccggatcgggcaagacccgcgtgctgacctacaaggtagttcaccttctgaactgcggttatcagcctcaccgcatcctggcgctgaccttcaccaacaaggcggcgcgcgagatgaaggaccgaatctcggcactggtgggacctcaggccgcccaccgcataccgatgggcaccttccattccattttcctgcgactgttgcgcaatcatgccgagctgttgggcttcaagccgtctttcagcatttacgacaccaccgactcgcgcaacctggtgaagatgataatcaaggacctgggcctgtcggacaaggactataagccggccactatcttctcgtgcatctccaatgccaagaacgccatgctcactcccgacgagtacgcgcgtcagtacggcgcccacgacatgaaggcacgcaggcccatgaccgccaagatattccagatgtacgtagaccgctgccaaatggccaacgccatggacttcgacgacatcatcttcttcatgaacaagctgttgtcggagcatcccgaggtgcgtcagcgatacgccgagcagttccgctacatactcgtcgacgagtatcaggacaccaactatgcccagcacctggtcatctcgcagttggccgctcccgacaacaagctgtgcgtagtgggcgacgacgcgcagagcatctactcgttccgtggcgccaacatcaacaacatcatcgacctggagcggttctatcccgggctgaagacattcaagctggagcgcaactaccgttccacacagaatatagtgaacgcttccggctcgctgatagagaagaacacccgtcagttggccaagaacgtgtacagcgagaacgccgagggggcgcccgtagacatagtgcagacatacagcgacctggaggaagcctcgctcgtggcggcccgcatcgcgcagagcgtgctcacggagcacgacacctacgaggactatgccgtgctgtaccgtaccaacgcccagagccgcgtactggaggaggcacttcgcaaacgttccatgccttaccgcatatacggcagcaccgctttctaccagcgcaaggaagtgaaggatgccttggcttatttccgtctcatcgtcaatcccgacgatgacgagtcgttgcgacgcatcatcaactatcccgcccgaggcatcggcgaaactacgttgaagaaagtgcgcgatacggcactttctggcaaggtcagcctatggcaggtattggctaaccccgacctctatcccctgccggtcaacagcggcacgcgtggaaaacttgaccggttcgttgagctgatgcgacagttcatgaccgacagcaccacgcacaacgcatacgaggtgggacagttagtgtacaaccgcacaggtatgctgaccatgctggcccacgagaacacgcccgaaagcatcagccgccaggaaaacctgacggagttgctgcgcagcatgaaggagttcgtggaattccgcatcgaaagcggcgaaggcgatgtgtctatgacctcgttcctcagcgaagtgatgctggccacggatcaggatcagaaagacgagcaggcaggaccgaaagttacgctgatgactgcccacgccgccaagggactggaattcaagcacgtctacatcgtgggtgtggaggaggaactgtttccctcggcaatggcgcttgaatccatgtctgaggttgaggaggaacgccgtctgctgtatgtggccatgacccgcgccaaggacacgtgtatgctcagctacgccaagtcgcgtttccgtaacggccagaccgtgatgacgtcgccaagccggttcctgagcgacatcaatccgaagttcgtcaagatggagacgtcgggaatagaggatgacttcaccaatccggtgatgaactaccgcagcagtttcggtggctacggcacttcatcgcgtagccgaagctacggatcgtcgcaatcttccgaatcgctgaatttcggcggattcgtgtctgccgcaaagctcaaggcgcgtaagaacacggatgccaaatccctggacgagatgcccacccactcgatgcaggagcttaagaaggggatgaaaatcgaacataagaagttcggaataggttctattaatgacttcacaagcgtttccggactcgaaggcattgtcgtggaattcgagaacgtgggcgtgaaacgactgttgttgcaatttgccaagttcaatataatcgatgattgatacaccatattacatagtatatgaagacaggctccgggccaatctggagaaactgaaacgggtagccgaagccgcggacgtcaagatcataatggcgttcaaggccaacgcgctgtggaagacattcccggtgataaaagaatatttccacagctccacggccagctcgctcaacgagatgaagctgtcgctg

SEQ ID NO: 3051 - DNA, 23702 bp, synthetic construct
  source 1..23702: mol_type = other DNA
  misc_feature 1..23702: note = Synthetic
gccatgctgataaacggcgaaccggcaattgcagcatatgccaatgtccgcaaagactcgacagcaggaatgacccctgacagtataggagtgcgcctgacggaattcccgttgaaactcgccaatcctttccttgacaacatggcgactctttctggaaacctcaacggagaaatgaggatggacggaactttctcaaaaccgatatttaacgggaacatctcatttgcggatgcttcggtctatatccccatggcaggatgcaagcttagtttcgacactgtcccggtgacagtgcggagcagtgtcatagatttcgacaaattcgatatctacggggcaaatgacaatcccttgactattgatggctctgtaaacgcccaatcgttaggcaacatacttcttgacctcgggattactgccggcaattgccagctcgtgaagagcgacagccgttcgaaagcagaccttttcggaaaactgttcataaatctcgacggcactgtcaaaggttccacaaaccttatggatataaaagccaagctgaatattctcggcacatccgatgtgacatatcgtcttaacacagtgcaatcggggctatcgggcggtacgaccgatgacgttgtcaaattcgtgaatttcaatgacaccactcaggttgccggtgcggattccgtagcaccgacatcgaccatgcgaatcagagccggactgacaatatctcccggaacgcaggcgacggtgctgctttccaccagtagccgggaccgcgtgcagctgcagccctccggtactcttaactatttccagaactacatgggtgacatgcgtctcaacggagtcctgacgctgggcaacggttttgcccgctacagccttccgctggtgggtgagaagacattcacattcaagccatcgagccatgtgacctgggcaggagacataatgaatccgaaacttgacatagtagccacagacaatatcaagactaacgtgacggaagggtcaggcagcaggctggtcaatttcctcgtgacactgatggcgggaggaaatctcaatgctccgaaaatcagttttgacatgtcgaccgaggatgacgcgagcatcaagaacgaactgcagtcgatgagcgcagaccaaaggcagacaacggcaatgaatcttgtccttaccggtcattatacgggttcaggcaccaagatgggcacaccaggtttcagcacaggtatgctgtacggttatctggcatccaccatcaacaactgggcggcgcagaatattcgcggcgtagatctctctttcggtgtagaccagtacgacaggacacaggacggttctaacagcacgcagatgagctacagctaccaggtgtcgaaatcccttttcaacaacaggttcaagatccaggtcggaggaaattattccacagacgcctccgccgacgagaatctcagccagaaccttataagcgacatttccgccgaatacatactcaagcagacggaaaccgtgaatatgtcggtaaaactgttccggcataccggattcgagagtattctcgaaggagagatcaccgagacgggagccggattcgtgatgaaacgcaagcttaacaatctgcttcatcttttccggataaggcacggacggaaaaaagagaatcccgacacaaccgccgtcggcgacacaatcttgcgtgaggataaggatacggccgcaaccggcaatgtaaagatcagaaaagaggatgatgatgaataagaagaaaacatatatgaaaaatataaagccgatgcatattcctgttctgacggctcttgtactggtcttcatcgtttcgggatgctccaccacatcgaaacttgaggatggcgagatactgtataacggaatgaaacttaatgtctctcccgccgccggagacaaggctccgggggagatggtgtcagacatgcagaaagccgtaaatgtgagacccaacaatccctggccgttcatatctccctatatccgcaatcctttccccataggactgtgggcttacaaccacatgaacgactcagccaaggggttaaaaggatggatatacaaaaaacttgccgagcagcccgtcctcgtgagtgacgcccgtccggaagtgcgtgtcaagatgcttgaatccatactcgacaacaacggctatttcggttcaagagtgtcttattccctgaaaagcggaaagaatccgaaaaaggcgaaggttatatatgacgcaaaacttcctgaaccatatctgatcgacagtatacagtacataaacgacggaacaaaactcggatttctcatagacacgatctccaagcggagcaaatatctggtcaaaggtgaacgtttctgtgtggattcacttgaggttgtgcgcacaaagatcgccaatacactccgaaatcttggatattattatttcagacccgaatatatagagtatcttgccgacagccttataacaccgcatgcggtggcattgcgcgtatctcttgccgataatgttccggagctcgcacgccggcaatacagggtaggggatgtgtatacctacgtgctcagacgaagcacaaagaatccgggcgttcccgacaccatcgagaccgacaagggaaagcttattgtgtatcgtcctgcaaagctgcgaaagaatgtgataccctcttgcataacattccgcaaagggcgcatcttctcggtgtggaacatggaccgcacgcaggaaagactctctcgtctcggcatgttcagtaatatccagatgcaggcggtgcctgcagacacgtcatcggtcgatccccgtcttgatttgtacataacatgccagttcgaccgcccgatggaagctacgcttgaagccaatgtggcatataaatccaattcttatcttggtcccggtcttgtgctcggagtcaccaacaacaacactttcggcggaggggagaaactatcggtgcagttcaatgccaattatgaatggcagacgggacgcaaccgcggaagcatcttcaacagttacgaattcggtgtcaccggttctctcgccttcccgcgacttctggctccacggttcatacgccgcaccgacagagagctgaactggaccacaatctctcttggaatggatatcatgaaccgtccgcattatttcaaattagctgatttccatgccggaatcaactatgaatggcatccgtcgcgcaatgtcctcaaccagtttacactgttcaaactcacctacaacaagctcatgcacaccacagaggcgtttgactcggtaatggcagcgaatccggctgtggcactgagcttccagagccagtatattcctcagatgagctacacttacacgctcgacaagtttctcgaacgggaaaaaatcaacggaatcaatttcaccgccaccgtgactgaggcgggcaacgtgtttgacggcatctacagcctttgcggagtgaaaggggagaagcatcttttcggcacacccttctctcagtttgtcaaaggacaggcgcagcttgtgtatagccggcgtcttgtcagaggcacagaccaatggctcgtatcgcgagtcctcataggtgccgcgcatgcatacggcaattcaaaggtagtgccttattccgagcagttttatataggaggggcaaactctataagggctttcaccgtgaggtcgctcggaccgggaagttaccgcccgccaacaaacatgcagaacgggtatttcgaccagacaggaacattcaaactggaattgaacaccgaataccggttcccgatagtcagtatcttgcacggtgccgtattcctggatgccggcaatatctggcttctcgagaatgatccggcacgccccggaggcaaactgtgcggcaagacttttttgcgggatctcgcgctcggcaccggagtcggactgcgagtcgacatcgggatgcttgtgcttcgcggtgatctcggctatggtctccacgccccgtattacaacggcacgaaccattatttcaacatcgccttcaagaaggcattcgccttccatctggcaatcggctatcctttctgacagggtggcagggttgcctgagataggtttcgataatgtgcgcaaaggggtagtaaacgtgtatccggacgtgtaacacgtgtaacaagaatgaatcacgtgaaataaattatgttttataacatgaagtaggggatttttttgtaattttgcagactgaaacaaacaaaggtatgcagaatataagaaatatcgcgataatcgcgcatgtcgaccatggcaaaacgacacttgtagacaagatgctccttgccggtcatctcttcagagagaaccagaatgccggagagttaattctcgacaataacgatctggagcgcgagcgcggcataacaatcctttctaaaaacgtatcaatcaattataagggcacgaagatcaatatcatagacactcccggacacgcggatttcggaggtgaggtggagcgtgtgctcaatatggcagacggctgtctgctgcttgtagatgcattcgagggaccgatgccccagactcgtttcgtgctgcagaaagctattcagatgggtctgaagccggttgttgtggtaaacaaggttgacaagccgaactgtcgtcccgatgaagtgaatgaaatggttttcgacctgatgttcaatctcgacgctacggaagaccagcttgattttcctacgatatacggttcggcgaagcagaactggatgtcggcggactggcgtgagcctaaagaggacatcaccgcggtgcttgatgcgataatcgacaatatcccggctcccacacagcttgagggcgatccgcagatgctcatcacaagtcttgacttcagcaattatgtgggacgtatcgcagtgggacgcgtgcacagaggcgcaatccgcgaagggcaggaactcggtctctgcaagaaagacggcacagtgacgcgccagcgggtcaaagaactccacacgttcgaaggcatggggcgcaagaaggttcaggaagtgtcaagcggcgacatctgcgccattgtaggtcttgacaacttcgagatcggcgacaccctcactctttttgacaatccggaaccgctgccgcgtatcgcaatcgacgagcctactatgtcgatgacatttgcaatcaatgactcgccgtttttcggtaaagacggcaaattcgtgacatcacgccatatcaacgaccgtcttgagaaagagcttgacagaaaccttgcgctaagagtggagaaaagcgtgaatgaagacaaatggactgtgttcggacgcggagtgctgcatctttctattctgatagagacgatgcgccgcgagggatatgagctgcaggtcggtcagccgcaggtcatcatccgggaaatcgatggcaagaaatgcgagccgatcgaggcattgtcaatcaacgttcctgaagaatattcatcgaaggtcgtggatatggtcacccgccgcaagggggatatcatatcgatggatacccgcaacgaccgcatagacatcgaattccatataccctcgcgcggcatcatcggcttgcgcaacaatgtgcttaccgctacagccggagaagccatcatggctcaccgtttccttgagtatcagccgtggaagggtgatatagagcgtcgcacaaacggttctctgatagcgatggaggcgggcacagcctacgcctacgccatcgacaagcttcaggaccgcggccgtttcttcattttcccgcaggaagatgtgtatgccggtcaggtcgtgggcgagaacgccaaagagaacgacattgtagtcaacgtcacgaagtcgaagaaacttacaaacatgcgtgcgtcgggtgctgacgacaaggctcgcatcgttcctccggttgtcttctctcttgaggaggcactcgaatatatcaaggaagatgagtatgttgaggtaacccccaaccatatccgtctgagaaaggttattcttgatgagaacgagcgtaagcgtgcaagccgcagttgaaccataggcagatacgagacgttataaagacaggaaaggcgttcggctccggtaggcgcgaagcccctttgagagaacgtctcgttataaatataaattaaaaaagacctcgggagtgttcctgaggtcttcgttttcccggtccatctgaaaaaaagcgccctttataagaaccatgaatgaccgggtgtgggtgtctgtgattatccgttggcagtgcctatgagatcattgaacgtacctatagagaagagccaccatatgaggataaagatcagtataagtatgccgagccacaaccagagacggttggtttttcttgtactattgtttttccgtatcttgccattggctttgagaccttcggccatgggattgacatagccttcgcgtgcttcacgaatctctcttttgagttcggattcgttttccctgatgtgtttttccttcgtatccataaccttaacgatttctgtttatttactaaataaacaacaggggtatgtaaaaagtttttataaactgtttaaaattcccggataatccagttaaggttgagcatcagcgttgaagctgatttgtgaggcatcgcataggagacgccgaagccgaagcttcgcacgcgtatgccgccgccaagggtgaatcctgacagaaaattccgttgatatgccgacatgtccgttctcgtcttgtagttatatcctatgccgagatagaagcgttcggatggagaatattgcagaccgaacacaagatgcctgaacagatccgagaaaaagcctgattttatctcctgtctcttttccgtatcgtttttgtcgtgtgaataatagggaagtttccagcgtgtcagatgccaggcgtttatagagatctggaaaggagacgatccgattgtctgcatgtaaccgagacggaaatcaaacggcaggcggttatattccgagtcgaaacgttttatctgtcctcccatattggtgagtacggcggaaaaagagaggtctttctcctcgttataatagtttatgcccagatccacagccattgcgaatgcattgtactgctcgtaattgctgtatatcatgcggtagtttatgccgccacggagtctgtcggtgatgtcatgtgaatatgaaccttcaaacacgatgtcggcaggagtgaaagatccagtggctgttccgtcgggcatgtatccgtcgaacgcaccatagttgagataacgaatgcctgccgcccatgctccgcgctctcctgccggcatcccgaaacgagcaccgccgaaatttccggaaccgatatagtgcatatatgaaacggcagcctgcgttccgatttccggacccagcagagccggattctggtcaacgagcatgatgtcattgtcgattatcgcgctgtttaccccgcccagagcgtgcacatgtgaagataccggtatgtcaagaaagccataaccggaagacgtcagctgggctcctgccgtaaaagacagtcccgaagcaatcagtgcggtagcgtatattttcagtttgtccgcggatttcatctttctattaacgtcaaaaccctctttcttcgtataatcttccgccatatttaccgatgaaacggctttcggtgtctcgttacgggatgtccggatgctgaacagcgtttcatgatatgccgcgtctccggcatacgtttaaaaattattaacgatatttaagtgtatggcggttgatttattgaatctaacattttaaatttgcatccgaataatatacatttcacgcaaatttaaactgaatgacacgaatccatctatatatatcgcttttgtttggttttatatcgctgatgtgggcgggagaatgcaatgcgcagacatgccgtgtcaaggctggcaacggtgcctccggagccaaagtctacatggaggtgtacgaatatgattatgtgaaaaaaaaaccgagttttcccggcggtgacgccaagcttgtggcatttataaatgaaaacaggcagtatcctgccgaggcatataaaaaagggatacagggcagggttacatgttcgtttgttgtcaataccgatggttccgtaagccatatctccattctcaaaggtgtggagcattcccttaaccaggaggcgataaggattatgagcaagatgccggaatggactccgggcatgcacgaagggcaacttgtgcctgtcagggtaatctggtcggtgcctttcagaaaatgacagttgccgcagacacaggcacggatgaatatgccaaccggataacagatacggcggagttttaaaactccgccgtatctgttatccggttggcatgcaggatagtcatcctgcatactttgattgtttcagactaaagtgataacgatgtcttcgtcattctgggcgattacaatctttccttcgcgtccgagccagccgagggctgccatgatttcatctttcttgagcttggtcgctttctttacggctttgaaaccaagcatgcgggtatcagacgagtcaagtgccttatacacctcgcctgcccatgttccaattgattcaatgttcatttcctcttataatttaaattagtgttttacgattgcaaagttggctaatttttgtcaaactgcaaaatttataacgtttttgacggtcaatttatcttaatttgctatatttttaacaacctattgactgaaattgttaagaaataagttaattttgtgttatgaaatcaaaaaatagagatgtttcttcaattataaaaggagagggaacagtgatcaggaacacaggttcttcctatgtggtcaggctcgattccggcgaggagacttcctgccgggtgaaaggcaatttcaggatcaggggtatacggaccacaaaccccgttgccgtaggggatcgcgtcacagtagcgggttcggcggaggatgcagattatataacagctatttctccacgtcgcaactatatcataagacgtgcgtcgaatctttcaaaggaatcccatattcttgccgctaatctcgattgcgcggctttggttgcgacattgcgtgacccgcagacccccacaaccttcatagaccgttttcttgccacagccgaggcatattccgttccggcgatgatagttctcaacaagacagacctttgggatgaagacgaccgtatgctcggtgatcttgtggcgggtctttaccgctcgatcggttatcctgtattcgaggtttccgcgcagaccggttatggtcttggatctcttgtggaagaattgagaggtaagacaacactctttgccggaaacagcggtgtgggcaagtcatccctcatcaacgcgatagtgccgggaacctgtctgaagaccggaaagatttcagacatgcaccgcaccggcatgcacaccactaccttctcggagatgatatctgttcccggcggaggagaaatcatagacattcccggtgtcaaaggattcggaaccatagactttaagcctgaggaggtgtctcatttcttccccgagatcttccgtataggatgtggatgccgttattcagactgtaaacacatcggagaaccaggttgcgcggtgattcccgccgtggagcaaagcataatctctgagagccgttacgcctcctatctatccatccttgaagaactcaatgatcccaccaaatatcgcaaaccctactgatttcagataatttatatatcatattctaaaagacaagagagaaatcttaagatttccctcttcagatgttttcacaacggaataatccttattgtgatcagcttcgaattatttttgcattacaaatttatatgcaattgttgaattgtgcaaatttttaacaaaaatattttatttcaagaaatatttttatagatttgtaacaaattataaagctttatgaaaatactcggacttgaccttggaacggcttcaataggatgggctcttatagaatgcaatgatgagcttaatggaaataatctgcttggattgggaagcagaatcatacaatatgaaaataaggaggaatccgatttcactgccggtcgcggtgagacagcatgtgcaaaacgcacggcgatgcgcacggcacgcaagttacttgaccgctatcaactcagaagggcatctttgagagagaatctgattgagcttggcatgatgaaggataatgaaaaatttccatcattgtcgccggttgaggtgtggaagctcaggagtgacgccgcttcttccggtaataagttgtcacttgctgacatagcaagagtattgttgcatcttaaccaaaagcgtggatataaacacgccaagtctgatttgaatgattcaaaacagactgaatatgtgcaaaaagttaattcacgttttgcagaaataaaggagttggggttgactgcaggtcagtatttctatagaaagctgaaagaatctgaagaaatcacggcaaaaggtaataagttttatacttatcgtattaaaaataatgtgcttccgcgtgtcgcttatactgaagagtttgatcagataatgagttcgcaacgggggttttatccagagatcttgacagaggggaatataaataacttgaaacaggcaatattctttcagcgtccattaaaatcatgcaagcacttggtttctttttgtgaatttgaaaggaagctattcaaggacctgaatgggaaggaggttgaaagtggtcctaaagttgctccgcgcacatctcctttggcgcaagtgtgtaaaatatatgaatccatcaacaatataagactatataacccaaggcataaggagcagaaaaatttgtttgatgacatctctgacgggcctcgggatgcgaagaaactgggttatgaatatgagatgaataaagaggagagggaaagggtgtttgactatcttaatactaacgaaaaacttaccgaaacaaagttgctcagtattttgggactgcaaaaatccaacggtttcaaatcggataaggctcttggcaaagggatacaaggtaatatcacttattgtaaaatagctgctgcgcttgaaggctatgaccgtaaggatgaacttttgaggtttgaactcaaggaattggatacagaattagtggatgcggacacaggagaaattatcatgaaagtgtctgatgagtatcgtgaagagccgctttataagttgtggcatacattatattccatctctgacaaaaaggaactttttcattgcctgaaatctaaatttggaatagataatgaatccgtgttggaaaagttgtatgctatagatctggtatcaccgggatattcaaacaagtcggctaaatttatgcgtaagctgattcctaatctgagacgcggttacaaatatagtgaagcttgcactcgcgtgaatgttaatcacagcgattcattgacgaaggaagaaaacaataagcgtattctgaagtcgcggttggatatcctgcccaaggggacactgcgtcagccgatagtggaaaaaataataaaccagacaataaaccttgttaatgccatactggatgaatatggagagattgacgaggttagggttgaacttgcgcgagaattgaagatgagtcgcgaagagaggactgaaatatctaacagaaacaataagcaggagagggagaataataaattgtctgagcggattgccgagatggggataatgccgtcaaggcggcgcatacagaaaatgcgtatgcttcaggaaacaggcaataaatgcgtgtactgtggaaaaactgttacaccgacgcaatttatcgagggacatggttatgaaatagagcatataatacctcgttcccgcttgtttgatgacagcttttccaataaagtgtgttcttgtcgcgaatgcaatcaggcgaagggtgcgttgactgcatatgatttcatgaagggtcgttcggagcaggattttaattcttattgcgacagggtggaaaatctttataaggataataaaatctccagaacgaaaagaaacaaactcatgatggaggcaaaagatattccccaagactttattgaacgtgatctccgggaaagtcaatatatagcgaagaagaccagagaggttttgagagaggctatacgtaacgttcatgcgtcatcgggggctgttacaagctatttcaggcatgtatggggttatgataatattcttcatgacattaatttccagaaatataaagatgccggtcagattgaatccgtgaaatatgaaagtcatggacagatacaccatagagacagaataaagaattggtcaaaaagaaaagaccatcgtcatcatgcacttgatgcgttggttattgccttgacgcgtcaaggttatattcagagactcaatacattgaacgcctcttcagaagaggagggaggtaaggataacctggacaaatgggcagcaaagcaacctcatttcagtgtggaggaagtatgcaaggctttggataatgtgtcagtttcctttaaagccggtaaaaaattgacaacaccgggtaagaggtctgttaagaagaatggcaagagggtatgtgtgcagactggaatactcgtgcccagaggtccccttacaaaagaatctgtatatggcgagattttggtatatgacgggaagaaaagcataaagcaggcactaaagatcattgaccttgttgtcaacccggaaattcgtgatatgctgaagatgcgtcttgaacaatatggtggggatgaatcaaaagtgctgaaatcactgaaaaaggatccaatgaaagttggaggtaaggaagtgtctgatatagggtgttacaggagggagattgttatgaattacgatttgtcaacttttaataaattgaaagaggcagaatcgattgtagatccgagaataaggaagattgtaaaagatcgtttcaaagaagttggcgaaaaggattttgcaaaaagtcttgtggagtctccactatattcagataagaatgtggagattaagcgtgtcaggtgctttacaggtattagtgcggaatccttggcgtgtgttcgtcatgacagtgatgggaaccctattggatattcacaaacacgaaataaccatcatgtcgctttatatcgtaatcctgacggttctatagaagaatctattgtgagtttctgggattgcatattgaggaaaagatatggtttgcctatcattattacgaacccgtctgatgcctgggataaaatttcatgtatggaggacaatgaagacatacagagattggcaaatgggtttccgccggtggattctgaattatatatgacattacgtaggaatgagatgtttgttcttgggatgtctgatgatgaatggcatgatgcagttgaatccgggaatgtttcggaaattaacaggcatctgtatcgtgtctggaaattgagttcaaataattattgttttaagtttcatacagatacaacagctaagattgaggatggagataaggaaatgaaacaatattataatgtacggtctattaacgctttttcagaattatatccgcgcaaggtaactgttactatgcttggtaacttaagatttaattagccattatgataaagaagacgttgtgtttttcaaacaaggcatacttgtctttgaaattgaatcagttagtgatcaaaactgttgatccggtttcgggttgtgaacaagttttgacgcgtccaattgaagatataggagtcttgataatagaaagtcatcaggtaactgtcacgtcagcgttgatgtcatttttgcttgacgctaatgttgcggttgtattctgtgatgacaaacacatgccttcaggtttgtttcttccgcttaatggtaacacattgcagtcggaacgtttttcgaatcagatttctgcgtcaatgcctcttaaaaaacagttatggcagcagactatttctgcaaaaatcaggaatcaagcagctgtattgaaattggtaaacaataccgaaatcggaaatatgcggaaatggtcaacattggttaaaagtggtgatactgataatcttgaaggaagggcggcagcttattattggaaaaatttatttcaatgttttcccggatttgtcaggagacaggaaggggaataccccaatgcatggttaaattatggctatgctatattgcgtgccgtgattgcacgaagtctggttggaagtggattgttaccaactttggggattcatcattccaacaagtataatgcatattgtctggctgatgatataatggagccatacagaccttatgttgatttgttggtggttgacatgatgaagaatcatgaattgtcaccggagattacgtcagcttctaagaaagtgcttttgacagttccggcattggatgtaaggttgaataacctgaacagaccgcttatggtagctgcgtcaatgacaacggcatctcttgccaaatgttattctggagagagtcgtaaacttatttatccggaacttgctttggattagattatctgttatgtttgagttatgttcatacgaaaggatcagtgcctatcagcttatgtggatattggttatgtttgatttgcctactgagacaaagtttcagcgaaagatggcatctgattttagaaagcggttgcaatcagatggctttacgatgtttcaattttctatatatgttaggaattgtgcttcgagagaaaatacgcatgttcatgttgatcgaattaaaaaatttcttccacctgaaggcaaagtttgtataatatcaataacagagcgtcaatttaacgatatattgttatttgaaggtccgaaaaaaacagatcctatgcctgctgctattcaacttgaattgttttaatatatcttgataatcaaaaacctcggtatcattaccgaggttttttgatcctatcaattcttgtaagatgcttaatattagcaatttagcaatatcgtgctgtgattgatagtgcaaaaataataaattcgaagcaaatcacaaccacacacttcctttgaagtattatgcgtttgctgtgattgatagtgcaaaaataataaattcgaagcaaatcacaacatcccacgcacacaatatgttcaaggtatagctgtgattgatagtgcaaaaataataaattcgaagcaaatcacaacctggtccagctgcgcctattgaaactgtcggctgtgattgatagtgcaaaaataataaattcgaagcaaatcacaaccatccccgaaaatgccggtaagtttcgaaagctgtgattgatagtgcaaaaataataaattcgaagcaaatcacaacaaaaatattttatcgcgcgaattaggcattgctgtgattgatagtgcaaaaataataaattcgaagcaaatcacaacaaacctcggctctccctgctcattgagagggctgtgattgatagtgcaaaaataataaattcgaagcaaatcacaacaaacgtctacgcagctttcttgttaattctgctgtgattgatagtgcaaaaataataaattcgaagcaaatcacaactttcgaataagggagatatttatcttaaagctgtgattgatagtgcaaaaataataaattcgaagcaaatcacaacatctcttctggtcaacgtatcgaaggtaatgctgtgattgatagtgcaaaaataataaattcgaagcaaatcacaacacttcgttccgtgttttatgaggagaagagctgtgattgatagtgcaaaaataataaattcgaagcaaatcacaacgcggccgaagttgctcctaacagtcacattgctgtgattgatagtgcaaaaataataaattcgaagcaaatcacaactacggtcaacagcaggacggcacgctcaaggctgtgattgatagtgcaaaaataataaattcgaagcaaatcacaacatagaatatttgttaataatcgtctgaattgctgtgattgatagtgcaaaaataataaattcgaagcaaatcacaacgttccgctgcgcctcttgatgttgtcactcgctgtgattgatagtgcaaaaataataaattcgaagcaaatcacaaccaacccttattttgcccatcttggcgaacagctgtgattgatagtgcaaaaataataaattcgaagcaaatcacaacaagagaaacaacacggagagcagtgtcagagctgtgattgatagtgcaaaaataataaattcgaagcaaatcacaacggcagagtggctgccaaagtcgagccgtcgcgcctctcgtggtttccaggcgattttgtgatgtatggcaaataaaattgtggtttcactccgttttgtttggtatgattaacgaaatttattacctttacaggcatgaagataatagcaaggcaacagtatattgagcatattcggagatttatcggcaaggggatgataatcgcccttaccggacagcgacgcgtaggcaagagttatataatccgtcaactcgtcacggagattgaagccggcaatccggatgccaatatcatatatatcaataaggaaaagacaaagtatgccgatataagaaatgcagatgatctctcgcgataccttgacagcaaactgaaagaagatgcggagaattatttgctcattgacgaagtgcaggacatagatgggtttgagaatgtcctccgtagtctgaatgctgacgaggaatgtcagattgtcgtgaccggaagtaacgccaagatgctttcgtctgagctttccacatacctcggcggtcgatatattgagattcatatcctgagtctttcataccgggagtttctgacctttcacggtcttgatgattctgatgacagtctcctgaaatatctcggattcggcggtcttcctcacctgtaccgtctcggacttgaaaacgaggatatggtatgggaatatatacagaatatctacaataccattgttttgaaagatgtagtgcaacgggaaggattgcgtaatgtgacactgtttgaaaacctgatgtcatacgtcagcgacaacgcagggcaacttgtgtcggctacgtcattgtcgaaatatctcaaatcacaacgagtggaattgaccccgttgtcggcgataaattatctgaaagcggcctcaaacgcatacatcatcaataaggtgccgagatatgacatacatggaaagcgtctgttggagacaaatgacaaatactatttcgaggacttggggctgcgcaatatgcttgccggacccaaccgtaccggcgacatggagaaagtaatagaaaacgccgtctatctacacctcaaaaatcttggatacaagatcagcgtcggaacacttcccaatggtgagattgacttcgttgccgaaaaaggcggcacatcggtctatatacaggtggcgtatctcattgctgacgacaagacaatggaacgggagttcggaaatctactgaagatacaagacaactatcccaagtatgtcatatccatgaatccgatgtcacgtcctcagaactacgaaggcataaaacatctgaccttacgacagttcctgatgtcagacaacttataaccaatggcagttcattttcggaacttttctttttcgtccaccactgtaagatccggcaaaataaggcatttcgcgttggaataaatattggactaaaaaaatccagaaaagtctaacggatagcgaataactcactgattttgggcaaatttcttttcaaaagtgggtgtatataggacttaaacaatatggagcggttcgatatcgaaccgctccatattgtttgggaatcctttttccccgacaatcgttgggattacttgccggcgatgtggtcggaaactgtgagcgaagcgcgacctttggcgcgacgacgagccaaaaccttacggccatctttggtagccattctctcgcggaagccatgtttgttgactctgcgacggttggagggttgaaaagttcttttcattttatgattattttaattttttttcggtaaagaatgtgtagttcgcattcggagtgcaaaattaactaatcattttcgaatagccaaattttaggaatcaaaaatcaggtaaaacacaaatttacgtcattttttatgttaattttccatgttgtccggcggtcagtttcggcgtgtgaaaaaaaattactaaatttgcggcataattataaacataacaacagacataaaagatatgatgaacgctcaggacatcaagaacggcacctgcatccgtctcgacggccgtctctatttctgcgtggagtttcttcacgtaaagcccggaaagggaaacacattcatgcgcacaaaactaaaagacgtggttgacggacgcgtgatcgaacgccgtttcaacatcggcgagaaacttgaagacgtacgtgtggagcgtcgtccctaccagtatctttatgccgatggcgaagacgatatcttcatgaacaacgagactttcgagcagattccaatcagcaaggatctcgtgacaggcgctgctttcatgaaagaaggtgacactgtggaggttgtaagcgattcttcaaccaataccgttctctatgcagaaatgcctatgaagacggttctcaagatcacatacacagagccaggacttaaaggcgatacggcaacaaatacactcaagccggctacagtcgagaccggtgctaccgtaagagtgcctctcttcatcaacgaaggcgagcttatcgagatcgatacccgcgacggcagctacgttggccgcgtcaaggcgtaacacctgcatagcgactcatgaaagaggcaaaggagatattgttttcaattatcgtgcctgtgtataacaggcgtgaagaggttgctgacctcctccgaagccttgaatgccagaccgacaaaggattcgagataatacttgtcgaggatggctcaacccagctttcacttcccgatggcaaaggtccggaggggctgaggctcaaatattggaaaaaatctaacgaagggcgcagcatcgcccggaattacggaatagccggagccgacggagacttttttgtctttgtcgactccgactgcattttaccccccggctatattgccggactcagaaaaagcatcgcggagaatcctgttgactgtttcggaggtccggatgccgcccatgattcattctcggatacgcagaaagcgataaattacgcaatgacctcattccttaccaccggcggtatacgcggcggcaaagtctcgatggagaaattcactccgcgcaccttcaatatgggcttctcccgcgaggtctatgaaaaggtcggtggcttccgggagatgttcagtgaagatatagacatgagtacgcgcatacgtaacgccggattcagaatctctctctatcctgatgtctatgtctatcacaaaaggcgtgtggacatgaagaaattctggaagcaggtccatgtattcggcatgtctcgaataactcttgaattgctttatcccggttccatgaagcttgtgcattggctgcccgccgtgttcacgacaggcgcggcacttcttgtcataggctcttttttctgcaaatggctattgttgcctttgttgctctatataatcgcattgtggatcggtggcattatcgccacgcgtagtctgaaaatagcctcgatgggtgtaggcgccgcgatggtgcagcttacaggttatggcagcggttttataaaggcatacttttccaagataatacttggcaaaggacgcgatgtttccaaggaaattgaaatcagaaagggaagcaatgaaggattatgattcgtcatgtccggtggcgcatacgctaaccgtcaaggagatgtcgccggatgaccagccgcgggagcgcgcgttgaagcatggttgcaaagtgcttccgacagccgatctctgggctattgtccttcgcacgggactccccggcaaacctatcacggaaatgtgcagggatctgatgcgttcctgcgacaacaagctcttcaacctcgaaagaatggagcgcggcagctttatgaaagtcaaaggaatcggcactacaaaagcccttcagatcgaagctgtcatggagcttatacgccgttattgcggcgagacggtaggaaatcgcgtgaaaatcggttgctcccgcgatgtatatgatgtaatgcgccatgaaatcggcaatcttccgcatgaggagatatgggcgatatatctgaatcgccgaaatgaaataatctcaaaagagaagatgacccgcgggagtgcggtcgcttcggtcttcgatcttaaaaagataataaaagaggcattgctgcgcgatgcgcaaggtgtgatgctgtgtcacaaccatccttcgggcaatacgatgccgagtgtggacgatgaccgtattacggagaaactccgcaaaggatgcgagtcaatggatctaaggtttctcgaccatcttataatcacggcttccggtttttattcatatcgggatcaaggcaggttctgaatcatcagtcttttgcggatacgctctgcttccggtgagttaagaaccttgttgacgctgtcgggcatcgccgtttctggcttgtatccggctttcagtagaaatttcctgaacagtattctgcgtagatgcatgtctatgtccggttcggttatgtctccgcgttccattgcggcaattatgtttttaatctcccgccgcgtgtctttgggcgcaagaataatatctgcacccgcttccacagccttgtctgcgccatatccttcggcaccaagcatgttcatggcgtctgtcagcacgagtccgtcaaatccgaggtctgttctgagcaggtctgtgattacggggcgcgatacagcagcggggagcatctgagggtcaatcgcaggaaacgcgagatgtccgatcatgattcctgacaactgttgttcgatatatctgcggaagggctggagatctacgctgtcgagactctgcagactgcggtcgatattcgctttcatgcggtgggtgtccacgcttgcggctccgtgtccgggaaaatgttttgcgacactcatcacatttccgctttccagtccgcgtgcatatgatatggagagaacagagacacgatccggatccggaccgaatgatcttctgccgatgtaggttccctctgtagtgatgtcaagcaccggaccgagaaccatgtttattcctattctgcgacactctctcgccatttctcttccgtattcgtataatgtttcctcatccgcgtcttcggaaattcttgagtttaccggaaactccggcgcgtctttcagtctcatggcgagtccccattcggcatcgatcgcgataaacggaggtgtctcgcaccagtgtgcgagagagtcggctataatcgccgccgatctcgtgtctcctttcagcagaatcagtcctcctacaccgatatgggcatattcgcgtatccgcgccagagtgtatggatcagacgaagcatagacggctggcataaaaagctgcgccgctttccgctccggattcattgtccggatgacggagtcggcgcagctgtatgcggatttggtaagatcgcttttttcgacgggtgcgatctgtttctgctcttcctgttgccgtttcgcagtgcatccgcttcccgaaagaagcagagccgttattgccggaactgcaagcaagagctttttcatgattcagttattgttacggttggttcttttcgctcagaaaccggtcgatttcaattttcacattctcaacaaatctgctttccggatccgagcttacaggaattccgagttcagtgaggtgtttgaggtatccgagcacatatacgcacatttcatgtttactctgccatagcatgcggttgtttgccatggacacaaggtcatcgttgccgtttgccacatagtcgatggttgccagtgtgtacattttttccggattcatctcctctccatcgataatcaccttctgcagatttcctttcccgtcggtgacaacgcgtatgttggcacttaccgcctcaccccccttggcggttgcgatcttaagtgcgtttataatgtccttccccttgatttctatgattgtcatatggtttgagaacgggaatgtagacaggatctgaccttctgtcacagcacctttcttcatcggctggcgtattcctccgacattcattatcgacagatctatctgcgggaaatcaccttttgccgaacggatgctgtcggctatatgtcttccgaaatccagaccgaaatcagctgtccagttcgggtaggcaccggtgcgtccgctgttcgacatatcctgtaggctccacgccacgatgttggagtttaccgaatcaacggcgtgtttgaaaggcgcaaggaaacgctcgatattcttgtcgtatgcatcgggtgagaagcggtcggtcaccgggatatactcgtaatcgaacttccggtcctttatgtcgtcaaggtcgatattgatatatcctacattacggccgtatttccctgtctgtgtcaccagcacgggcttgccgacggcattgttgatccagtatggtgtcgcttcgggagtggcggggtctacaaacgtatgtgaatgaccgccaattataatgtctatatccttgctgcggcgcgccatttccatatctgaggctttgccgggaatagcttcgtacccgatgtgtgtcacagccacaacgaggtcgcatttttctttgtcgcgcaacattgccgcagttttgttggctgtctcgatggcatcgtaatatttcattccttcgtagttctctttcgatataagactttcaggatctacatttatgccgaagaaaccgattttctttttcccgactttcttgattacatatggcttgaacagtcccctggcaggggtcttgctgaaatcgtagtttgccgagaggcatgtggcttttacatctttccaatatttggcaagttcctcaagtccgttgtcaaattcatggtttccgagaatcctgatgtcataatccatcatgttgaaaatcgggtattccacgtcacccttgaaatatttgaaatagagtgttccctgaaccatgtcgccggcatcgacgagtatcacattcttttccgccttgcgcacggagtctatgatggctttgcgcgggagtattccaccgcgtccgttattgtcgaaatcaatgtttgaatgggtgtcgttggtcgtgaggatcacaaggttttctgcggaagacgcgaatacgcctgccgtcagaaggaagagtgatataaaagctttcttcatagaattttgaaatttatgacttcgctttaagttgaaaatattagggtctttaaagactttaaagactttagggtctttagggtctttaaggactttagggactttaaggactttagggactttaaggactttagggactttaaggtctttagggtctttagggtctttaaggactttagggactttaaggactttagggtctttaaggactttaaggactttagggact

SEQ ID NO: 3052 - DNA, 16671 bp, synthetic construct
  misc_feature 1..16671: note = Synthetic
  source 1..16671: mol_type = other DNA
gcgcttgccatagatatagcccgtgagctcggctgcgagataatctcagccgactcacggcaaatctatatgggcatgcccataggcacagccactccgacggctgacgaactggccgcagcgcctcatcatttcgtagccacgttgccgctggatgcttattacagcgcggccgaatacgaggctgacgtcatggctctgctgccagagctgtggctgcggagtgattacgtggtgatgtgcggagggtcgatgatgtatattgatgcggtgactcgcggcatcgacgacatccctaccatatctgacgagacacgccggagggtattggccgaatatgacagccatggactgccccatatggtccgatggctccgtgaacttgaccccgaaggtgcggagaccgtagacctgcaaaatccgcgccgcgtcatccatgccattgaaataactctgcaaagcggcatcccggcatcacgtctgcgcacagggcagcccaagcatcgcccgtggcgcactgtcaccatggcgatagattatcccagggacgagctgtttgaccgcataaaccgccgcgttgaccgcatgatagccgaggggatggaggccgaagccgcctctctctaccctctacgccatctcaactcgctcaacactgtgggctacaaggagttatttgccatgatggacggcacgatggaccgcgacacagccatagcacgcatagccaaaaacacccgtgtgtatgcaaaaaaacagctcacctggctaaaacgccgccccgaagtccactatctcaccccttccatgccgctcctccaacaggccctcaggctaataaaacagcacgactaaaacgcagggatgcactctggtgcatccgcccatacacgattaccacacaacaatgaccgtcaaagatatagacatagcccaatttgactacgaactacccgacgaacgtatcgccaaacaccctctggcccggcgcgagcagtgtctgctgctgatgcgtgacagtgacggctcgctgtcgacacatattttcgccgagctcccctctctgctgcccgatgacgcgatgctggtttacaatgccacacgtgtcataaatgcccgtctgcgcttccgcaaacagtcctcacccaacgatggcaacacgcagggagcactgatagagatattctgccttgagcctcacagtccgcgtgactatgcagtgaacttcgcatccaccggcagctgcgagtggctatgcctcgtgggcaatagcaaaaagtggaaatcagggccgctgtcacttccgctggagattgacggccgacatgtcatactctgcgccgaaaggatagaccgcgtgggcaactcgtcggtaatccgtttcagctgggatgacccggcggccacattcgcctccatcatcagcgcagccggcgagatacccatccctccgtatctcaaccgtggcacagaggagagcgacagttcggactaccagacggtctacggccacattgacggctccgtggcagccccgacagccggactgcatttcaccgacgaagtgcttgcagggattgaccgccgcggcataccacgccatgaggtcacactgcatgtgggagccgggacattccagccggtcaagtccgacactatcggcgagcacccgatgcacaatgagttttttgcagtagaccgctccgtcattgaagccttagcacgcggcgatagccgtgtgatagccgtaggaaccacatcagtgcgtactcttgagagcctctaccacctcggctgcatgaaacatacgggtgtcagtggcgacgaagtaccgcagtggtacccctatgatccctctcatccacatctctcggccaaggaatccatggaggctctgcttcgccatcttgatgccaccggggagacatccatcgtggcatccactcgcctcatcatcgccccgggatatacaccgggcatcgtcaaggggatggttaccaatttccatcagccacgctccaccctgctgctgctcgtatcggcattcaccgatggcgactggcgcaagatgtatgactacgccctcgcaggcgactaccgtttcctgtcctacggtgacgcttgcctgattctgtaagacctataaacctatgaacctctgctacgtctccgacatcaccgcacccgggcttgccatgtttgcaggcctgaccgacacccagctgcgcaaccgtcttcaccccgaggatgccctcatcatcgttgagagccccaaagtgattctcaccgcgctctcacgcggcctcgtccccgtggcgctactctgcgaggagaagcatatcacaggcgacgcagcagcggtcatagcgcagtgccctgccgacatgcccatatatacaggtagccgagaaaccctccagaacctcaccggctaccggctgacacgcggagtgctgtgtgccatgcgccgcccatgcgagcctccggcacaagccgtctgccccgtctcgtcaggacgcatagccgtcatcgacggagtggttgacaccaccaacatcggagcaatattccgctccgcagccgccctcggcatggatgccgtattgctgacacgctcatcgtgcgacccctacaaccgccgcgccatccgcgtatccatgggctccgttttcctggtaccatgggcctggattgacggcgacgtaaacgacactctacacaccctcggctacaaaacagtctcaatggccctgcgcagcgactccgtcaccctcgacgcaaaagaactgaaacagcagccgcgcctcgccatcatcctcggcaccgaaggcgacggcctcgccgaccgcgtaatcgccaactccgacttcatagccaaaatccccatgtcccacggcgtagactccctcaacgtagccgccgcctcagccatcgccttctacgaactcacccgcccctgaccccatctcaaccccataggacataccacggcatctccatccaccatacccaatatcgcaccagcctataaatcagaaacataaaccacgaaaagcgaaagtatttccgctttctttcgctttctttcgctttctttcgctttctttcgctttctttcgcttttacatatttcaccatcctcatatcccatatatcccgaaaagtcctaactttgcaatacaaacgcaatacgcgctggccttgacccaaaatacgacacaatattttattcacatataaaggaaactccacatagcattactggtcatttccctgctaaaatggagctttctgtacgaaaacatgactgaaacccaatctgacatcaaagaatttcacctgttcgccggaataggaggaggtatatatggcggtatgttactcggacataaatgctgtgcaggcgttgaaatcaatgctttctgccagactgtcctacatcaaagacaaaaagatggatggttggaagaatttccgatctatgacgatgttacaaaattagatggttccaaattcattggctcatttgatgttttatgcggaggtttcccttgtcaagcattcagcacagctgcacacgggaaaaatatagccgaaaaaaatctttgggactatatgcttaaattcatcaaagagtcggatgctcctgtggttttcggtgaaaatgtagttttaaaagctatttcacatgcacgtgaggatttggaagcaatcggatataaagtttgctattgccgcctgtcatgcagagatttaggagctgaccaccaacgcaatagattttgggtaatggcagtaaaagatgacgaagttttttcgcggctgtcttctcatatctcatcgcttcctaaaattaaagcaagttgttgggccgaacctccagcagagacatatcctgtagatgtgcatcgccgtagggagcagctaaaaggtattggcaatgctcaatctcctttagtcgcagccgtagcctttagaatattagtcaaacgacatctcgctgcagattataactcgcttgttgtttccgagagcgaactttccgccgaatttgtatctggggaaacctggataagtcgtacatttggtgatatcggaggcctacatacccctacaactatggcgaattatgcttgcgcttcaatgatgaaacataaatcatgccaaaacttcgtcaaagtcttcggtactccacagccactgaatggagagtatctaatgggaatgccaataggcatgacatcgcctgaacatgtaaacaaaaaacaccttgaaaaatggatcaatcagacatcgtatcattagcagatgccaaatacaaaccagtagatggtggagctacctacttaggcacatattcctcaatatcatataagaaccttctcactcagcaggtatctaaccgggcgagcaaaagttggggaaaaggtgaatacataatagtcggtgcggatgatagcgattgctcagaagacgagcttcttgcaaaatggaaagaattatcaagctatggcaaccaatatctcattttgcaagtcccggatacaggatggaaagtttttaatgcaaagggagaatatctcggtaatgaggattacattgaacgttgtttcaatctcccacccgtaattagtacaacagatacggtcaacgccgactatctccgggctatgcggacaaaaccattcctcttgctggcaggtatatccggcactggcaagagccgtatcgtcaagcagatggcatttgattcttgtcctgatggaaaacttagagaggacaagacgtcacccggcaattattgccttatagaggtaaaacctaactggcacgactcaacagaacttctcggctatgagagcaaaatcggaggtgaacattatgtgcttactcctttcgtcaaattccttgcgaaggctatgctgcaccccaatataccattcttcgtatgtcttgacgaaatgaatcttgccccagtcgaacaatatttcgctgaatttctaagcgtacttgaaagtcgcaccaaacttgataacggacacatcgtttccgagccgcttatcaaggctgatatcttccataaatatccggcacttgccaaagaccttttctcccttgaagaaaagtcggattataatggaaacggcacgagcgaccccgccgcaccttacggcaaggaagctgaagtctacgaaacgctcaaacgagagggagtgcgcatccccgagaatgtcattgtaatcggcacggtaaatatggacgagacaacacatcaattttcgcgcaaggtaatcgaccgtgcaatgaccatagagatgaacctgcccgatggcaatccattcatggatttctacaataattcatcacagctcatatatcgcgaaaatcctacttcaccatcgtcctacctctctaccgaagtaaaggcttcggacgtgataaaactacttgctgctgacaatgccgagaaaaccgaatggctgaaaggtgaagtagccaagtttctcaacgacttaaatgctaatcttgacggcactccgtttaaggtggcataccgcgtccaaaacgagcttctactctatttctaccaatcatggcttgaagacaagtcagccaaatggcgcgacattctcaccagttcctgtgatcgaattctgatgatgaaagtgctccctcgcatagagggagatgaggaactgttggagcaacctcttgaaaaactacatcagttttttgaatacaacgactacaaggaatcaaaaaataaaattgtagagatgcagtctcggcttgaaaaggcgcatttcacatcattctggccgtaatcctatcatcatcatggatgttttctctttcttaagcactgatggaaacgttgccatcaatgccggcactgctgccgacatggctaactgttggcatcgtttcagcagccgtgtaagggagaaagcaatggtatattgcgactaccgtgccacacttacaggtacattgtcgctcgccttacctccagccaatccactctcgccagtcggcgaacccaattgcaccgagtggaaggatctgccaccagtattctacgaaacagccacttacaatatcgtcatacatctgaaagacgtagcaaccaagccgcaggtacttcacaagatgaaagaggtgacggaactgtttacggctctcccgataaataaagataagaccgaatggctggtttcagcaccgctgtcatttgtcaaccaacctggcatattcgaactgaaattcaaatatcaacccatcggcaggccagagcggactgatgcgttctcgtttcgcgtagtgtcacccaaacttgataccaaggacgattacaaccatatactctccgaaatcaacgcccagtacaacgaaataatctaccagtatctgactttaacgttgcagaacctgcaacgcggaggccgctcggacaatgatatagtatggctgtcaatattccgcgagatagtcgccggctatgtgagagctgtaacttacatagtcaaccgcccccacctgcggcagacacgcagcgtgtatcacgaccgtgccgaccgcatcaagcggtggacgccgcgcatggaggaacgctacgccgaaagcgacgcggagcagacgcttgatcgcgcctatttccggcacgaagaaatcatccatacccacaacaccagggagaaccgatttgtcaagttcacacttgatcgcattggcaaacgcctcggctcgattgtcgacacaatcgccgacaagagcgcaaaggtaaaagatgccgacaaggtggcagacacggagcttgcggaacttaacagccatgttgcatcgctgcgccgcctttcgcattcatccctactgcgcaacctgcgtggcgagccactgcgatcagagagtatggtgcttcaaaaacgcactggatacgctcaggtctaccgctattggctgttgctccaaaaaggcattgagctttttgaagggccaaacgctatcggcgttcgccccatctgggaactatacgaactttggtgtttcctcaagatgcgccagatggtagccgacatcctcggactgcattttgagaaccacaacgagatatatgagaatccaatgccgatggtaaaaccctttgaggacaacaaccaagagcataccgtatattatacctgcaaagacggcagcaaagtgcgtctgcactatcagcatacttataaacgagacggcaataaggcgcacacagccacaaccgaaaaccgtcccgacattgtgcttaccgtagtgcgtcccgacggcttcgaactgacatatctctttgacgcaaaatatcgcctgtatgatgacaataagctcaacaaagaagaccgcgatgaacttgccgctgccaatctcactggagccgacatgccaccctccgatgccataaatcagatgcaccgctaccgtgatgctatctattacgcctctgacagacagacccatgctgccaaagaagttattggcggctatattcttttccctggacgcggcaataacgaaagcgtacgccagcgttattactacaaaagcattgagacggtcaacatcggggcgttcccattattgcccgatgcttccgatcccacaaacgagggcacgttgctgtatgaatttctcacgaaaattctcacgatgccccacgccattgaccacatacgcgatgccgtgccgcagaaaggtttgcagtaccgctcggattttgctccttctgacgacgaacttgtcctcgtgggctattacaagaccgaccaatgggagcatatcgtcaacaaccacctctattatgttccggcagctctcggcaaaggctcgataaacctcgtatctggctttgagaaaacaaaataccttcttctccatcacgacaaagaccgtcgtctcgtcaggctcaaaggcgacggtccgaaattcttccccaaacctgcccttgaagccatcggcttctcccccaccggcgactactacctcgccttcgaaatagtgaacttcaacccagttccaggcatagatcccaacgcctacgaactcgagcgcaaaggcagacagaccaccaccccatatttcaccacatttgacaaaataagactcaaccagcacaacgaatgagcatgtggaaatacataggcgagtttatgctatttcggtggctgttcggcaatcgggatacggacaggcagcatgatgccggcagctccagctccgtggatactaacgacttctcgccttggcgcagcaactacgatgactattccgccgatgacagctactgctcctcgctcgataactttcacaacgagcaggacgactacgacatgatggacgatgactggtagggacatgccatggcatgtctgctgacgcaacactctcattagcatgactttaggcgacatgccatggcatgtccctactacatatgaacgccattcaagcatttacgcttgcttaattaaactataaaatccctcaaaaagacgtaatattcgataactatatgataatcaattcctgaatattttcgtatatattccaccttggaacaatattacaaatttcaataagtagattctcagatgtttataaacgtattacgccaaaaaatgtgattttatagattaaacagcattgcggcatgtccctacaacatatgcctacccaccatatgtcactcgccatagggggcggctgactcggctgccatggggagcggctcgctggtgggggcggtgtcggtgtaggcggcggcttgctgcttcatcagataggaatggttgatgaagtattcgatggaggcgagagtgcgggctctgactgccggcttgagctggcactcccataccgtcagtacgttccaccccatagcgcggagacggtctttctgggcttcgtcacgctccttgttgcgccgtatcttcgccgtccagaaatcggcattggacttgggcaggtgcatgtgttcctcatggccatgccagaaacagccgtgtatgaatatgacgattccgtatttacgcaacactatatcgggtgtccccggcagacgcttgacatgcttgcggtagcggtagccacgcgaccacagccaccgcctcactatcatctccggcttggtatccttgcccttgatgcgactcatgcagcgcgaccgctgctccttagtcatcatatcagccataacactgtcgtcagcatccgtaaccgtccccacaaatataacacataacatcgaaaaagagcacaccctccccaccccatccatcccgaaatcatccacacaatagacgcccggcccgaccaacctatgccccaataataaaccgcatcaaccgaagattatcttgattttcacgcagttatcccatcccgacaagatggaaacaatcccatctgtgtttagaaagcaaagtatgttaccggcatcacggatgtcggcggccagtttaagattgccattgtacttgagcgcattacttccatatgcaagctttatatattccgcaaatgagtcgcacactcctatgcgtttcttctgtaatgacttcaaaatatgcttatacccctccttgcatcggccgtccttttatttatggaatttgctccactcatcataggtttgctatcttgcatctgtgaaacagggttgtgccaagaaaacgtttaactttacaaacaagaaattcttaacagcggatgtaaaagacgagagagacaaccgcaaggtcatccctctccagatgttttcacaacggaataatccttattgtgatttgctttgattttgtttcacaaagatatatgaaaatggctgaaaatacaaatttatttataattttgtggaattaattctcaaatcatactttttgctacagcaggatgccagtatgatagcaatcatttaatagggtaaccaatcaatcagcatccccgtttactaatcttatcaatcttagccatgaaagttcttggacttgacctcgggccgacctctatcggctgggcgataatcgaaatagatgacaaagacaaccctgtctcaatcctgggcatgggcagccgcataatcccgtacggtgttgacactgcctctgacgacttttccagagggaaaggcgaaagcccttgttctgaacgaacccgttaccgccagatgagacgcaacatcgaccgattccagctgcaccgtcaacaactaaaaagcctattgctcggattaggcataatgaagactgacaccatcactccggccgccaatccattggacacatggaaattgagagcggacgccgccacgcccggaatcaaactttcgttggaacagcttgcctccgtacttctccacatcaatcacaggcgaggatacaaacacgccaaatcagatattggcgattccaaacagaccgattatgtctccaggataaatgaccgctatgcagggattaagcaatccgggaaaacagtcggccagtatttctacgacaggctcaaggagtccgaggccatcaatgacaacggaaagaagtcatacacctatcgtatcaaaggaaaggtctgccctcggaaggcatacgaagaggagacagacagaatccttgcggtccagagcgaattttacccggagatacttacagaaggcaatcggcaggcaatcaagcagactatcttctatcagagaccgctgaaatcctgcaagaatctcgtatctttctgccagtttgaacggcatgaatttctcaataaatatggagagaaggtagaaaacggtccaaaggtaactcccaggtcatcaccgctggctcaaatctgccgcatatatgaggccatcaacaatatcaggctcgtcaatgcccggcgacaatgccagaaaacggattgcacgtcttccattttcaatggtccggcctccactacgagagaggtccgcaaactgatgcctgaataccgttttaacgaagaagaatacgaacgtatttttgattttctcaatacccatgagaaaatgaccgagaaagacctgtttaaattgctgggtctcgctgctgatgacggattcaagtccgacaaggccctcggcaaagggatacagggcaatactacccgctggcagattgcaaacgcccttggcgaccaccccgacaaggagaaactgctgcgttttgaaatcgttgaagagcatccggcgtccggtccggacattgcggcctccaccggcgaaggtcttccacgcatctatccacagtatatacaccagccgctctatatgctgtggcatacgctctattctatcaaagacaaggaggagctgttcaaggtgctttcggcgaaattcgggattaacgacactccgaccctcaaccgactatacgctcttgatttcgtccaagccggctatgccaacaaatctgcaaaatttatacgcaaactgctgccgctgctcaaacgtggcatgatgtatagcaaagcctgcgccatggccggcgtgaaccacagcaacagcatgactcgggccgaaaacgaagaacgggagctgcatccaaagcttgcccagctgcgcaaaggggaactcagacagcccgtagtggaaaaaatcctcaaccagaccatcaatgtggtcaatgctatcattgatgagttcggagtaattgacgaagtccgcatcgaactcgccagggaactaaaaaaggacaaagaggggcgtgaaaaaatggcccgagacatcgccaggaatgaacgagaaaacagggctctggcagatgaaataagcggtctggaaatacagccctcacgtcggcgcatccagaaaatgaaaatgctcaaagagaccggcaatcgatgcatgtattgcggcaaacccgtgacaccgtatcagtttatcgaaggccatggttatgacatagagcatataatcccacgttccaggctgtttgatgacagtttcgcaaataaagtctgcgcatgcagggagtgcaatgctgccaaaggggctcacacagcctttgacttcatgaaatcaagaagcgagcaggatctcaattcgtatcttgaccgcgtggatgaattgtacagggccaataaaatatccaggaccaaacgtgaccggctgctgatgtctgcatccgacatacccgacgatttcatccagagagatttgcgtgagacccaatacataacccggaagtctatggagatactttcagcagccatacgcaatgtccatgcttcatctggaatggtaacggactttttcaggcatgcctggggatatgacaccatactccacgacatcaatctcccacgatatgaggctgcaggtctgactgagaatgtggaataccagtcccacggacaaaaacacatggcacacagaatcagaggctggtcaaaacgaaaggaccacaggcatcatgcacttgacgctttggtcgtggctctgacccgtcagggatatatacagcgtcttaacacccttaatgctctatctgacaaaagtgacgacggtgaaaaatggagcagccttgacagatgggctgcggaaaggccgcatatcgggcgtcagaaagtgatagaggcattggagaaggtggccgtctcgtataaaccgggcaaaaagctcactactccaggcaaacgatatgtccgcaaggatgggagacggacatgtgtccagacgggtgtgacaataccacgagctcctttacacaaggagaccgtttacggccgaataaaaattgatgacggagaaaaggacttgaaacacgcgctccagaacatcaaccttataaaggacgacggcatccgtcagcagcttgctatgcggctgcaagaaaatgacgggaacatccccttgaccataaaggctttgaagaaaaacaatctggaagtcggtggccgttcagtggaaaacgtaagatgttatcgcgaagagatagtcgtccgataccctcttgaatccatccgatataaagacctgcgctacattgtggacccacatatccgtgagattgtgcagacccggttcaccgaagtcggaaatgcagataaagactttgtaaaaagcctcaccgaacgtccgctgtactccgacaagaactgccgacatcaaatcagggccatccggctaatctcaggcttaaacccgtcgacgcttgccggcgtgcgcagagaccaatcaggcgatacaatcggatatgcccagacgcgcaacaaccaccatctggctttatacaggaatcccgacggcagtattgtggaatctgtggtcagcttctgggactgcatcaaacgaaaacaggccggactaccgccgataatcaagaatcccgccgaagcctgggacacagtcattgccaacagtgaatctgcccgtttcgcaggtattgcagacacattacctcctgatggcagtgaatttatcatgtcactccaacgcaacgaaatggtcgtgctcggcatgtcggacgatgaatggaacgacgctgtggcttccaatgatttccgcaccatcaaccgccatctttaccgggtttggaagctaagttctggaaagtactgttttaaattccacaccaacacctctgcggccatcgaggacggggacagggaaatcaggcaattctatgtgacatcactgtcttctttaagggcactacatcctcggaaaatcacaatatccatactcggcaatcctgacagtctctccgatgataaagaaagtcctatgctttagcaatcgcgcctatctgtcgtgccgtcagcggcagctcattatcaaggctaccgaccggatgaccggtgaaccatgcgaatactcgcgccccgtcgaagacataggagcagtggttatcgagagcggacaagtcacactgtcatcacatcttatttctgctttgcttgaaaacaaagcggctcttatcatatgcgatgaaaagcatatgccatctggattgatgctgcctcttgaagggaatacgctgcaatcagaaagattcgaggcccagatttcggcatctttgccgctcaaaaaacagctgtggcagcagaccgtcagcatgaaaatcaagaatcagggcgccgtgcttaaaagagccaacagcatggagataggcaacatgcttgcatgggcctcacaagtcaggagcggagaccccgacaatcttgaaggccgagccgctgcctactattggaaaaacctgtttggagaggactacggttttgtccgcggacatgaaggagacggtcctaacgtactgcttgactatggatacgccatactcagagccatcattgcccggagtcttgtggccagcggactgatgccgacactcggcatccatcattccaacaggtacaatgcctattgcctcgccgatgacatgatggaaccctacagaccgtctgttgaccttatggtattagacatcatgcgaaagcatcaattgcctcccgaaatttcaaatgaaaccaaaaggcatctcttgagcattcctgtcatagatgtcaggatggggaaactatcgcgcccgctgatggtagcagcctccatgaccacagcttccctggcaaaatgctatcttggcaccacaagaaaactcctgtatccggaaatagagacatagaccgcatttaccatgctgacagacttaatatcatatcgtcgtataagctcataccaactcatgtggatacttgttatgttcgatttgcccaacgagacaaaacggcaacgtaaacgttactcggaatttcgaaagttcctgattcaggatggcttcaccatgtttcagttttcgatatatgtgcgcaactgcgcctccagagaaaacactaaagtccacattgacaggataaggaaactcctgcccgatgaagggaaagtatgcatcatcacgataactgaacgacagtttaatgatatcctgctgtttgaaggcttgaagaaaactccgcctatgccagaggcagttcagctcgagttattttaataaagagacctcctcgcatacgcagagcatccttatcctctgatttaaaacaaggacatcttaaacgattttaatgcattcttttcgcagatagacgttttctcaagtcaccggacatagacatatcatcagaataccaaaacaagcaaacaagaaaagtcagagataaaatttctccgacttttttactttatatccttcaatacaagcacctatatatcagaatattaccaaaatcaaggtgtgatttatcacacaaatataataaaatcaaagcaaatcacaacaagacgctttgcatttacataagcagttatggtgtgatttatcacacaaatataataaaatcaaagcaaatcacaacttgatattgttgcaaaaaaaactgacaatgggtgtgatttatcacacaaatataataaaatcaaagcaaatcacaacgagttcatatagtgtttcacgtggaggtattggtgtgatttatcacacaaatataataaaatcaaagcaaatcacaaccaagatgaatgcaactcagcagaaacttgaggtgtgatttatcacacaaatataataaaatcaaagcaaatcacaactggctatactcctcgctatgccgagtatagggtgtgatttatcacacaaatataataaaatcaaagcaaatcacaacatatgtgcaagctgaggagtaggtaactgaggtgtgatttatcacacaaatataataaaatcaaagcaaatcacaacatcattgatgcaactccgctgtcaatgccgggtgtgatttatcacacaaatataataaaatcaaagcaaatcacaactgatactgaaatgtcgtctcttcgtcaaaggtgtgatttatcacacaaatataataaaatcaaagcaaatcacaactgccggactcccggagattgcaacaaattcggtgtgatttatcacacaaatataataaaatcaaagcaaatcacaacgaagcattgcaagggtgaaacagtgctgccggtgtgatttatcacacaaatataataaaatcagagcaaatcacaacgggctgatgtaacaactatttttcaaaatttaatcgtacatttgtgatattatgggacatttagttgacaaagaaattccacagccatttatgtgcgaggattgtaagcactatttaggctaatttcattgcagggcttttgataatcttgtagcagtaaaaaatgcgcccattggcgaagaacatactgaggttgtgcctggccaaaaaggaacttatgtatttgagaccgataaaccacggcagtacatacgagcttatgtggctgaaggggagattgacgcaacgcttcatattgagcacggactattgccccaatcgcagccgaaatcggtcacgtttttcattattaaaatactaagcccaagcttctgcaaaaattcctttttactggatatgatttctcattcctattcttcttgtatcataagcatagtatgataatttttcagttatatattcttctcctttagatttagctgaatattttgaagaaattcggaatcatgtatgatttaccacacaaatatagtaaaatcccagcaatggagagccgacatcatttttgaattctaccccgaactcaag

SEQ ID NO: 3053 - DNA, 15055 bp, synthetic construct
  source 1..15055: mol_type = other DNA
  misc_feature 1..15055: note = Synthetic
gtaacggcgtcggagacggatggtcgtgggggcagcccacttccgacctggagaatgcctacatcgcagcaggcgacaacgagcgtctccgctggaccatcatcaagaccggttgcaccgaaattgccggtgaggatcagttcgacaaattcatccagaacaataccaccaaggactcctatcagggcggtgtgacgaattccgagttccaggactgtaagaaactgttcggatggaccgacgattacatgacaacccgatacctcatcaagccgtcacagcataagtcggcacgtatcatccgcaagtacttcgtgcctctgtcgcagcgtcccgaggtgtacaacatctgtaagattccgttgaatcaccgcatactgcgtttcgccgacgtgctgctgatgtatgccgaggcatgccaggccacgggcgacgagggcaacgcacgcacggccctgaaccgtgtgcgtacccgtgtcaatctgcccgatgtaacatcgagcggaaacgccctgcgcgacgccatccgtctggagcgccgtctggagctggccttcgagcagtgccgactctacgacatccgccgctggaaaggcgacagcggcaaatcggtcatggccgaactgttcggtcccgacggctcgttcgtgaagtacaacaccggcgccgacgccgatatgtacgagaagaacaaccagggcgaaccctccgacaagggtacccgcttctcggaaagccgcgacctcctctggcctattcctcagtatgaaatccagcactccaacggtgctatcgaacagaacccaggattctaatatgagactaagcaatattcttttactgtgcatggctgcggcatgtatgcctgcactgatatcatgcgatgaaaaacccaccggcgtttccacgaaacgcccggtgggcagtggcggcgacgagccggatactcccgatcctacgcccggcggcgacatagtgtcgcctaaacccggattcacgtgcacgtcgcagaacacggtggtcaacaccgccgacgtgcgtcaggtcatggagggcttcggtgcctccgactgctggcttcccaactggattggccaatactggacgggcaaccgtcagcaactggccacatggctgttctcgcagcgtatctccaaagggaagcccgacggcatcggtctgtcgatgtggcgcgtcaatctcggcgccggcacatacgaggccggagcggcttccggcatcaacgatgacaacgccaacaaccgtgccgaagcattccttgttaacggctcctacaactgggacaagtgcgccggacagcgctacttcatggaccaggccaagcagatgggcgtggagagcttcgtgctgttcagcacctcccccttagtgcagtggacactcaacggccagggacgttccgactcccgctgggaggcaaacctgaaggaggactgctacgacgatttcgccgactatatggccacggtggccgagcatttcatcggccagggatacaacgtgacgcacgtctcccctgtcaacgagccgcagtataactgggacggcaactcgcaagagggttcgggatggctcaaccgtcagattaagcagctggccgtggagatggacaaggctttcaaggataaaggtatctccacaaagatcctcgtgcctgaggccgcagcctggaactatctgtatgagtacgacaacaacaaccgtggccgtaccagccagatccaggaactgttcgactcatcgtctgaaaactatatcggcgacttgagtagtgtcgacaaggttgtggccggccattcatactggacgttcgacaactggaaccacatgcgcgacgtacgtaaaaaggtggccgacgcagccgctccgaaaggtctgcgcgtatggcagacggaatggtccatgcttgataaggagccttcagaactgggcggttcctatggcgatgtatcggaattcgacatagcccagtatatgagccgcgtcattcacaacgatatcgtcatggccggatgcacgtcatggtgctactggacggcgatgtctgtggagcgttacgatcagaagaaccgctttgagctgatcaagaccactccgagcggcggcaactattccaacgacttcaccggtggcggcaacgtcgatgccacacacaatctctgggtattgggcaattacagccgcttcatccgcccgggctatacacgcgtcggtctgaaagccaacgagaacaaggacttcttcggcacagcatacgtatcgcccgacggcaagaccgtagtggccgtatataccaactatgacaaggagaagggcgtgacgttgacgaacagtttcgacaacggcaagacgccggcgaccgtgacacgctacaccaccacggccacgcgccatctggaggaggaccgtttcaacgtagccgacaatgtattcctggagccggcttccgtcaccaccatagtctataccttcgagtaaatcccgactgatccttatattgacagagcgcatccgccacccggcagatgcgctctaatattattttagtgacgtgggcactccgtgctgcgctgctattcaagcaggtcgcggagccgttctgtcagtagctctgctactgcccccggttttacctcgcgtcccagttccctctgcatcgacgtgaccgccttgtcggtgatgccgcagggattgatcagaccgaaggcgcggagatcagtattcacgttcagagccaggccgtgcatagtcacgccgtggcttatcttcacgcctatggcgcatatcttacgtgccgtgggctttccccagtccagccacacccctatctggtcgtcgttgctggtcgtggctataccgtacgcctccaaagtctcgcgtacggcccgctccaggattcccacatattgcttcacgcccaaatgatggcgccgcaggtcaatcagcggatacaccaccagctggccgggaccgtgatatgtgatgtcgccgcctcgctctatgcgtatcacctccaccccttcggcggggcgcaccagcaggttgtcggcgttgccgtgaaatcccaacgtatagacggccggatgctcgcacacggctattgtctcagcttcggcgtcaccgtctatcagccgccgaaacagttccttctgtctctcccaggcctcacggtagggtatcaggccccagttttcggtcttcatctcacatgcttctctgcgtggtagctgctgcgcaccataggagccgactcaatatgggcgaaccctttctctattcccttcagccggtattcctcgaacttgtcgggatgaatatagtcctgcacgggataatgcagcttggagggctgcagatactggccgatggtcattatcctgcatcctacggcgcgcagatcatccatagcctgaagcacctcctcctcggtctcgcccaagccaagcatgatgccgctcttggtgttagcgcctttatcggccagatacttcagcacctgcagcgagcggtcgtaggtggccacgcgacgcacctcgggggtgaggcgacgcacagtttcaaggttatgcgatatcacgtcgggatgctcgtccaatattatgtccagcaggtcggtccggccctgcatgtcgggaatcagaacctccatagtcactccggggcattcctcatgcagtcggcgtatcatcgcggcccagtgacgggcgccgccgtcgggaaggtcgtcgcgcgtgacggacgtgatcaccacatgcttcagcttaagttccttgacgctgcgcactatgtcctctatctcctgcgggtcgagagggccgggcttgccgcctgtaacgttgcagaaacggcagttgcgcgtacacacggcgccgcacagcatgaacgtggcggtgccgttgccccagcattcggcccggttcgggcacatgccgcttgaacagatggtatggatgtgacgctcgttgagcatctccaccacctgactggccttgaagccgcgcggcaactttatcttaagccattccggtttgcgccggaaacttacttcctctttcttttccatgatatggtaaggttagcagcccaacagctgtttcaacggattctcgccgtgtacggcctcatagtccttgatatagaacggcacggaatacgccaggtcgagaaaatccttttcgcggaaacttttctcagccaacgccaccatatcgaacgccattggcagcacatcgtccatccaatgtgcgtttggtagctttatcacatccttggtcttggccgcgccgtcgcccatgaaccatatctggcggtcctgcggcagctccttgaacgagtcctcggttatgatcatggcctgcggcggaatcagcgcgtcgagcctgaaatcgtaggcggcggtgtacacctccatgcggcgggcgtcgaccataggcaccaatatttcgtcgccggtgaagttgaggttgcggaacatggccttgacggctatcagctttaatgtttccactcctatcagcggcacgtcgagaccgaacgccagccccttggccagcgacatgccgatgcgcaggccggtgtacgagccgggacctgtgctgaccgccacggcgtctatcttaagttccttgcgcgtcacttcctccatggcctgtgccacgaagggtgccaggtccgtggcctgatgcatggcttcgcgctccaccgcgctccattccacattgccgtccacgctaagcgcgacgctgctggtgctctgcgatgattctatattgagtattactgccatatctttattagttgaaaaagttaaaatagtgccgcagccgcagccgcgcatttcataccgtcgagggctgcggacacgatgccgccggcatatccggccccttcgccggcgggataaacgttgtccagaccgatgctgttcagacgctcgggatcgcgtgtcatgcgtatcggcgaacttgtgcgcgattccagaccaatcatcacgccctccggcgtcatgaagcccttggccttacggccgaaatcgcggaaaccgtcggccaaccgccgggatataaaggggggaagaatcttgttgaaatccttgctctgaatgccaggcgcgtatgacgtggcgggcaatgtggccgacaccttgccatctacaaagtccgtcatgcgttgggccggagccacgatgctgttgcctacggcggcaaacatttcatgctccaagtgttcctgcagttccagcatctgcaacgcgccggcgtcctcgtattccgggaagtctccggggcgtatctcgaccaccattccggaattggccaggcgaccgctccgggccgatgccgacatgccgttcaccaccaactccccgtcggccgtacctgccggaactatgacgccgccgggacacatacagaaagaatacacgccgcgaccatcgctctgcgtcacaaacgaatactcggcgggaggcagccacttgcctctccccttcggattgtgatattgtatgcggtctatcagttcctgcggatgctccaggcgcacacctacggcaatccctttcggctccatagtcatgccttgtgcgtgcagggctcggaacgtgtcatgggcggaatgacccgtagccacaaccactgcgtcacaggcaatctttctgccgtcggccagctccacggccacggcacggccattcttgatatcaatacccgtggcctgcgtgcggaaacgcacatcgcccccgttacgtattatcgtattgcgaatctccttgatgacgtggggcagtttgtcgctgccgatgtgggcatggacgtcaatcagaatgttttccgacgcgccgtgctgtaccaacagctcaagcacctcttgcacgttgccgcgcttcttgctgcgcgtgaacagtttgccgtcactatatgcgccggcacctccctcgccgaagcaatagttggactgcggatttatctttttctgtcggcttatctctgccagagccacgcggcgcgagtccacgtcctcgccgcgctctaataccacggggcggatgccgtgacgcaacgcctcaagcgctgcgaacagccctgcaggtccggcgccgattatcaccattatcttcgcatccggtgccaccggcctgaacgtcacgggtgtatagggtgccttgacttccttgtcatcgcccgtggccacgcgaacagtcaggttgatcacgacctgacgtttgcgcgcgtcgatgctgcgacgcactatccggtagtcgttcacactccccttattacgcacgttatcctgaatcgctttccgaagcaactcaggattacctgccttatcgggtgtgacccgcaattgtatatcttctatcatagcttcataccgtcactcgtttcattcccgacgccattccactaccttgcctgactccaggctgcgcgccacgtctatgatgcgctggttggaactgccccggaacaacaggtctctttccttgagagcctggatgaacggtccatctactataacgtcaatttccctcaaaacctgtgccaagaccgtttttttttgcagttcttcccacgtgaatccggtatagagccatacggtgtggcccatatcgtgcactttacgcgctattacgcgcacttcctcgggatgatacaaggggtcgccgccgctgaaggtgacgtcgaagtcctcctcgcgcaccacgtccatgatctgcgccactgtcatttcctcgcctccgtcgaagctccacgattccggattatggcagccgggacaggcgtggcggcatccggccagatagatgctggtcctgaaaccgggaccgtcgaccgtcgtgccccggactatgtccaggacacgcagccgacgttcgttttcattgtcagtcagttcgtttgtcatctgtgcgccacacttccttatttgtgaaccacgcggtctttcagttcggcgagcttgccgctgttccagcggtcggtggtacccacaaggtagccggtgatgcgctggatggtctcgaagcgcgtgccgcacttcggacagcatgcctcgtccttctccgcgttttcgtagccacagttgggacagtggttgcggttatggttcaccgatccataaccgatgttgtactgatccatcatgtccacgatctgcatgatcgattcctcgttgtgggtggcgtcgccgtctatctcaacgtagaaaatgtgtccgccaagcgtcagctcgtgatacgggccctctatcttggccttgtggcgcggcgagcagtgatagtacacgggcacgtggttggagttggtgtagtaatccttgtccgtcacgccgggaatcacgccgaatgtcttgcggtccttcttggtgaagcggcccgaaagtccctcggcgggcgtggccagtacggaatagttgtggcggtagttttccgaataggtgttcactttctcacgcatgtggcttacgatgcggaggccgagttgctgagcctcgtcgctctcgccatgatgcttgccaatcagagctatcagacattcggccaggccgatgaatccgatgccgagcgtaccctggttgatgacactctcgatgctgtcgttgggtttcaggccctcggtatgattccacaatacacgcatcagcaacgggaattgcttggcgaaagcggtcttctggaactgatagcgctcgtcaagctgacgggcagtcagatccatcacctcgtccagacgctcgaagaatttggcgatacgctcctccttgtcctcgatacccatctgctcgatggcgatgcgcacaatgttgatggttgtgaacgacaggttgccgcgacctatggatgtcttttcgccgaaacggttctcgaacacacgcgtgcgacatcccatagtggccacctcgtgctcgaagcggcgcgggtcgttggcgtcccatgcctcgtcgcggttgaacgtggcgtcaagattcaggaagttggggaagaagcggcgagccgacaccttgcatgccaatttatacaggtcgtaattgggatcttcgggcaggtagctcactcccctctttttcttccatatctggatggggaagattgcggtggaaccgtgtcccacgccctcgtatgtggacttcagcaactcacggatcacgcaacggccctcggccgatgtgtcggtgccgtagttgatgctggagaacaccacctggttgccgccgcgcgagtggatggtgttcatgttgtggatgaaggcctccatcgactgatgcacgcggtccacggtcttgttgatggcgtgctggcgcagacgctcgtcaccctccataccgtcgagttccactttcagataatcctttatctcggaattctgcagatgcgacaggtcgcggccggtcagtttctccagattctttatttcctctatatatgagttgcgcacgaacggagccaggtaaaaatcgaatgccgggatggcctgaccgccgtgcatctcgttctgtgcggtctccaggctgatgcaggctaagacggaagcggtctctatacgtttggcgggacgggactcgccatgacccaccacgaaaccgcgctgcagtatgcggtccagaggatgctgcacacaggtcagcgacttggtgggatagtaatccttgtcgtggatatgaatcagattgtcgcgcaccgcgttgcgcacatcgggcgacagcaggtagtcgtcgacaaacggcttggtgctttcggaagcgaacttcatcatcatgccggcgggagaatcggtgttcatgttggcgttctcgcgcgtgatgtcattgttcttggcctcgataatctccaggaacatatcgcgggtacgggccttgcgggctatcgagcgctggtcgcggtactggatatactttttggccacatcctttcgggccgacttcatcagctcgacctcgacgcagtcctgaatctcctccacggtcatgcgctgcttgccggcgatgccgatgcggtcggctattttctggatcagggcctcatcctcgccacgctcggtggtgagcatcgccttgcggatggccgccttgatcttctcctcgttatatcccactacgcgcccgtcgcgcttctcgactatctgtatcatgctcctgggtctttttctatttggttaactgtgtgttttgactgtcattaacggtatgtgtgttttgactgtcattaacggcatgcgtgttttgactgtcattaacggcatgcgtgttttgactgtcattaacggtatcggaatgatatcgaaatggtatctaaactgagcacatcccaattccgatacaaagttacaaaattaattctttacgacaactataaacacctaaaaatttttaaagattttcgttttggaaaacttttgaacctctctaaattccctcattccttattttcaataacttacaaaatattttggacaactctatcccaatcctaccatttagccgcttatcttttgcgcatccacccgatatccgcaccatctattattttccaccatcatccgctcgtttttgccatgtttttgccatgccacttgtttttgtctccttatcagcagcccgtttttgctgtaccatctgcttttgttccagtcctgagctttagcgacgacacctgtctcccgttcccagcacttcttatcagtcgaatcccaccctctttattttactgcgttgaaccgatgccatatttgggcattacgtcataattatataagcatccaacattaaaagacaggagagaaatctttcgatttccctcctcagatgttttcacaacggaataatccttattgtgatttgctttagtttatttttgcgtcacaaatttatatcaaaaaaacgaattattcaaataatagtgcaaaaaattgttttcatgaacttattttattagttttgtaatcaaaactgcaatttataattataaaatatagtcatcatgaaaatactcggacttgacctcggaacagcatcaataggttggagtgtaattgatatatcagacaaagattccaatgtcattcaacttttgggattaggcagccgcattattcaatacgaaaacaatgaggcttctgatttttcagccggaaagggtgagacgccctgttcgcaacgtaccgcaagaagaactgcgcgtaaaatgcttgatagataccagcaacgtcgggaatctctcagatcattccttatagaactcggaatggtggataaatcagaagtctttccgcctctgaatccacttgagacctggaaactccggagcgatgcgtctactcccggcatacaactttctaaatcagacatcgcacgtgttttgttgcatctaaataagcgcagaggttatcgccatgcaaagtcagacatgggcgattccaaacagacagaatacgtaacacgcgtaaacaatcgatactccgaaatcaaagccttaaatcagactatcggtcaatttttctacaacaagttgaaagaatccgaggcagaaagtagtcgaggcaagaaacaatacacatataggataaaggaagaagtattccctcgtgaagcgtatgctcaggaatttgatgctatcataaatgctcagaaagaattctatcccgaaatccttactgatgagaatatcacaaaattaaagaatctgatattctttcagcgtccacttaaatcgtgcaagcatcttgtatcctactgcgattttgaaaggagaacctttaaaaattccgaaggtaaagaagtggacagcggaccgaaggtaacacctaagtcatcgccattagcacaggtttgcaaattgtacgaatcgattaataatattcgtctggtaaatccacgtcttaaaggtaggaaagctgtgcaaccatcactatgcgacggtatggctacgatgccaatagatgtgaggaagttacagtacgaattcccgattaatgccgaggaaagacaacggatattcgattatctaaataacaacgacagactatcgcaaagcaaactcctcggtttattaggtctgaagcaggctgacggatttaaatcagatcaagctcttgctaaaggcatacaagggaataagacgtattgcgccattgccaaagcattggctgattaccccgggaaagaggaactattgaagttcgaggtcaagataaccgataagctcgacaaaaatacaggagctgtagaacctgtaatcgatctgtcgtatcttgacgagccactttataagctatggcatacactatactccatcaaagacaagaaagaactgtttgattgccttgctaaaaaattcaatatctcggatgctgagactcttgagaagctgtatgccatagacttcgtaaaagatgggtacgccaataaatccgccaagtttattcggcgtatacttcctcatctcatgaagggtaatggctatagtaaagcttgtgagctatgtggagtgaatcattccggctccatgactgtagaggagaacaatgcccgtacacttaagccgcgtcttgatccgctttacaaaggggaactccgtcagcctgttgtagagaaaatcatcaatcagaccattaatctgactaatgctgtgacagatcgttttggcgaaatcgatgaggtacgcatagaacttgcccgagaactgaaacagaataaagaagatagagcggaaactacttcaagaatcaacaagctggagaaagagaaccagaaattcgccgacatgatcgcggaactcaacatctctcctacccgtcgccgtatacagaagatgcagatgcttcgagaaaccgataataaatgcatatattgtaacactgatgtaactccagctcaatttatcgaaggtcatggatacgaaatagaacatatcatacctcgctcccgcttattcgatgacagtttctccaacaaggtgtgctcatgtcgtgagtgtaacaaggctaagggcgcgctcaccggttatgatttcatgaaaaccaagagtgattccgaattcaatgcatatctcgaccgtgttgaggaactttataagaatgggaagatttcaaagactaagcgcaacaagcttaagatgtcatcctcggaaattccttccgattttatagagagggatctaagggaaagccagtatatagcaaagaaagctcacgagattctttctcagatgttcagaaatgtctacgcttcatccggggctgtaacaagtttcttccgtcatgtgtgggggtatgacaacgtgctacatgatctcaatttgcccaaataccgcgatgcagatctcgtagagaaagttgaatacacttcccatgaccagaagcatacggcagaacgaatcaaggactggacaaaaaggatggatcatcgccatcatgccatagacgctcttgtaatagcactcacgcgacagggatacattcagcgactgaataccctgaatgcagattcggataagtcagcttccgataaggtgaatctggataagtgggcgtcggcacaacctcatatttctgtcaaggaagtgcaggatgcagtcaataacatctcggtttccttcaaacccggtaaaaaacttgccactcccggcaagagatatgtaaagcgtaacgggatgcgcaaatgtgttcaaaaaggcattcttgttcctcgtgctgcccttactaatgatcatgtatacggaaaaatcaaggtacccgttggcaaaaaagatcttaaatacttatttaacaatcccgaaacgattgttgatgacaatatcagaactgcagtcttgaatcttctaaaaaaagatgatggcaatgtaagcaaaatcttaaaacaacttaagaagtctccgtttgttgtcaatggtcgtactatagatcagaccgtttgttatgaagaaagatttgttttcaaatatccatttaatagcatagcaaaacagtcgaatatcaatagtatagttgacttatccattcgccgcaagtttcagaagcgttttgacgaagtcggagaaaaggatttcgttaaaagtctgattgaggatcggatttgttcggatgtaaatgggaaatgtgtgattcgtaatgttagatgctttgccagagtaactgaggattctatagtttgcacaaaaaaagattcttcgggccgaaaaataggtttttctcaaaaacagaataatcattatctgaatttttataaaaagacagatgggaagattatcgagtttatcatatcgttttgggatggtattatgtttaaacgatatggaattcctacaaatgcaaccgatccagcaacgatatgggagatgattgcgaatatggaaattgaatccgagtttcaggagataatatccaaattgccgccacatgattctatgcttgtcatgagtttaaagaaaaatgatatggtggttcttggtatgagtgaggatgaatggaacgatgccatcgagtcacataatcatgtagccatcaacaatcacctctatcgtgtgggaccatttagttctaaggattataatttcaagtttcatacagacacctctgctaaaatcgcagatggagataagaaaatgaaaatgttctataggattagatcagcagataatttttttgcactaaatcctcacaagatcaatatctcgctcctcggtgagatagacttcgacaatctgtcgtaatatgataaagaagacattggtattctcaaataaggcttatctttctttaaaattaaaacagctggtaataaagagggaaaatgagcttacaggtgaggaggaagtcataacccgtcctatagaggatatcggaattatgttgatagagagcggtcaggtcactctcacatcatctcttgtttcggagctgatgcagaataacataggagtcattttttgcgactctaagcacatgccggcaaatatgattcttcctcttgaagcccatacacttcaatcagagaaatcaatcgctcagattcaggcatcccttccattgaagaagcaattatggcagcagacagtatcggcaaaaattctgaatcaaggagctgttctacaccaggtaaccggactgaacatcggaaatatgattaaatgggggtcaagtgtaagaagtggggatccggaaaatcttgaaggaagggctgctgcatactattggcggaatatgttcatggaatcaggaagattcaggagagataaggatagagaagatgacatcaacatttttctaaattatggatatgccatattacgagcaatcattgcacgtagtatcgtggggagtggactgacacccttaattggaatccatcattccaataaatataatgccaactgcctcgctgatgatattatggaaccatatagtccgtatgtcgatttgctcgtcgcggatatggtgttgaaacagaatctgaataatggcttggacaaagaagcgaagaaaacgttactgaccattcctaatttggatgtgagtttcggaaaaatacgacgtcctctgctcgtggcggcatccataacaacatcatcacttgcaaaatgtttctcaaaagaaaacagaaaagtaatctatccgagaatcccgatttaatagttaatccatcccaatatggcgcattatgtttcctacgaccgaattagttcttatcagctcatgtggatattaatcatgtttgacctccctacggaaacaaagatgcaacgaaaggatgcctcggattttcgtaaatatttaatttccgatggcttcacgatgtttcagtattccatatatgtcagaaactgcgcctccagagaaaatacagatgttcatgtaaacagaataaaaaaacagatacccaatgagggtaaggtatgtatcattacaataaccgaacgccagtttagagagatcttgctatttgaaggaacgaagaaaagcacgcctcttccggatgccattcaacttgaactattctgatatagcagagatcggaagagcgtcgtgtagggaaagag

SEQ ID NO: 3054 - DNA, 13986 bp, synthetic construct
  variation 10186..10254: note = note, n is a, c, g, or t
  variation 9612..9613: note = note, n is a, c, g, or t
  misc_feature 1..13986: note = Synthetic
  variation 170..181: note = note, n is a, c, g, or t
  source 1..13986: mol_type = other DNA
gtcaaaagggggctgcgcgggagccagcagctgacacagacggataagagtcaagtcgacaagcagctgcttgttggaggatgtgcggtaattgaggtcgcagtcgttaagcaggcgcatggcggcataataccattgcagaggcagagtgcgggcctgttcgacaagtnnnnnnnnnnnncaccataagatcgcggacatgttgggcgaggctgttgacaaagaaaagagagtcgaagccacggtcgcgtatctccttgtagagcagaagggattcgggagcgtcacccttggcaaacgcgtcgattaggcggaagaagtagtcgtagtcgagaacgttgagattctcgacggcggcttcataagtgaggtgtccctgagatgaggtggccacctgatcgaatattgaaagagcatcgcgcatggcgccgtcggcctttctggctatgactccgagggcgcggcggtcagcctcgattccctcctgggaggccacgtaggcgagatggtccaccatgtcgttgatggtgatgcgcttgaagtcgtagatctggcagcggctgagtattgtggggatgaccttgtgcttctcggtggtggcgagaatgaagattacataggcgggtggttcctcaagggtcttgaggaaagcgttgaatgcctgtgacgaaagcatgtggacctcgtcgatgatgaagacgcggtattttcctacctgaggcggtatattgacctgttcggtaacggcgcggatgtcgtcgacgctgttgttggaggcggcgtcgagttccatgaggttgaaagagttgccgcggtctatggcgcggcaggattcgcactcgccgcaggcttcgccgtcggctgtgggagagagacagttgatcgtgcgggcgaaaatacgggcgcaagaagtcttgccgacgccgcgcgggccgcagaaaagataagcgtgcgccagacgccccgaggcgatcgctcccttgagcgtcgaggtcaggttctgctgccccacgacgctgtggaaagtcgcgggtctgtacttgcgcgcgctgactatgtattggtcactcatataaattgacgggagagttcagaatgcaggtttgttatccgatttgcaaatataaaacaaattttcgagaaaacagcttttttctgcattatgcgccgtgacggaggtcggcctgacgtatcgccacatggcggatcttgcctgaaattgttttgggcagctctttgtcaaattctattacccgggggtatttgtagggcgcggttatgcgcttcacatggttctggatctccttgatgagatccgctccggctttggcgacgaaatctttggcgaggacgatagtggctttcaccacctgtccgcgcacgtcgtcgggaaccgccgtcacggcgcattccaccgcggccgggtgagtgagacaggcgctttccacctcgaagggcccgatgcggtagcctgacgatttgatgacatcgtcttttcgtccgacaaaccagaaataaccgtcttcgtcgcgccatgctatgtcgccggtatggtagtaaccgtcatgccatgcgcttttggtaagctcgggatcgtcgaggtattccttgaaaagtccgacaggcttcggtccgttttccggcacgcggatcacgatctcgccctcttcgcccggaccgacctcacgcatagacgtgtcgaccacgcgtatgtcatattgtggattgggaagtcccattgatccggggcgtgccgtcatccacgggaatgtcccgacggtcagcgtggtttcggtctgcccgaatgcctcgcgcagatcgatgcccgtatgctgtttccagctttcggccacggatggattgagggcttctcccgcagtggtgcaccattcgagtgccgacaggtcgtaggcgtcaagattctctcgtatcatgaaacgatagactgtcggaggcgcgcagaatgaagttatgcggtatttttccatctgtcgcaacagatcggcgggaacgaatttctcgaaatcatatacaaatacttctgcaccggccatccattgcccatagagttttccccacacggcttttccccatcctgtatcggccacagtgagatgacgcgagccgggatgcaggttgtgccagtaggaagccgtgactatatgtccgagaggatatgtgaagtcgtgagctaccattttgggttcgcccgaagtgccggaagtgaaataaagcagcatggtgtcggtattgtcattggctatttcgggacgcctgaagggagtggcgttttccgtggctttgtcaagatcgaaccatccggcggggatttcggaaccggtcaccgctacgtatcgcagggtagggcagtcgggagcggcttccgagatatgccggattatttccttgtcccccgccgccactatcatctttatctttgctttatcacaccggtagatgatatctttcggtgtgagaagatgagtggcgggaatggccacggctcccagtttgtggagagccatcatgcatgtccagaactgccagtggcgtttgagaatcagcatgaccctgtcgccgcggccgatgccgagactctggaagaaagatgccgtccggtcggaaaccgaggagatatcctcgaaagagaagcaccgttcgccaccgttctcgtctgtccacaacaatgccggtcgcgacggatcttcggaggcgatcctgtcgactacgtcgtaggcgaagttgaaacgcgcggggacgcggatatgcaggtttttacaaaaatcatcataagaggagaactcggtctgtgtcaagtactgttcaatcatagtggaatgtgttaaaacagagtaaatgatagggtaattgttgtcagcctgagaaactgtttgtgacacttttatatcaaaaagtgggtctttgtttgtgaaatgtgtatttaaaacgctcgcaatttacaaaaagattttaaaatatttataattatgacaaaatttaaattatggcacatatgtaattaaaaaatgttaaaatgtgcaattatggacaggtaaacggctgtaaatcaacaggtgcgcatgattccgcatcaggaatcacacacacttgaaaaattctataagtattctccggaagaatttcattcgcgtagcggtcggaggtccacattgcggtcgcccttattttttgcacctctgtgcgccgcaccgtccggttctgcctgatggatgtatctgagacatatctttcatctgtatcaaaaacacgctcttatataatgccggacgatccgccatgcgtcacattgatttgttgccggatcttgtggctttagatttatttagttaaatttgcaaaggaatgaacaccctcttaactgttatatttgtcttttgtaatggatatcgaatacaagtatttacgaccgaagaaagcagcccttctcaagtcaagatacgagatttatcgtgattatggcgagtcacgtatcactgctgtttctgacggagccgttgtcccgccctatatcgacagtcatggagatttaattgccggcgttgtcgatgattccgggagatttgtcgttgactcgcattgtgtcgattttcctgaagagatagagcaacatgcatccagcctgatcttcaataaagaagataaaatcattgtttatctgggctattttaatcagcattgggggcatttcataacggattgtctttctacattttggtttctcggaaagatagacgcagacaaatatgttttcagctgtgaaacagggtcacctgaaatacatccaaatattagattagctctcaatcttttgggcgtatgggataagattgagattgtttcccgtccggtcaggtacaggaaagtatatgttcctcgcagaggaatgattccccgggattatattcttaaggaatcgtccgtggtatatgataagatcatagatgccgcttcggaagagttgcccgatatggattatcctgagaaattaattctcggtcggtcgcagttggctaaggcgatagagaacgattatggtactattgagatcgagcagttcttcaaggacaacggttttgtagcgatttttcctgagaaaatcacccttgtgcaattgatcggataccttgcgaatgcgcgtgaggttatggtaatatcaggtacgcttgcacacaatatgctttttgctccttgcggatcaaggctgattgtaattgaaaaatatccgaatatcaataattatcagcagggtatagatcggttgaagaacttgaaagtgacatatattgacgcttcatatttcatttggcctgtctctccggggcttggcccttttataatgtctgatactctttgtttgcaaagttatgccaaagattttaactttacagcgccctccccttttaatcgtgacaggaaagtgctccgtaagttctttagaaagtattacaagcattataaacgaagactgatctcacccgaatggcttgaatctgaaatcggtctgttcaacgaggcttatcaagagtcgtttgatgttttcggaaaatggctcagtggtgttcgccctatatttctatcggatgcgttacgtccgagatacattgtgaaaaatcttttaaggtatattggcaagcttagaaagtcttgaataaagttctctgcaggcttcttatctttgctttatcacaccatcttacattatggcacatatttgattaaaaatgataaatatgcaattgtggacggataaacggctgtaaattagcaagtgcgcatgattcctcatcagtaatcacacgcacttgaaaaatttctatttattactcaggagaaagactttacattcctttcagatttttgcctacgagaaaggcttcggcaataggggcgccgattgtgcggtatactcttttttcctgatcgaagcatataggatggagcattcctaaatcgacctttccatcgctgtcgagaattgtgtcgtcagcaacggttctgaccacttcaccgaccacgcggacaccgccgtcctcattatctgtcatggagactacgttgcattccatggccaatacgaagtcttcgataatcggagcgtcaacaattttacccttagtgacagttgcgttgacatgaaccaatttcggttcactatgtcctgacacgataccgagataatctgcgagttctacgcgttcggctgtagcgatgtggacggtaaatgcttttttgagccgcagattatcagtggttttgtgattggatgagatatttagggcaatctggcggtcccagcattggccgccccatgccacattcatggcatcggccacaccgttctcatcgtaagttcctacgataagtacgggcagcggtgcgacgacaggtcgcgcttttatttccttgagcatgacagtttcagatttattatattattaagttcagatttcgatagcatgtctcctaataataacccgtaccggccggaaaagttttagatttttcctggtgttgttgtctcataaaaagacgagagagaaaacctcagggttctccctctccagatgttttcacaacggaataatccttattgtgatttgcttcgattattttgcatcacaaaggtatgcaaaattgaaataaaatgcaaattttatttcaattttgtaataaaatatcaaaatttattttatttttgcaggtgaaatctgatgataaccgcctgttattatttatctttattgtgaagcatgcgccggtaaaaatacttcagtatcctaaatcgtgaatcacatttgtctttaaactgattcttaattatgaacgtacttggacttgatcttggaaccacatctataggatgggccttaattgagattgatgataataataatcccgtttcaatattaggaatgggcagtcgtataatcccatatagcgacgacactactgcagccgatttctccaaaggacgtggagaaagtccttgtgcggaacgaacgcggtgccggcagatgaggagaaatttagaccgtttccagttgcatcgggaacaacttaaaaaactgttggttgaaattggaatgatcgattcacatttcagattatcaccggcaagtccgttggaagtatggaaatcaagagctgacgctgctactcccggcacaagactttccttggaaaatctggcggcagtgttgtttcatataaatcatcggcggggatacaagcatgccaaatcagatcttggtgattccaatcagaccgattatgtcgctaaaatcaatgatcgttatttagagatgcaagaaacgggcgaaaccgtcggtcaatatttctatgccaaactcaaggaatcagaagtaattaatcccaatggcaaaagatattatacatatcgcgtaaaagagaaagtgtgtccccgcaaagcttatgaagaggaggtggacagtattttaaaggttcaaagcgaattttatccggagatactgacggaagagaatcagatcgcgatcaaacagattattttctatcagcgacctttgaagtcttgcaaaaatcttgtgtctttctgtgaatttgaacgtcgtgagtttcttaacaaaagagggaagaaggtagaaagcggacctaaagtcactccccgcacatctcccttagctcaggtctgcagaatatatgaatccatcaataatataaaacttgttaattctcggcttcgaagcagaaaatcagatcatctcccgtcactttttgatgatccggcttctgctccgaagggagcccgcaaacttatgcctgagtatatttttacggatgaggaaagagacaggatttttgattttctcaatacaaatgagaaaatgacagagaaggatcttcttaagattttaggtctgacatctgatgacgggtacaaatcagataaagcactcggcaaaggaattcagggcaatacgacccgatgtcagattgccaaagctctcggaaactgtccgaacaggaataaatttctgagctttgagatttctgaggagatcccggcctctaatcctgatgttgataaaaacaccggcgagatacttccgcgtgtagcttctttctttacacgacagcctttttatatgttgtggcatacactatattccatcaatgacaaggatgaactgttcaaggttctgtcagagaaatttggaatcagtgatactgaaacgttgaaccgtctttatgctcttgattttgtaaaggccggttatgccaataaatctgcaaaatttatccgcaaactcttgccattgttaaagaaagggctgaagtacagtgatgcgtgtgtggtgcttggcataaatcatagcaatagcctgacgaaggatgaaaataataaaagagaattacaacaccatctcaagtctattcataaaggagaactacggcaaccggtagttgagaaaatactcaatcagacggtcaatgtcgtaaatgccattattgacgagtacggcgtaatagatgaagttcgcgtggaactggcacgcgaactgaaaagagataaggaaggccgcgaaaaaatggcacaggatatttcgcggcttgaacgtgagaacaaggctttggaaaaagaggttgcggaattggatattctgcctacgcgtcggcgtattcagaaaatgaaaatgctgaaggagacggaaaataaatgtatgtattgcggaaagccaattacaccttatcagttcatagagggacatggatatgatatagagcatataattcctcgttcaaggatgtttgatgacagcctggccaataaggtatgcgcatgtagggagtgtaatgcctccaaaggtgcaatgacggcattcgattttatgaagtcgagaggagagcatgaatttaattcctaccttgaccgtgtagaggatttatataaaaacaataggatttcgagaggtaaacgcgataggcttctgatgtcgggctcggcaattccagagaattttattgagagagatttacgggagacccagtatatctctcgtaaatccaaggaaatactttctggcgtgatccgtaatgtatatgcttcttccggaagggtaactgactttttccgacatgcctggggatatgacacgattctgcacgatatcaactttccgcgatatgaaagtgccggattgaccgaggtagtggaatatgagactcatggtcagaaacatacggcacgccgaatcagagactggtcgaaacgtaaggatcacagacaccatgcgctggacgctttggtggtagccttgacgcgccaggggtacatacagcgtcttaatactctgaatgctttgtccgaagttgatgaagactcggccgaatggcatggcctggataaatgggcagccgaaagaccgcatatagatcgggcaacggttgtaaaagctttggaagaagtggcggtatcgtttaaatcaggtaaaaaactgacgacaccggggaagcgatatatccgcaaaaacggtaaacgaatatgcgtgcagacaggaattgtgattcctcgtgctccgctgcataaggagacagtttacggacgtataaaggttgacgatggtgaaaagaaattgaaatttgctcttgacaatcttgacctcataaaaaatattgatattcgtaggcaacttgaactgcggttgcggcagaatgacggagacaagaaaaaaactttaaaggagcttaagaaaaatcccatagagatcaatggctgcactgtagaaagcatcggatgttaccgcgaagagattgttgtaaaatatcccgttgaatcaatcgtgtataaagatctgcgttatattgtggatgcgcatatacggaagatcttagagactcggtttggagaagtcgggaatgtggataaagagttcgtgaaaagtctctcagaacgaccattatattcggataaggcttgtaagcaacgaatcaggacagtaagactgttttccggtatcaagatgtcgactatggccggagtgcgcaaagatgatcatggcaaaatagtcggatatgcacagaaacgcaataatcatcatgtggccttttatagaaaccccgatggcaagatcgtggaatcagtggtgagcttttgggattgtgtcaagcggaaaaatgccggtttgccatctataatcaagaaaccgaatgatgcctgggatactcttgttgcgatgggagactcggattgcgtggaagagattgcaaagatttttcctcctgtcggcagtgagtttgtgatgtcactgcaacgcaacgaaatggtagtgctcggcatgtcggatgatgaatggaatgatgctgtcgcgtctcgagataggcgcattatcaatcggcatctttatagggtatggaagttgtccttaggtgtgtattgctttaaataccacacaaacactacggcagccatagaggatggcgacaaggaaataaaacaatactatataattaagtcgatatcttctttagctgctttgcatcctcggaaagtatcgatatcgatattgggtaagcttaatcttctctccgatgataaagaaaacattatgtttnnacaatcgtgcgtatttgtgctgcagaaaccgtcagttgattattcgtatggatgatcctgaaacgggggagctttgcgaacatacaaggccaatcgaggatattggagtggtggtgatagaaagcgagcaagtcacactgtcttcctatcttatatctgcattgttggaaaacaaggtggctttgatagtttgcgacagcaagcacatgccttccggactgatgcttcctctcgtaggaaatacagagcaatccgagcgcttcggcgcacagatatcggcctctttaccgcttaagaaacaattgtggcagcagacagtctccatgaaaatcagaaatcagggagccgtgctcagaaaagttaataatatggaaatcggcaatatgctcgcaggggcatcacaagtcaaaagcggtgaccccgataatcttgaaggcagagctgcggcctattattggagaaatttatttggagaatgtcccgggtttgttagaagacaagagggtgaggcccctaatggtttgctgaattatgggtatgctattttgagggcaattatagctcggagtctgnnnnnnnnnnnnnnnnnnnnnnnnnnnnnnnnnnnnnnnnnnnnnnnnnnnnnnnnnnnnnnnnnnnnntctgatggtggtgaaactcatacgttttcttggacttcctcctgaaatatcaaaagagactaagaaacatcttctcaccttgccaactattgatgtcatgatgggaaaactctccaggccgcttatggtggcagcttctatgaccagtgcgtctttggctaaatgctatctcggagaaaccagaaaacttgtatatccggaaatagaggttaattaaaaattaccatgcccatagattttatctcatatcaacgtgtaagctcatatcaactaatgtggatattgattatgttcgatttgcctactgaaaccaaattgcagcgaaaacgctattctgaatttcgcaaatccttgatacaagatggattcacaatgtttcagttttcaatatatgtacggagttgtgcgtcgcgcgaaaatacaaaagtacatatagatagaataaagaaccttctcccggaggaaggaaagatatgcataattacgattaccgagaggcagtttaatgagatattgctatttgaagggatgaagaaaactcctccgcttccagatgcaattcaacttgagttgttttgaaattattggccatagttttttaattgtgccatatatgtcatatattgtgttgtccaattatcgtaaatatatctaaaaaccaacatataaagtaagcatacggtgacgcacgtatttccggacattctctagagctgtaactttgtgagcaaaaaagatatgctgagcaaggaacaggtattggagatcatcggatattgcgatacccacggaataactcgcagggatcgtcttatggagttgggtataacccactgggagttctataaatcacggcgccgtcatcttgaggcagagaaatcgcatccgcaggaaacctcgggatcattcattcaattgaagtcaaacggagagtatgtcccgtcatcggtgacggctatggatcagagcatcaatcccgggcgagctctacgccgacagtcgtaaacgctgatcatcgaatgtcagacaagccacggaggaatggttagaatcaacggaaagataagcgcggagctattgtcggctctggtaaaaagtctctgagcgatgttcaatctcaacgacagcatgcgctactggctctactctgagccaacggatatgcgcaagagtttccacacgctctcgggactggttcgagaccgcatgggacgcaatccccttgacggagacgtctacatcttcatcaaccgtcaccgcaaccgcatgaagctgctccactgggagcccggaggtcttgtattgtacgccaaaatgctggaacgcggcactttcggcaaaccctcaggcctgcaatacgacggcagtcttgcatggcgtgacttggtgatggtcgtggagggtataatggccgatggagccacgcgccgtcaacgacttgacatactgcgaagagaggccgtcaaaatatgaatgccacgatagaaaagtcagttatttgcttgtgtaagtcgctgatattttgtaattttacaccaataaaaaagcacgatatggcacaacctgagacatcagtggaccaacagcaatcctttgcctcggaagcagaggagctggcctatctgcgtcaacgtgtgtccatgcttgagaaggagaacataagccttgaaaaggagaagagcggtctgttgcagcagctcgactactggaagaagcgtttcttcggacgcatgagcgagaagagacaccttccgcttgatcccaaccagctgtcgctgttctcggcagaggaactgtcacagatgactccggaggaaaagaagaatctggaagcagaagccgacagacaggaagaagtcatcacaaagaccgtcaccgttaaaaagcagccgaagcgtagaagccttgacactaccggacttatggtggtggagaaccacctttatcccgaaggtgccaccgatgccgatggccaactccttgactcatatgtagagataggcacagagacgggcgaccggcttgaaatggtggcgccaaaggtttatgtgaagcgtaccgtgcgccacaaggtaatcctccgtgaggagatggataggaaccctgaagaccgtcagatacggattgccccgcttccacaggcccccatcgaacacggtatggccggagcctcggtgcttgcagagataatcctgagcaagttcctccaccaccttccgttctaccggcagatcaaccgcttccgcgagttcggcctaaggctgccggcttccactgtgggtgactggtacgagaaatcggtcgaaagcctcaacgtgttgtacaagcttctgcgcaagcaggtgatggcgagcgaatacatacaggtggatgagagcgtcgtgccggtccttgacaatgagaagcacaaggcacgcaagggatatgaatggtgtgtgcgtgacggactgacaggatcgcttttcttctggtatgaccgtggatcaaggtcaaaaaagaccgccagggaactcctgggcggctaccgcggcatgttccagagtgacggctatgaggcttacgaccagttctgcggagcaaacggagtcatcggagccgcctgctgggctcatgccagacgcaagttcgcagatgcactcaaggagaatcagaaactcgccacccaggccatcgtcatgatcggtaaactctacgaagtggagcgtaaggctgatgaagccgccatgactcccgatcagagaatggaactgcgtcagaaagaagcatatccggtgatacagctcatggaacggtggtgtgtcgacacctacgccgaagtgcttgaatcaggcctaatgggcaaagccatcgcctacacttactctctgatggaccgtctggccgtatatgtcaacgacggccgtgtcgacatcgacaacaatctcatcgagaatgccatacgtccccttgcgcttggacgcaagagctggctcttctgtggtaacgacgcctcggcctatcgcgctgccatagtctactcacttctggcaagttgccgtccagccaacgtcgatccacgtcaatggctcgaacatgttcttgtggaaataccctcccgccggaagagcggtcggtcgatggaggaccttctaccgatggaatactccaaacaacctgatgtcaagccttggaacctgccggaccctgactgatcaacccccaaacaaacacattcaaaatagtgcgaagaagcccgaaattactcaaccttcgggcttcttcgcgctatttttggcaaacttcacaatacgtgcggcaccgtatgcttaccatataaaaaagtcaaccgatttaatcgattgacttttttaaattctattctgagacataaagctctatatttcagaataatactacgattgaggatgtgattcgtagtgcaaaaataataaattcgaagcaaatcacaacttatttggattagacatacgtttcttagcagatgtgattcgtagtgcaaaaataataaattcgaagcaaatcacaaccaatattcacgtgaggagataatctttttagatgtgattcgtagtgcaaaaataataaattcgaagcaaatcacaactattaaaggtgtagatttatctactgcttcgatgtgattcgtagtgcaaaaataataaattcgaagcaaatcacaacacagaccacagaaacatccgcacaggctacgatgtgattcgtagtgcaaaa

SEQ ID NO: 3055 - DNA, 13295 bp, synthetic construct
  variation 12590..12591: note = note, n is a, c, g, or t
  source 1..13295: mol_type = other DNA
  misc_feature 1..13295: note = Synthetic
  variation 253..328: note = note, n is a, c, g, or t
  variation 2225..2226: note = note, n is a, c, g, or t
ggagggaaagagttggaatatctatattataatcgaacatgaatgaaattctttcagtctgcaaaaataataaaaaattcgctaaggaatggaagaaattagtaattttgcacctgatataatgtatgggccactcataatggatttcacaggcatagcaaggatgatattagagccccgggcacgtcgcactgaccgctgggggacggaaagcgaggatattcaacgagcgcaactccgggagttgctgcgnnnnnnnnnnnnnnnnnnnnnnnnnnnnnnnnnnnnnnnnnnnnnnnnnnnnnnnnnnnnnnnnnnnnnnnnnnnnctttatcggattatgaagatatacgcggcaaagtgatgcggatgatccggggtgaggccggagtgctctggcccggagtctgccgcgattatgcccaaagttcgggcacgagcggcgggaaatcaaaattcattcctgttactccgcgatcgttgaaaaaatgccattatccgggagccacggatgccgtggcccattacctgcggcataatcccgaaagccggatattcagaggaaagggattgatacttggtggctcctttgcaaatgaacttaatttgaccgacaggagggtgcatgtgggggatgtctcggctaccctgatacggagaatcaatcctcttgctaacctttttcgagttccgggcaagaatattgcactaatgccggactgggagaagaaactgccggccattgtggaggctgcaaagaatgccgacatcacaaacctttcgggggtgccgagctggtttctggctgtgataaaggaggtgctgcatgagaaaaatgtctcatccctccatgatgtatggcctaacctcgaggtgttttttcacggaggcatctctttcgctccttatcgggaggtatatgagagcttcacggatccggcgaagatgcatttcgtggagaattacaatgcttctgaaggattctttgccgtgcaggatctcccggaaaaccacggactgctccttggtatagacaacgacgtgtactatgagtttgtggctcttggggaggatgcggattcggcggttggcattgaggctcttgagaaaggaaaggtatatgaaatgatcatcacctcgagcaatggtctgtggagatacagattaggagatacggtacgggtagagtcgacgagcccggtgagaatccgcatcgcgggccgcacgaaaagctatataaacgctttcggtgaagagcttatggaggataatgctgagcaggccatagctgaggtgaaccatgagttgggctgcgcgatagcgaattatacggcagcccctttctttgccgacggccaaaggcgcgggaggcatcaatggtggattgagtgggaaaaggagccggggaatatagaagagttcggacgtcggctcgaccttgcattgcgaaagctcaattccgattacgatgcaaagcgtggaggcggatattttcttgacgccccggagattgtgagtgtgcctgccggagttttcgaccgctggctgatggcggaggggagcaagaaacttggcgggcagcgaaagattccccgcctctgcaacgaccgcaggattgtggatacgctcgccggaatgatgaaatgatcagataagaatgcacaaccaatctgacggatggctgcaatgttgacacgcataatcccgaccccgacgggcgatatgatgctcggggaagtggcggacaggatagtcctttgcacatgggtgaagcgtaaaaatatacggagagtcttatcggctctggagaagcataccggccaaccggccattgagggccgaagcgagcttttgaaattggccgagaggcagattaacgaatatttggccggggagagaacgacattgaattttcctattcagatttttggcactcctttccaaaagcgcgtgtggaatgaaattcggggaattccggcgtcaatgacaattagctataaaacgttggccgcaaggataggagaaaggacggccgtgcgggctgtggcggctgcttgcggagcaaatcctctatgcctgattgttccgtgtcaccgggttctggcttccggagggataggcggattcgccgcatcggtagagattaagcgcaggctgcttgaattggaggctccgaaaatagtcgttgccccggactcatatcgcttttggaaaggagtgccaanngctaattgtcattgacgccggaccgcaggaatccgggcggcataccctttcgcaagaattgaggaaattccgcttggcgatggaggtgaaggttcggccaaagccattgcccgggccttgaatgcggatagagtgacggtaaacacccgcgaccctctgatgcgtgagattgaggctgactattatgtggccgatgatggagcgattgccataatagagattgcggccgccgccggactgaccctccttaaagaggaagagcgggatgcttcagccactacttcttacggagtaggtgtgatgatttccaatgctctgggtagaggatgtaacaagattttaatatgcctcggcgggagcgcaaccaacgacggcggcacgggcatgcttcaagggctcgggtgcaagtttttagatgcggaggggagagaactccttggttgcgggggaaatctttcaaaaatagctgctatcgataataaggatttagataggcgagtatcatcggcatggttcatagggatatgcgatgttgattctcccttctgcggcccggagggagcatcgatgatattcggacctcaaaagggcgcgacgcgagaaattgccaaagcccttgattcgggaatgaagcatctcgcagggctgatagcggaaaatggcggaaaagacatcatggccttgcgtcatgccggggcggccggcgggattggtggcgccatggccgcttatctgaatgcaagcctggagaacggcgcggaaaagattcttgatatcatagattttgaccggcgcattaagggagcggaatttgtaataaccggcgaaggacatatcgaccggcagactctgatggggaaggctccttacggaatattaaagaggtgccaggccgggaagatccccgttgtggcgacaggaggggctgtatcgaaccgtgaagaattaagccatgccgggtttgaggatatattggccgtcactccggagcatatgccagttgatgtcgcgatgaagccggaaaatgcgcgccggaacataagaaacgcaataactcattaccttaagaatcggcggaataggaagaatgaagagaaaggggttgaagattcgactgaaaatgcttaaatttgcaaagaaaagccggcaggccggctgcttcatagattccgacaatgaaaagaattgccatatttgcttccggttcaggcacgaatgccgagaacatagccagagtgttccggtcaaatccggagataggggtttcactcgtagcgaccaatcgtaaaaatgcaggggtgatagggcggatgcagccttttggcctcgagactgtatatgtccctaaccatgtatgggatgaaagcccggaagaagtagttgctatattgcatgaaaacaaagtcgatcttatagtgcttgcgggattcatgcacttcgtatcgccggtgatagttaatgcctaccggggaaggattctgaatatccatccctcgcttctgccggcctacggaggcaaagggatgtggggtcaccatgtacatgaggctgtgatagcagcgggcgagaggctcagcggcgtaaccgtgcatcatgtcacggaacagatggattccggagaaatcgtaatgcagcagagtgtggaagtgctacccgacgacactcccaccaccctcgagtcgaaaattcatgccatagaatatgccctttatcccaaagccatcgaaaagattatcgcgcaattaggttatgaaggagaagtttaataggtatattgacaatttagagcctgatttctggcgagaattgtgccttggcgagggagaattgcgcacatatattaaaggggaggaattcgtgagcgtagggaaggaggcgcggtatgtaggctacataaaatcgggcacgatgaaatatattgcctattccgtcgataacacggcgcatgtggtgggccttgagtttgccggagaatttgtggccgattttccattctcgctctatggcaggaaatcaagagtgaccatagttgccgaaacggattgcgagatatattgcttgccagtaggcaggctgcatgagaggatggagaccgagccggcgttccgggataaggtaatgtgcgttacggaagctctatttgatacggtttacgaccgttatctcgccctttataccatgactccgcaggagcgttataacgatctgctcaatcatcatcctgatttgttcgcattgttttcgttgaaagacatagcgtcgtttctcaacgtgactcccacgcatctcagccggcttagaaaaaatatctgaggcaccgatacgatttcaacaaatgttgagaatattcacagcgtaatgcagtaattttgcgtcgtaaatcgaaacaatacgacccaaatatgaagaagattctcacattgattattattttggcatccttaacgggagcttcggcagaagagccggcagatacaatcgagacatcaaaggaattaaaggagatcgtaatagaggctccaaaggtgatacgcaaagccgacatggaagtgtattatccgtcggagagtgcggttgaaaactccaagaacgggcttcagctgctgaataatctcatgatcccctcgctcaccgtaatagaatcgatgaactcgatccaggcatcggggcaatccgtgcaggtgcgtatcaacggccgccagtcgacgatggagcaggtaaaatccctacttccggagacaataaagcgggtggaatggatcgacaaccccggattaagatacggaggagcaaactatgtggtgaatttcattgtcacgaatcctacggtaggcggctcgttgatggctcacgcaagacaggcattgaattgcggctggggagtttatcaggcagatgccaaattcaataccggtcgctcgcaatgggaagtgggtggatatttcaagctcaccgaggggatcaaggctcatcgtgagtataaagagacattcacatggcccgacggaagagagcttaccagaaccgaaaccccgctcggggggcggcttgacaattcgcagggagccgcgtggatttcctataattatatcaagcccgacacgaccgtattcaacgtgcaaatcacagctaataaggaattctccgaccggtggtatttcaacggtctgctgtcgttaagcaatggagagaaggatattctgcttgacgatgattccggaaagaagggtacaacccctcaattctctgcatatctcgaacagcattttccacaccgacagactcttgtggtggatttcagggcatcgctttattccggaaattcttattcggaatatcttgaacgatatgagaatgcggcggattatatcaccaacgtcggtacgttcataaaggatcttaatcaggcttatggtctggaggccgactatatcaagcaatggcaatcgtcgaaattcacagcaggagcgtcttactcagccaatcgtaaccgctcggaatatcaaaatctcggcggcgatgtttatcatcagcggcaggataaggtgtatttctttgccgaatatttcaggagaatcaataaagtaagcctcaccgcaggccttggcgcacaatatacctccttcagattccgggaaaccaatcagggaaacgattcatggaatctgcgtccgcaggccacactcacctattctcccaatcaaaatcaaaatttcaggctcgcttttacatcgtggcagtcttctccatctctggctgaaaccaatatcgcgccccttcagctcgacggattccaatggaggataggaaactcgaatcttaaaacatcttcatcgtacatgcttactttcagatatggccatactctttggaatcagaggatcaacggctctttcggaatcagggcatttacgagtccgaatgctataactccctatttatactgggacaacgaccgactcatcacttcctatgagaacagtaagggtctcgacaatctaagtttctggctcgcggagaggattcagattattcccgactggctgatgttctccggaacaatcacctatagagccgagcgcatgagaggccacacctatacgctctacaattataattggagcggggatgccgcactcgtattcatgcacaaagggtttcagctcgtgtttcaatacgttagggcccagcgcgacctctggggtgagaaaatcagttggggcgaggacgtgaatgtaattgtagccagttataattggaagaaatggcaattcgaggcaggcatattaatcccctttgggaaatacgaccaaggctcaaagtcgctcagtaaatggaaccacaatgagcagcatatgcgcctcgatatgcggatgccatatgtaagcatcagttacaacctccaatggggccggcagaaacgcggagcaaataagctaatcaacgccgatgccaatgtcgatacctccaaggccggaggaagatgatatcgactggaggaagatgataaagcggagaatatattcatgcaaggaagggagctcttggcagtgatgtcgggggctttctttatagagtgacggtaccaccgctttcgataccctctgcatcggagcggataagctgccataccgcgacagaatcagcctgtgtgagagcggcgttatatatgaaaaaattgggaatatttcatttttgagtgaaataattgtcgtgcctttgcgttattgtaataaaacagaggatacgactatgagcgaagtagaactctatctcattgacgagggcgagaattgcaccctctatactctgcaatttcttcgtgattcggataatgagtttgagaagtttgtctctaaaatcatcaatgactctgactaatgcgaggattatacacgtatagccgccgttgtcagccgaatagcaaggacgggtgccctcgaaagatatttcaggcgtgaaggtcgcgagtctgattcggtgatggcattaccggtgcttaactcgaaactgcgcttgtattgtctccgtctttctgacaaaatccttattctcggtaatggtgatgtcaagaaaacgagaacatatgaggaggataataagctaaaggctcatgttctcacattgcagaagtttgagaaacttcttaagcagggtgttgaagatggttcggtaacgatgaccgaatcaaccatagaaaccgacaatatttttaagttatgaaacgtactgccaaatctctcgaagaaatgcttggtccaattcccgagccaataatgaaagagacagatctttcatttgaaatttcagaccgcatttggaaactgatgatagaacgcggactttctaaaaaacagtttgctgatgcacttggccggcgtccgagcgagataacaaagtggctaagtggtcagcataatttcacgattgcaacccttggaatgctctctgcgttcttcgggcaaccgatcgtaaccgttggataatgccggagaacttcaatacatacattcaatatattgacatcaacgcctggcgcgaggtatgcgtccgcaagggtattctgcgcagttatgccaagggtgaggaatttgtatctatcggagaggttggtcgctatatctgattcatcaaatccggctcattcaaatataggccgttccgcggggacatggtgcgaaaaatcagttggggcgaagacgtgaatgtaattgtagccagttataattcttgcgccacaacgtagaagggacacatggctcatgcgtccgcccgccagatttatgtgattcattgacattaaggttcttaacgatcttaaagtcctaaatccccttacggtatgcagctttcgccataggtagcctatggcgaaagtgcatggctcgtttctcggagcaatccaaatcaccccaacgcgcttactttcccgaaatacatatcaactcgaatagttatagtcagcgattcattgtgcagatccgaccaattcccgcaaattaagaagaagtgagaggaattgttcctcccactccaaatgttttcacaacggaataatccttattgtgatttgcctatttttttatttgcattgcaaaattaatcaaaaattctattctccccaaataaattcggtataattgcaagatttaatctcatcattgtaaagaatcacaataataataccgtattaattggatataatgatttatatcattacttttgtaattcaattcacagttcacttcacaatttattatttacgtatgaaaattctcggtttggatctcggaatctcatccataggatgggctgtaataaatatcgataataaatcagaagatatagatcttttagggttcggctcacgcataattccttttaacggagataatgatgcaacagattttgcccaaggcaaaggcgagactccatcctcaaaaagaacccaggcgcggtcaatgagaagaaatctcgatagatggcagttgcatagggagcaattgaaagagatgctgcattcttgcagaataatgtcggcttcatcaaaatttgaggcattggatccgtttcaagtatggaaattgcgtgctgatgcggctacgccgggcaagcagttgagctttcaagatttatcacgagtgcttctgcacattaaccatcgccgtggctataaacacgccaaaagtgatgatatgtcggattcaaagaccacagcttatgttgagagaattaacgatctctatgcgaaaataaaagccatggatttaactcccggtcaatatttttgtcaagagttggcaaaatcggctatggagagtccaaaagggaaaaagcattatacttttcgagtaaaggaaaagatattgcctcgtaaagcatatgaagaagaagtaaagcagatattggaggttcagagtcaattctatcctgaaatcctgacagaaaaagtaaaggatgaactcgttagggtgatcttctatcaacgccccctgaaatcatgcaagcaccttgtttcttactgtgaatttgagaagcagctgttccctaattctaaagggaaattggttgatggcggcccaaaggtagctcctcgcacctctccattggcgcaggtgtgccgcatttacgaagcaatcaacaatatatccattgttaatccgcgtcttaagggaaagacaacgggtgcggaggatatgagtttgattccaccatcccgacacgaattgaaaaaattcagatacaagtacgaatttgatgccgaagaaagggaaaagttatttgactatctgaacactcatgagaaactcacccaagcggaactttttaagatactcggtttgaaacgaagcgacggattcagatgtgatcaggccgtcggaaaggggatccagggcaatatgacccgttgtcagcttgaggccgcattacaaggtcttgaggaagataaaatcaagaagctgcttcagtttgacctttctttccaacagaaagtggataaatccacgggtgagataagggaagaaataagctcctcctataatcagcaaccgctttatgccttatggcatacactatattccattaacgatagggatgaactttttcttgttttgaaagaaaagtttggtatagacaatcaggaagtgcttgacaggctttataccctcgactttgttaaggccggatactcaaataaatcggcaaaattcatgcgccgtattcttcctgaattaatgcaaggcatgcaatacaatgaggcttgtgagtccatcggaatccggcatagcgactatcttactaaagaagaaaacgagaataggactctttccaatcggctggcacaaatcaaccccggagaactccggcagcccattgtggagcgtatcctcaaccagacgataaatctggtgaacgccttgatggataaatatggagaaatagatgaagtgagggtagaattggctcgcgagcttaagcagagcaaagaggaacgtaagagaactaccgataatattaacctaagggaaaaagacaataaggctttagcattacaaatatcagaacttggtatcgtgcctactcgcagaagaatacaaaagatgaggatgcttgcagagaccggcaatagatgtatgtattgcgggaagccggtaagccctgcaaggtttgttgaggggcatggctatgaagtggagcatattattccgagagtaagatatttcgatgatagtttctccaataaggtttgcgcgtgtcatgaatgcaatgctgctaaaggggctcacactgcctttgattttatgtcggccagaggagagcagcaattcaatgagtataaagacagggcggcctatcttcttgaccaaaaaaagatctcgaagcagaagtataaatatcttatgatgtcgggttccgaaattccgcaggatttcatagaacgcgatctcagggagagtcaatacatagccaagaaagctaaggagttgttagttaccgtgataagaaatgtctattcatcttcgggctctgtaactgactttttccgtaacgcatggggatatgatacgattcttcacgacttgaattttcctcgctttgattcggcaggattgactgaggtccaggagtatgagtcgcatgggcataaacatcgtgagccgagaattattggctggaacaaacgcagagatcatcgacatcatgccatagatgctcttgtcattgcccttacccgacagtcgtacgttcagaaactcaacaccctgaacgcagccttcgattcgcgtgatgaaagaaatgaggccaagcaaaatctttcccgttgggctgcctcacaaccccacatcgaacgaagcaaagtaatggccaaagctgatgaaatagcgatttccctaaaaccgggaaagcgatttgccaccccgggccgcgcatataaagatccttccggcattttgcgaagaactttagtgccacgcgcccctctgcataaggatactgtatatggaaaaataaaagtgcccgatggcctaaaaaagattaagtatgctttagaaaatttatctcttgtggcagatgcggatctgaaagaagctctggccaaaaggctttcagaaaacatctatgatatcaaggctacattaaaatcattgaaagcaaatcccataaagaaagagggtacggaagtgagcgcggtgccatgtttcagagatgaaattgtagtaaggtatcctattgaggcaatcaaaaggaaggatctgagtagcgttgtcgacaagagaataaggaaagtccttgaaagtcgtttcgccgaagtttcttccgataaggatttcgtgaaaagtttggccgagagacccctctactctgatgccgactgcactaaccggattaaggctgtgagatgcttcacgggtataaaagcagattctttggctatcgtgcgtcggaacgaggccggtgactcaataggatatgccatgaccagaaataatcatcatgtggcattctatatcggcgaggatggtaaaccccttgccatcaccacgagtttctgggcagccataaagcgaaaacgctatggtatgcccgtaattattacggagcctcagaaggcctgggatatattgactgtgacagaggaaaatcctgatatccgggaaatagccgccgggcttcctccggagcaaagcagattcttgttctcgttaagaaggaatgaaatggtggtgttaggtatgtcggatgatgaatgggccgatgctatccgcatgaatgataaggccgctatctgccgacacctttatcgggtttggaaattgggtaacggtgactattactttaaattacatacaaatactacatctatcatagaagaaggagacaaggagatgtctgaatattatcgctgtgcatcaatagggagtctattaagccttaatccgcggaaagtcactattgatattacaggtgaaattgtgccggaaaagtaactcaagagtcggagtatgattaaaaagactcttagttttagttctaagacccatctgagtctacggcttggacaactcgtgattcacaagaagaatgaccaaggaatagacgaggagtatacacggcctattgaagacatcggggttgtaattatcgagagcggtatggttaccttatccgccgcccttatcgcggctttaactgagaataatgtcgccgtaatattctgcgattcccggcatatgccatcggggatgatgatgcctctttccggcaattgcgagcagtcggagcggtacaatgcccagatttcagcttcccttcctctcaaaaagcagctatggcagcagaccgttatggctaagatacgnncaatcaggcagccatattgagttgcgtctgtcagattcatgtcggtaatatgttggcatggtcggaaaaggtaaggagtggcgatgctgataatctggaagccagggccgcagtctattattggaggaacttattgtcagcctatcctgatttcaaacgtgaccagtttggcgactaccctaatgcattgtttaattatggatattcaatcttaagaagcgtgatggcccggtgtcttgtaggtagcgggcttcttcccacttttggcattttccacaaaaacaagtacaatgctttctgcctggccgatgatataatggaaccttacaggccttatgtggatctgctggcagtgaaatatttgaatgaacacccgaatgtgtcggaactctcaaaggatgctaagcatctgatgctgacacttcccactatggatgtgagaatgaaaaatgtgaggcgtccgttattgatagcagcatccatgacaacggcatctttggccaaatgttttttaggcgagatccgaaaaattgaatatcctgaaatagagatgtgatgaatatagattttattagctataatcggattagttcttataagctgatgtggattcttgtgatgttcgacctccctacagaggataaaatgcaacgaaaagcggcctcggaattccggaaactgcttataaaggacggattctcaat

SEQ ID NO: 3056 - DNA, 12217 bp, synthetic construct
  misc_feature 1..12217: note = Synthetic
  source 1..12217: mol_type = other DNA
ggcaatcccggtggttacgaaatcttcacaatcgacggcaaagatattaaatggagacatgagacatgggactatgaacctggcagacagttcatcgcctatgacatgaacaaagtcaaagaatatttcaacaacaatggtgaatacaaggcatatctgaaactctatccaaaggcttccgcttatgataaggttccgggaaatactgtctacatcaatctctgggcatgggatccggaagggaaactgaaagtgactgaaaacggcaaagaacttcctgttgagatgttcatgggtgagaatcccgatttcactgcaacctctttgctccaacgctctatctggatgaacaaatacagcaaatcagcgaaaaaacagaccttccggatgttcaaggtgactgcctcagcagccgatactccaatcgaaatctcctggactgatccattcggagtggaattcaaggagaccttcatccgcccccgctctttctctttctccgacctgaaagattgaattttaatcgagcattatgaatgaagcccaataaaaggcttcgggatatctctctttgatctttttcatcgccatgcggtatgccgcgtggcgattcttcattttcttccagtctttataaaattctgccataaattccgaagttgccttatcattgacactccataaactaacaagcagagattccacacccgcctgtttgaaacctcgcggcaaaccatggattccttcgaaattaaaatttcccaatgccgtttcacaagccgacagcgtgacgagtcttacccctttgagattcatatccgcaacctccattgctgtgagaatcccatcgttggaatcctcagcatctcctccggtccagctctgttcagcgcctgcaagcgccaccccggcgcgttgcatcgatgaatttaccgacatcgcatgcttattcatatatggcaccttaagagcatcttgaacatccgcaatatagaaaccatgtgtggcgaggtgcaacacatccggcactttctcaatcgcctctcggagattgctttcagaggcttccattcctgtaagaattctaactttcttaggagataaaacactgcggatactatccacttccgctaatgcaaacggcagctgccggaaatggcggcgtgcaatgccccgctcaccgctattgttctcttcttctttctgagatgatggctttgatgaaaacgccacatccccgagcatcaacatctccccgggagctccctcatgttttttctccgtaacgttgcctgtggtcgtaacctgatgtatctcgtattcatcaaacaatgtagagccagacagcgtgattatggcattgaaggaaatgctattgagagcaccgggcactgacatatagatttttttgacaccttccagtttcccgagcatcggttgccacagcaaatgatatagaccatccttaccgccatattccttatacatattcttagcagtcttaacggtatttcccaaccaatgggaattcataaattccacaaatcttgcatttgaagtcagcctcactgcaatcggagcatcaacatcctttctcacaataagcgcatatagattcgactgagagaatataaactcgatcgccgcctctccctctttcagacagtcacggacatcaccccatttaggcaagcgtttaatacttcgatcgcttttttcaaccatccccactattttgcgctcaaggtttctaatacgcacactaagttttagcgccgttgtgtcaagatcactcatagtgcggaaagacgttcttaaatccttcaggctatcccttagagcaattatatctggattctttgacttattaatagcatcctctgcttctttttgcgcccgcaattgcatcccggtacgatacaatatcccgtcatagagttttgccactactttagcaggatatttgtcaagaaggactccaagatattgcaccggatcgccgttagtagatataaaaacatcctgatcggttttggtcataaacggaagacgcgtattccattgctcttttaaaatattgaagtaccgctcggctgcctctactgcgccatctgcgtcattatttcccacacatgtgccggcatcataggcagcctctatacactccaaagtataattatcctgaccggtaacctttgccagctcggaaacctgggaaaatgatttcttgaagtttacataatcatttttcttcatgcataacaatgcctgactcgcatatgccttataccgctcaaaactattttttgacatattcaaagcgcgtttgatatcagaatccgccttctccagatctccaatattattcatgagataatgaaccttatccaacagaaaagatatataagcacttctatcagtaacgtagaatttcttttccatcaacaagccatccatctgctcatataacgcccgaacctcatctttatcgagcattttagcgaagtctggctgactcaatattttcatcaatggcagcacatatgcaatttcaacattttctgcaccaaccgatacaacatattccccggtatattttataagcatcaggcaactatactcatatactgcaaaatcttttttattattaagagtcaggcatctattacagttccccaaataatcgagcaatggcttagaggcttttaaattactgacatcagctattttctgaagatcttctgtcaccatccccgttgccttttcgttatccccgatataattataggttgtcaagccatatactgtcaatactctctgcactatgacggaacgtcttctccgccatcatgacggcgtcggcagcaccttttctattagcagtgagaatatgataggctgttatcatcttaaaagtatcatagttctgttcattaaacggcattctaatttctgagttccaagccgccttcaccaaagaatcactttcgatgtttcctttgccggcattcttaagcatcaaagccaacgaagcgttatagaaattcctatccttctgggagatagccggatctttcagtgcatttcgcaggatatctatcatctgaaaattattctgacaaacagctgccacacttgcagtcaaaaccaatatagtgataatcaattttctcataatctattctttatccttcaaatttagcaaatttatttgacagaagacccaatttagattctatttttagtctctgtaccaaatcccccatttatcgaacagggttcgataaggtaagaagtaaaagggaacaggtaaaaggaatgaataggcatgactctaatgtttgactctcgcccttcgcgtctaaatatttagttgactctaattgtttgaggcgcgccaattctcctttaacctattccctataacctttcaccttatcgtgtgccacccgataaatcgggatttgccaattggcaatctatttattatctttgcaatatattaaccaagatcttactgatcccattatgaaactcaatctaacatcatttgctttggcggctgcattcgctctgccgcttcacgcagccaatgaggctacaatcaagctcctcccttctgaggagagtcctgttatcgctaaagaaatctacggacagtttgccgaacatctcggcacctgcatatacggtggtttgtgggtcggagaaaattccaatatccccaataccaacggttatcgcacagacgtgcttaacgccctaaaagaattgcagataccggtgctccgttggcccggaggatgctttgccgatgaataccactggatggacggcttcggtccgaaggagaaacgtccacgtatggtcaacaccaactggggcggcactgtagaagacaattctttcggcacacacgatttcttcaacctttgtgaaattcttggctgtgagccttatctcagcggaaacgtgggcagtggcactgttgaggaacttgcaaaatgggtggaatatattacagcagaggagggaccgatggcaaaccttcgcaagcagaacggacgcgaaaaaccatggaaacttaaataccttggcgtcggcaacgagagttggggatgtggaggtaatttccgtccggaatattatgccgacgtgtatcgtcgctatcagacatattgccgtaatttcaacgacaacaagctttacaaaattgcatcaggagcaagcgattatgactacaactggactgaggtactgatgaagaacgcccgcaaccagatggacggcatttccctccattattatacggtgttgggctggtcgggacgcaaaggatctgccattgatttcacacctgaagattactactggactttggggaaatgtctggaagttaaagatgtggtgaaacgtcattgcgacattatggacaagtatgatcccaagaaacgcatcggattgctcgttgatgaatggggcacatggtgggacgaagagccgggtaccgtatcggggcatctctaccagcagaacacaatgcgagatgcaatggttgcagcattgagccttaacacgttccatcgcttcacggatagagtgaagatgacaaatatcgctcagattgcaaacgtgttgcaatcaatggtgctcaccaaaggtgatagaatggtgctgacacctacatattatcttttcaagatgtacgtgcctcaccaggatgccaaattgttgcctcttaatgtagctacctccatgatacgcgcacgagatggcaggcaggtaccggtggtagatgccacagcatctgtaaaagagggtaagactaccatctcacttgtcaataccgacctcgacaatcaggctgaaatcactatcgatctctccggcatatccgctaaaaagatcaccggtgagatactgacctctccaaaaatcaacgattacaacgactttgatcatcccgactccgtgaccctcaaaccttttgcaaaaggatggaaacacaagggcaacaaacttgtcgtcacgcttcccgccaaaagtattgtcacactctccctgcaataacgccaacaagattttgcgatttttcgcaattttattggaatatacatctaaatgttatatatttgcataacatgtttaacattgcttcccttcgccggttttcaaacggacaatctgatcacaggcaaggttgattcgattgttgaaacatattggaaccaagaagaatattcaccaataaacgataataacatgactgatcaaacacccggactgtttcaaaggctgaagaatttcttctgcagttctaataaaaccgataaggatgaaatagctttcaaatctgatatgaaagcgagcgaaccgaccgtaaagacaagccaaccggagattgaaattccggagtcagaaaagaaagatgtcaccacgttactgacagaagaaaaattctggaatctcatcggagaatcacaatcggcagatgatctctatgaaaagttatctcccctttcggaagatgaattgttcggtttcagatattggtgggaacacttttgcgacatgtcataccgacaagacctctgggctgcggcttatatctatcgcggtggctgtggggacgacagcttcgactatttccgctactggctaattacgcaggggcgtaaagtattctacaatgctttggagaatgccgactctctttgtgacgtgttcgcagaattacctgatgaagatccgacagatgaagaggcagactatatggtagtagacctgctcaaccgccgcaacaacgacagcgactattacgaccgagcaactaaaaaataccgttggccccagcaagaacgtcccgaaatggaattcgaatgggaagaagacgacgaagaatccctccgcaaagtctgtcccaacaccttcgaccgctggtggggcaaattacgctaaaaagacgagagagagaacttttgagttctccctctccagatgttttcacaacggaataatccttattgtgatttgcttcaattatttttgcacaacaaaaatacatcaaaataatcaagattgcaaattttctgcagaaatttgcaattaaatattaaaaattttatatttttgcatataaacttgaattataactttatatttagggattcaacgaatatattagagtaacctaccatatactggattctattatgaaaatacttggacttgacctcggaccaacttctattggatgggctttaattgagaccgatagcaacaataatcccatctcaatcttaggactgggtagccgtatcatcccctatagcaacgacactacggctgccgacttctccaaagggaaaggagaaagcccatgtactgaacgcacacgatgccgacagatgagaaggaatttagaccgatttcagttacatcgtgaacaactaaagaatctgatgacagagattggaataaccgactcggatttcaagccatctcctgccagcccggctgaaatatggaaatcaagagctgatgctgcaactcccggtataaaacttccattggacaaacttgcctgcgtgctgctgcatatcaatcatcggcgcggatacaaacatgcaaaatccgaccttggtgattcaaagcaaactgattatgttgcaaaaataaacgacagatattctgagattcaaaagacaggtaaaactgttggtcagtatttttatgataaactcaaagattctgaagtcattaatccagatggtaaaagatactacacatatcgcataaaagagaaagtgtgtccacgaattgcttacgaggaggaagttaaccgcatccttaagattcaaagtgaattttacccggatatattgaccgaagaaaataagaatgcaataaaacaggtgatcttttatcaacgtcctcttaaatcctgcaaaaatctcgtgtctttctgcgacttcgagaaacacgaattccttaataaagcaggaaaaaaagttgaaaacggacccaaagttacaccccgcacatctcctttagcccaggtttgccgaatctacgaagcaatcaataatattaaactcgtcaattctcgaagaagaaacaagaaaactgatattgcaccttctctctttgacgattcggagtgcgctcctaaagatttacgaaaacttatgccggaatataagttttcagatgaagaaagagaacgaatttttgtctttctcaacacacatgagaaaatgtcggagaaagacctcatgaaaatattggggttgacattcgaggatgggtttaaatcagacaaagcacttggcaaagggattcaggggaatacgacctggtgtcaaatagcaaaggctctcgaaagccatcccgacaaagaatctttactgagttttaatatctcagaagagattcctgccaccaatcccgatgtaaataaagagaccggtgaagttctcacacggataaagccagattgcactcagcaaccactatatatgctctggcatacactttattccattaatgacaaggatgagctgtttaaggtgctcactgaaaaatttggcattgaagatgacgagacattaaacaatctttatgctcttgatttcgtcaaagccggttatgcgaataagtcagctaaatttatccgcaaacttataccattgcttaagaaagggttgatgtacagtgaggcttgtgcaattcttggtaaaaatcatagcaacagtctcaccaaggaggaaaacgaaaaccgcgaattgcaacaccacctcactcctctccacaaaggagatctcaggcaacctgtggtagaaaagattcttaaccaggcaattaatgtagtcaatgccattattgatgaatatggagaaatagacgaagtgcgcgtagaacttgcccgtgaactcaaaagagataaggaaggtcgcgagaaaatggctcagaatatttccaaactcgagcgagagaacaaagcacttgcggaggagatcgcagaattaaatattcttccgactcgcagacgcatacaaaaaatgaagatgcttaaggaaaccgacaatcggtgcatgtattgcggcaaacaaatcactccttatcaattcatagaaggtcacggatatgacatcgagcatataattccgcgttcaaaattatttgacgacagcctgaccaataaggtttgcgcctgccgcgaatgcaatgctgccaagggtgcacagacagcgttcgacttcatgaagacaagaggcgaacaggaattcaattcttatctcgacaggattgaggatctatataaaaacaataaaatatctcgtggcaaacgcgaccgacttctgatgtctgaatccgcaattccggaagactttattgaaagagacctacgtgagacccaatatatctcacggaaatcattggagatcctttccagtgcaatacgcaacgtatatgcgtcttccggtatggtcacagatttcttccgacatgcatggggatatgatacaatactgcacgacatcaatcttccacgctatgaggctgctgacctaacagaagatgtggaatatgagacacacgggcaaaaacatacggcacaccgcataaaggactggtctaaacgtaaagaccacagacatcatgcgcttgacgctttggttgtggcactaacacgtcaaggctatatccagcgtcttaatacactgaatgccttgtcaaatagcgaggcagattctgaaggatggaatggtcttgacaaatgggcagctcagagaccacatattgaccgtgagaaggtgatgaatgcactggaagaggtagccatatcatttaaatcaggcaagaaactgactacccccggaaaacgctacatacgcaaaaacggcaaacggatttgcgtacaaaccggtgtgtctgttcctcgcgcaccgctccataaggaaaccatctacggacgtataaaagtcgatgatggagaaaagaaatttaaatttgcacttgacaatcttaaccttatagaaaataaagaaatccgccggcaacttgaattgcgactacaacaagccgaaggagataaggggagagtattgaaggatttaaagaagaatcctataaaaatcaatgatagggaggtagaaaacgtaagatgcttccgcgaagaaagtgttgtaaagtatccaattgaatcaatcgcatacaaggatgtgcgatatattgtggattctcatattcgagaaatagttgaacaacggtttgaagaagtcgggaagaaggataaagaattcgtgaaaagccttgcggaaaagccattatactcggataaagattgcaaacatctgatgagaaccattcgactgttctccggtataaaaatgtcgactttggctggtgtccgcaaaaatgaatccggagaaataatcggatacgcacaaaaacgcaataaccatcatgtcgctttttataagaatacagatggtaaaatcgtggagtctgttgtaagcttttgggattgcgtaaaacgtaaaaatatcggtttaccatccataatcaaaaagcccggagaagcatgggatgcacttgttgcattaggtgagcattcagacattgaagaaatcgcgaatactttgcctactgcagatagtgagtttataatgtcattgcaacgtaatgagatggtcgtactcggcatgtcggatgatgaatggaacgacgccttagcgtctaatgacattcgcagtataaataaacatctatacagagtctggaaattaagttcgggagaatactgtttcaagtaccaaacatgcacaacagcagcaacagaagatggtgataaagaaatcaagcaatattacattaccaagtctattccttctttaatcgcattacatcctcgaaaagtaaaagtatcaatattaggcaagtttaatcctctctccaatgataaagaaaacactatgctttagcaatcgcgcatatctatgctgcaggaatcgccagctcatcatcagagttgacgatccggcaacaggaaaacccttggaacattcgcgtcctatcgaggatatcggtgttgttgtaatagaaagtgaacaagtcactttatcgtcctatcttatttccgcattactggagaataaggtagctataattgtatgcaatgacaaacatatgccagctggattgatgttacctattgtagggaacacggaacaatccgaaagatatgatgcacagataacagcttctcttccgctcaaaaagcaactatggcaacagaccattgccatgaaaatcagaaatcaaggtgcagtacttaagaaggtgaataatctggaaataggcaacatgctcgcctggtcatcacaagtaaggagtggcgatcccgacaatcttgaaggaagagcagccgcctattattggagaaatctattcggagaagactccggatttgttcggagacaggaaggagatgatcctaatggattgctaaactatggatatgctatattgagagctgttattgccagaagtcttgttgcaagcggcttaattccaacgcttggaattcaccattctaacaaatataatgcatattgtcttgctgatgatataatggaaccatacagaccatatgtggatctgatggttgtaaatttgatacgtaaatttcacctttcaccggagatatcaaaagaaacgaaaaaacacctgctgacaattcccaccatagatgtcaagatggggaaactatctcgacccttgatggtagctgcatccatgaccacggcttcccttgccaaatgttatcttggagaaacaagaaaacttgtatatcccgaaatagagatttaatattaagtcgtttaaacaccttctttttaatattaatctcattagttttcaatacctactttatgtcaatggattttatttcatatcaccgtgtaagctcatatcaactcatgtggatattgataatgtttgatttgccaactgaaaccaaacaacaaagaaaaagatattctgaatttcggaaatcattaatacaagatggtttcacaatgtttcagttttcaatatatgttcgcaactgtgcctcccgagaaaacacaaaggtgcacattgacagggtaaaaaatctccttcccgaagaagggaagatatgtataattacaataacggaaagacaatttaatgaaattctattattcgaagggttaaaaaagacccctccaatgcccgatgcaattcagttggaactcttttgaaaaacaaaatcttaatcatataaaaagtcagtggacgttttccactgactttttataattctattcctccatataaataactatatatcagaataatactacgatcgtgatgtgattcgcagtgcaaaaataataaattcgaagcaaatcacaacgaaggtggtaatatacttaagtctttaatcgatgtgattcgcagtgcaaaaataataaattcgaagcaaatcacaacacagaattggatagattatttcaaggcgcagatgtgattcgcagtgcaaaaataataaattcgaagcaaatcacaacattttaatggtcagaattattttgatactagatgtgattcgcagtgcaaaaataataaattcgaagcaaatcacaacaattagcacagatacatgcatctattgatagatgtgattcgcagtgcaaaaataataaattcgaagcaaatcacaactatgtactattttcgccgtatctgctacaagatgtgattcgtagtgcaaaaataataaattcgaagcaaatcacaacttttgaagcgtttgctcccaagcgttttgtgatgtgattcgtagtgcaaaaataataaattcgaagcaaatcacaacatgaagcgtaatgcgcttcgtaagcaaatcgatgtgattcgtagtgcaaaaataataaattcgaagcaaatcacaaccccactaattacagttccctgctcggagaagatgtgattcgtagtgcaaaaataataaattcgaagcaaatcacaacaaacttttggaaacggttttaatggaggtagatgtgattcgtagtgcaaaaataataaattcgaagcaaatcacaacatattggtgtgaatagtgatagatcttcttgatgtgattcgtagtgcaaaaatgggtcagcaacgctttccgtgcttc

SEQ ID NO: 3057 - DNA, 5777 bp, synthetic construct
  source 1..5777: mol_type = other DNA
  misc_feature 1..5777: note = Synthetic
cgttttataaaaactcatcaatccttatgtatgcgcaatttatcgattacactcctacattcatgtagggaatggtttgtcgggataaattggttattaatcaaacgcagatatttagctcgcttcgcaagcgacgcagatgtgacgagatagaaacaggattagcgatgcacccaccgagtcgcagcttggggttggcaaaagtgtggtatgcagcttcggagaagcctacccgctaacggtatctatttagcagaatatcaataagctaataatttagattgcgcatctagcgcccacagaaagaactattccctccacaaattgcatcccggtttagacaaaaaagaatgaggaaatcctaagatttccccactctgaatgttttcacaacggaataatccttattgtgatttgtttgagaattttatttttacaccgtaaagttaacgttaaaattttaaatctcaaaattttattgtgatttttgtcaataaattttaattttatcaatatttttgactactttagtaaaaaattatttcacgttaaacaatcaactaaccataatatcattaaatgaaagtattaggattggacataggcccggcatccctcgggtggagcttggtggatttctcttcagaatttacccaagtagctattattgctatgggaagccgcattataccatattctgaggatagcgtagttggcgattttaatgcaggaaagggggagaccgcctgttcgatacgtcgagtttttcgacagatgcgccgtaatctcgaccgctggcagttacatcgcgaacagctaaaggacgttcttatccaagccggcattatgcaagataaagaatcgttccccaatctgcatacccttgacgtatggaaattgcgggcaaatgcagcttccccagaaaatcaaattactctctctgaacttgctagagtactgttgcatatcaatcaccgcagagggtataagcatgctaaatctgatgccggcgattctaagcagtctgaatatttatctggaatcaatcagcgtttcaaggaaattactgaagcaaatgtaactgtaggggagtatttttatcgtaatattcttgattctgaacatatttctcctaaaggtaaaaaatgttactcatatcgtgtaaaggagaagattttcccgcgtgccgcatattttcaggaagtcgacacaattctcgaggcgcaaagccggttttatccggacgttttaacaaccgaagtaaaggataaaatcaagcaggttattttttatcaaagacctttgaagtcgtgtaaacatcttgtatcgctatgtgaatttgagaagaggcagttaaccgattcaaatggcaaccaaaaagaaataggaccgcgcgtggctccaaaaacctctccgttggctcaactctgtcgtatttatgaggctattaataatatctctcttactaatccccgaataaaggaaaacagaaaagtttttgaaccttcgctgtttgatgatcctgctaattttcctaagcaagcccgaaaactacaacataagtatgatatcaatgctgccgagcgtcagttaattgctgattatatgcaggttaatgagaaaataactcttactgagttatttaaattattggggctcaaaaaaagcgacggctttcaaggtgacaagcttattgctaaggggataaaggggaatgaaactgccgtacagatacgtaaggctctatcaaatctgccgcaagataagatagatgagttgatgcgcttcaatattgagtttgcagaagatgtaaataaggaaacaggcgaggtatataaggttatttcttccgcctacgaacgtgagccattatatatgttgtggcacactctatattcaattgacgatagggatgtattattgaaggttttgcaaaataaatttggaatccaggatgaaaagacactcgaacgcctttttgcactcgattttgtaaaggccggttattccaacaagtcttctaaatttatgcgccgtattctcccgtcgctcatggacggcatgaaatataacgttgcttgtgaacggattggagtaaatcacagcaacagcataaccaaggaacagaatgaccagcgcgtattagttgataagattcttccgctcagtaatggggagcttcgtcagcctgtagttgaaaaggttataaatcaggttgtgaatctggtcaacgaagtaaaggctaaatatggtgaaatcgacgaggtacgtgttgagcttgctcgcgagttgaagcagagtaaagaggatcgggcacaaaccacaagtgcgctaagcaaacttgagaaggacaataatcgttatgctgaagagattaaggaattaggattggttccgacacgtcgtcgcattcaaaaaatgaagatgcttaaggagaccgaaaatagatgcatctattgtggcgctctggtttcgccaactcagttcattgatgggcatggttatgaaattgagcatatcataccacgcagtcgcctttttgatgacagttttgcaaataaagtttgtgcatgtcacgaatgtaatgcctccaaggggaataagaccggttacgactttatggaaggaaagacagaatccgaatttaactcttataaagagcgagttatcggaatgtggacttccggacgaatttcaaagcggaagaaggattatctactaatgcctgaaagcaaaataccatccgacttcctcaatcgcgacctcaacgaaacgcaatacataacacgtaaggttatggaagtacttagatccggtttccgcaatgtctgggcttcttcggggagtgtcactgatttcttccgccatgtctggggttacgacaatatccttcacgatttgaatctacccaaatatcgtgatgctggattaactgaggatgtgcaatatgaatcccatgggcaaactcatactgcgcatcgtattaaggattggaccaaacgcaatgatcatcgccatcatgctgtcgatgctcttgttgttgcacttacacgtcaggcacacgttaaacgactaaacgatctgaatcaagtagatagagattctttggggtatgagattagcaaaaaaaatctcgaaaagtggggtgccgagcaaactcatcccagtgttgaagaggcttcgcgtgaggttgaaaagatttctgtttcgtttaagggaggcaagaaactcgctaccccgggtaagcgatgcactgaccgtaatggaaatgttcgacgtactcttgttccacgtgctgcgctccataaggagactgtttacggcgaaattcttgtggccgccggggataaaacattaaaagatgcatataaagatttaaccctcgtagttgataaaactctgagagagcaactttatggtcgtcttcaagaatgtgataatgatctggctgctacacttaaatcattaaagaagaatcccttaatgaaaggtgatgagccggtgcagagagtcgcatgtttcaaaagggagatagtggtcagatacccgattgcatcaatagctcgcaaggatatcgacagtatcgtcgattcccgcatccgagagttgatccgcgatagatataaaacagtcgcaaacgaaaaagaattccagcgtagtcttagtgaatctcccatctattcagacccatcgaacactcataaaatttctcacgtaaggtgttttaccggattgaagccagaaacacttgccacagttgcgaaaaattccgacggaaaggggattgggtttagtcagactcgtaataatcaccacatggcaatttatgttgattctgaagggaactattcgcatttggtcaccagtttctgggaatgcatcaagcgcaagcggtatggtcttcctattatcgtaacagatccagctgaggcgtgggatgctctggttaactgcgaggaaaacgaggatattgaagaaattgcaaaaggtatgccagcccccgattcgcaatttgtgatgtcgttgcaacgtaatgagatggtggtgctcggcatgagcgatgaccagtggaatgatgcagttgcaaacaatgatgtcaaagagataaataaatatctctatcgggtgtggaaaatagctgttacagaatattgttttaaatatcacactaataccactgcagctgttaaggaaggtgataaagaaattagagctcactataaattagcctcattaggcgctttatttgcattgaatcctcgaaaagttagaattaattctttaggggagttaatcttgtaaacaaagatttctatcatatcccccgcgaagcataactcgtgggggatttttatatatgtcaaccttaaagttatgattaagaaaacattgatgttcagtaaccgggcgtatctgtctttgcgttatgaccagatggttattaagcgtattaatgaggaaggtcgagaagaaactgttacacgacctatcgaggaccttggtattgttatgattgaaaatccacaggtcacatttaccgctgcgttaatggataagctgttgcaaaataatgtgtctgttattttttgcgatgaccggcacatgccctctggagtattgatgcccctcgaaaagaatgacacgcagtccgaagtctataatgcacagatagatgcctctgttccgctcaagaagcagttgtggcagcaaacgatagttgcaaaaattctcaatcaggctgccgctttgcgaattgtcaataatgtcgaaattgggaatatgcttgcgtggagtaaaaaggtgctgagtggtgattctacaaatctcgaagcgagagctgccgtttactattggaaaaatatattccctcagttccccgagtttgtgcgtcatgatggcgacgggaatgatcccaattctttgctaaattatggatatgccatcctacgagctattattgctcgctcgttagtaagcagtggactgcttccaactttcggaatatttcataaaaacaggtataacgcatattgcttggccgatgatattatggagccctataggccctatgtcgatttgatggtaaatgacatactaaatcagggttatgcgccagaggttaatcagcacacaaaaaagattttactgaccctacccaccgtcgatgtgaaaataaaaaatctaaaacggccactgatgattgcagcatccatcacaacatcttcattagcaaagtgcttcttgggagagagcagaaaaattatttatcctgaattacctctctgattatggattttatatcatatagcagagtcagctcctatcgactaatgtggattctagttatgttcgaccttccaacggatactaaagaccaaaggaaagcagcttcagagtttcggaaaaatcttattaaggatggttttacaatgtttcaattctcgatctatgtccgaaattgtgcctcaatggaaaatgcaactgttcatctggaaagggttagaaaattaataccggcagaaggtacagtatgcatgatgaaaattacagagaaacagtttaacgacattcaaatatttgaaggttctaagaaggcagccccactaccagacgcaatccagttagaattattttaatcgtcataaaacaataaaaaagtagcattcgcatgctacttttttaatttctataaatcaccataactgtcaagcattcaactaataacacaaatcgtattgtgatttataggtaagcattaactgaaatacaccttttgg

SEQ ID NO: 3058 - DNA, 5409 bp, synthetic construct
  misc_feature 1..5409: note = Synthetic
  source 1..5409: mol_type = other DNA
ataatccttattgtgattggatgaattttatttttttctttgcaccgcaaaactaataattatttttcatttatgcaatgtttttgcatttttttttgtaattttgaggaaaagagtgaatgaagttgaaaaatcaacttttttgacattgtctttttaaattttagtaaacgattttcattaaatatttcataaaaatacataccatgagagttttgggtcttgatataggcagtgcatctgttggttgggcagtaattgatgtcaatgattttaccaatgaagctgaaaagcttttgggtcttggcgtcagagtgattcattatgccgatgattcggcggctaaggattttagtcgcggttcaggcgaaacggcttgcagtaacagaactatgaagcgccagatgcgtcgccaactcgatcgctggcagttgcatcgcgaacagttgcgcgatatcctggttaagaatggattcatagccagcaatgaggcgttcgagccgttgaatcccgaggagcagtggcgattacgtgccgatgccgctcgaccggagaagcagttgacgctcgccgagattgctcgcgttttgttgcacattaatcaccgtcgcggttatctgcatgccaagtcggatatgaacaataagaaggagacagagcatgtagctaagattaatagtcgctataaggagattaaggagttgcagaagactgtgggtcagtatctttatgataaccttatggcgtcggaaaccgtatcgaagaggggtaagaagtgttacacctaccgcattaaggagaaggtatttccgcgcatggcttataaggaggaggttaaacagatccttgagtcacaggcgcagtattatcccgatgtcttgacgcccgaggtacgcgacgcgctctttaatgttatcttctatcagcgtcctctgaagtcgtgcaagcaccttgtggcgttatgcgacttcgaaaagaagagtgtgaagcatgctaatggccaggtgtatcattacggaccccgcgtggctccccgctcgtcgccgctggcacagatgtgccgactctatgaggttataaataatatccgattggagaacattcaaaaggagattgttaattctcatcctcaattagatctgtttgacgatgtcgcaactgcaccgaaagattatcgactaatgagacgtatatatgagttttcggcagcggagcgtgaggcgatttttaaggcgctgaatgagagtgagaaactaacattcaataatcttaagaagctaatttcgcttaagggcgatgcggcaaaggggctcgtgggcgataagcagataaatgccggcatcaaggggaatgatacttatcgcaggatagcagcggcaataaagaatctgccagccgagaagcaagaggagttgctacgttttgaagtgtatagcgaagtgcatgtggatcccgctacaggcaaggagcgcaatatgattagcgctgactatcaaaaggagcctctctatatgctatggcatacgctatattcgatcgatgatcgcaacgagttgttcggtgtattgaggtcgaagttcggtatcgaggatgaggagacgctcgatcgactctttgctatcgatttcgtgaaggatggttacagcaataagtcagcactctttattcgcaagatattgccgatgctgatggatggcgacggatatagcgttgcgtgcgaaaaagccggcgtgaatcatagcaacagtctcaccaaggaggagaatgagaaacgcgaacttaagcagcagatcgatttcttgaggaagggtgaactgcgtcagcccatcgtggagagtatcttgaatcaatccatcgcattggtgaatgccatcaaagaggagtttggcgagatcgatgaggtgcgtgtggagatggctcgcgaattgaagcagagcaaaaccgaccgtgcggaaacgtcgaaggcaattgctcaacgcgagaaggagaatcaggaattggccgcacagattagtggtgagggcatccgtgccacaaagcgtcgagttcagaagatgcgtatgttggcagagacaggaaatcgttgcatgtattgcaacgccccggtgtcgcctgtacagttcctcgagggtaatgagtatgaaatggagcatatcattccacgcagtcgttatttcgatgatagttttgccaataaggtctgtgcctgcagggagtgcaatcatgagaaggggaacaagaccggctatgactatatgaagggtaaggccgggtctgaattccatgcttatgaattgcgagtaaagcagttatttacagataaaaagattggtaagaggaagcgcgattaccttctaatgcccggcgataagattccggatgattttgtgaatcgcaacatcaatgagacgcagtatatcaaccgcaaggtaatagagattctgcgcactgccttccgcaacgtgcgtgcatcatcgggcgaggttaccgacttcttccgccgtgcatggggctacgatacgatgctccatgacctgaatctgcccctgcatcgcaaggccgacctgacagagcaggtggaatacattacgcatggacagaaacacaccgttgagcgaatcaagaactggagcaagcgtaacgaccaccgtcaccatgcagtcgatgcgctggtgatagcccttacgcgtcagggatatattcagcgactcaacacgctgaatgcaatcaaggatatgcgcgctgaatatcttgaagggaagcagagcctgaaccgctggagtgcgatgcaaccgcacttcgatcgcagcgaggtgatgcagagacttcaggagctctcaatctcgttcaagcggggcaagaaactcaccacacctggtcgcaaacagattgtaaatggcgaggtgaagcgtatggcggtgccacgttcggcgttgcataaagactcggtatatggcaaaatacttcttcatgacggattcaagactataaagcaggcattggcgataccgcaacttatctgcgacccggagataaaagcacaggttgtagccgcactcgaaaagcataaccaggatcagaaagctacactcaaatacctcaagaagaatccgattgaggtgaacggtgataaggttgaggagatccggtgcttcaaagaggaggttgtgataaaatacaagatatccgcaatcaccaagaaggatttaccgagtattgtcgacaaaaagattcgggatgtcatagaggcgcgattcaatgaattagccaaggagaaggactttgaaaagagtcttgccgagcgaccgctatactccgacgctgagggtaagcatgaaatcaagactgtgcgatgcaagacaggaaatgacctgtcgaagatggcggtaacacagcgcaacgaacggggcgaagcgatagggtatagttcgactcgcaacaaccatcacttggcattctataaggatgctgagggtaacattattgagtcgattgtaagtttctgggattgcctcaagcgtcagcgttacggaattcccaccatcattgagaatccgtcggaggcgtgggatatgctgttggaacatgaggagaatgaagatattcgcgagatagcacagacactgcccccggtgaattcgaccttctggatgtcgttgcaacgtaacgaaatgttcgttctcggcatgaccgatgatgaatggcgcgatgctgtgaagtcgcgcgactatgcaacgctgaataagcacctctatcgcgtgtggacgttgtctacgcgtgaatatcgatttaagcgtcagactaatacacaggcagcaatagttgatggtgacaaggagatgtgtcagcactatatatgtaagtcgattggtgcatttatggcattgaatccgcgcaaagtgagtgtaaacttattgagtaagataatgcttcctgagatagatgattaagcagacattatttttcggtaatcgggcctatctctattctcggaatgagcagctggtgattcagcggcgcgatgagaatgataagcctcaggaggtgacacgccctatcgaagatattggagtgatggtgattgagagcgaacatgtttcgctctctgcccacctcatttccaaattgatagagaataatgtggcagtcatattctgtgatgccaaacatatgccctcaggattactgatgccattagagaagaatagtgtgcagtcggaggtctataacgcacagatagcatgctctcaaccattgcgcaaacagctgtggcaacagacagttgtcgctaaaatccgtaatcaggctgcagtgttgaagatagcaaacgatacggaggtggggaatatgatggcatggtcgaagcaggtggcaagtggcgacgcatcgaatctcgaagggcgggcggcggtctactattggcagaacctcttcccggagtaccccgactttctgcgtcatgaggtgggcgacaaccccaacgcgttgctgaactacggctatgcaatattacgctccgttatagctcgaagcttagtgagtagtggcttgttgccaactttaggaatctttcataaaaacaaatacaatgcctattgtttggccgatgacatcatggagccatatcgaccatatgtcgatatgttggtattagagatactgcgcaaacaccggcttggtacggatgttacgatacatagcaagagggtgctactcaccctacccaccgtcgatgtcgagataaaaaacatgacgcgcccattaatgatagccgcctcgatgactacggcgtcgttagcaaaatgctatcagggagagacacgcaaaataatatatcctgaaatcaagtactgatggcaaaactggatatcatatcatatagtagaataagttcctatcaactcatgtggatactggtaatgtttgatcttccgacggagaccaaagagcaacgtcgtgatgcaaatcaatttcgcaaggctctactcaaggatggctttacgatgtttcaattttcgatctatgtacgcaactgtgcgtcgaacgagaacacacaagtacatatcgagcgcgttcgcaagatgatacccaccgaagggaaagtctgtatcatcaaaatcacagagcgccaattcaacgaaatcctactctttgagggcgtttgtcgtactccacccatcccccaagccatccagctggagttattctgagtaaaatagagaaatagttgtatgattaattatggctatatagtattcgccgccgaggacagtcatgttatgattgggtaagtttttattatctttgcactatctatcacaaccataaaagatattcagccatccgaacagtggttgtgattgggtgaatttttattaaatacgccataaaaaccacctaaaatagctg

SEQ ID NO: 3059 - DNA, 4411 bp, synthetic construct
  misc_feature 1..4411: note = Synthetic
  source 1..4411: mol_type = other DNA
gcggtccagagcgaattttacccggatatacttacagaaggcaatcggcatgcgatcaagcagactatcttctatcagagaccgctgaaatcctgcaagaatctcgtatctttctgccagtttgaacggcatgaatttctcaataaatatggagagaaagtagaaaacgggccaaaggtaacccccaggtcatcaccgctggctcaaatctgccgcatatatgaggccatcaacaatatcagactcgtcaatgcccggcgacaatgccagaaaacggattgcacgtcttccattttcaatggtccggcctccactacgagagaggtccgcaaactgatgcctgaataccgttttaacgaagaagaatacgaacgtatttttgattttctcaatacccatgagaaaatgaccgagaaagacctgtttaaattgctgggtctcgctgctgatgacggattcaagtccgacaaggccctcggcaaagggataaagggcaacactacccgctggcagattgcaaacgcccttggcgaccaccccgacaaggagaaactgctgcgttttgaaatcgtcgaagagcatccggcgtccggtccggacattgcggcctccaccggcgtatatacaccagccgctctatatgctgtggcatacgctctattctatcaaagacaaggaggagctgttcaaggtgctttcggcgaaattcgggattaacgacactccgaccctcaaccgactatacgctcttgatttcgtccaagccggctatgccaacaaatctgcaaaatttatacgcaaactgctgccgctgctcaaacgtggcatgatgtatagcaaagcctgcgccatggccggcgtgaaccacagcaacagcatgactcgggccgaaaacgaagaacgggagctgcatccaaagcttgcccagctgcgcaaaggggaactcagacagcccgtagtggaaaaaatcctcaaccagaccatcaatgtggtcaatgctatcattgatgagttcggagtaattgacgaagtccgcatcgaactcgccagggaactaaaaaaggacaaagaggggcgtgaaaaaatggcccgagacatcgccaggaatgaacgagaaaacagggctctggcagatgaaataagcggactggatatacagccctcacgtcggcgcatccagaaaatgaaaatgctcaaagagaccggcaatcgatgcatgtattgcggcaaacccgtgacaccgtatcagtttatcgaaggccatggttatgacatagagcatataatcccacgttccaggctgtttgatgacagtttcgcaaataaagtctgcgcatgcagggagtgcaatgctgccaaaggggctcacacagcctttgacttcatgaaatcaagaagcgagcaggatctcaattcgtatcttgaccgcgtggatgaattgtacagggccaataaaatatccaggaccaaacgtgaccggctgctgatgtctgcatccgacatacccgacgatttcatccagagagatttgcgtgagacccaatacataacccggaagtctatggagatactttcagcagccatacgcaatgtccatgcttcatctggaatggtaacggactttttcaggcatgcctggggatatgacaccatactccacgacatcaatctcccacgatatgaggctgcaggtctgactgagaatgtggaataccagtcccacggacaaaaacacatggcacacagaatcagaggctggtcaaaacgaaaggaccacaggcatcatgcacttgacgctttggtcgtggctctgacccgtcagggatatatacagcgtcttaacacccttaatgctctatctgacaaaagtgacgacggtgaaaaatggagcagccttgacagatgggctgcggaaaggccgcatatcgggcgtcagaaagtgatagaggcattggagaaggtggccgtctcgtataaaccgggcaaaaagctcactactccaggcaaacgatatgtccgcaaggatgggagacggacatgtgtccagacgggtgtgacaataccacgagctcctttacacaaggagaccgtttacggccgaataaaaattgatgacggagaaaaggacttgaaacacgcgctccagaacatcaaccttataaaggacgacggcatccgtcagcagcttgctatgcggctgcaagaaaatgacgggaacatccccttgaccataaaggctttgaagaaaaacaatctggaagtcggtggccgttcagtggaaaacgtaagatgttatcgcgaagagatagtcgtccgataccctcttgaatccatccgatataaagacctgcgctacattgtggacccacatatccgtgagattgtgcagacccggttcgccgaagtcggaaatgcagataaagactttgtaaaaagcctcaccgaacgtccgctgtactccgacaagaactgccgacatcaaatcagggccatccggctaatctcaggcttaaacccgtcgacgcttgccggcgtgcgcagagaccaatcaggcgatacaatcggatatgcccagacgcgcaacaaccaccatctggctttatacaggaatcccgacggcagtattgtggaatctgtggtcagcttctgggactgcatcaaacgaaaacaggccggactaccgccgataatcaagaatcccgccgaagcctgggacacagtcattgccaacagtgaatctgcccgtttcgcaggtattgcagacacattacctcctgatggcagtgaatttatcatgtcactccaacgcaacgaaatggtcgtgctcggcatgtcggacgatgaatggaacgacgctgtggcttccaatgatttccgcaccatcaaccgccatctttaccgggtttggaagctaagttctggaaagtactgttttaaattccacaccaacacctctgcggccatcgaggacggggacagggaaatcaggcaattctatgtgacatcactgtcttctttaagggcactacatcctcggaaaatcacaatatccatactcggcaatcctgacagtctctccgatgataaagaaagtcctatgctttagcaatcgcgcctatctgtcgtgccgtcagcggcagctcattatcaaggctaccgaccggatgaccggtgaaccatgcgaatactcgcgccccgtcgaagacataggagcagtggttatcgagagcggacaagtcacactgtcatcacatcttatttctgctttgcttgaaaacaaagcggctcttatcatatgcgatgaaaagcatatgccatctggattgatgctgcctcttgaagggaatacgctgcaatcagaaagattcgaggcccagatttcggcatctttgccgctcaaaaaacagctgtggcagcagaccgtcagcatgaaaatcaagaatcagggcgccgtgcttaaaagagccaacagcatggagataggcaacatgcttgcatgggcctcacaagtcaggagcggagaccccgacaatcttgaaggccgagccgctgcctactattggaaaaacctgtttggagaggactacggttttgtccgcggacatgaaggagacggtcctaacgtactgcttgactatggatacgccatactcagagccatcattgcccggagtcttgtggccagcggactgatgccgacactcggcatccatcattccaacagggacaatgcctattgcctcgccgatgacatgatggaaccctacagaccgtatgttgaccttatggtattagacatcatgcgaaagcatcaattgcctcccgaaatttcaaatgaaaccaaaaggcatctcttgagcattcctgtcatagatgtcaggatggggaaactatcgcgcccgctgatggtagcagcctccatgaccacagcttccctggcaaaatgctatcttggcaccacaagaaaactcctgtatccggaaatagagacatagaccgcatttaccatgctgacagacttaatatcatatcgtcgtataagctcataccaactcatgtggatacttgttatgttcgatttgcccaacgagacaaaacggcaacgtaaacgttactcggaatttcgaaagttcctgattcaggatggcttcaccatgtttcagttttcgatatatgtgcgcaactgcgcctccagagaaaacactaaagtccacattgacaggataaggaaactcctgcccgatgaagggaaagtatgcatcatcacgataactgaacgacagtttaatgatatcctgctgtttgaaggcttgaagaaaactccgcctatgccagaggcagttcagctcgagttattttaacgtgagttcgatataaggattacaaaagtcaatataaaaacaatcagcca

SEQ ID NO: 3060 - DNA, 4669 bp, synthetic construct
  source 1..4669: mol_type = other DNA
  misc_feature 1..4669: note = Synthetic
ccccggaatcactcgccccacacacgtacctcgcccctgctccgtcaactctgccgtttcctccagcacctcctccgcagtaatgtcacagaccggcaaacattccgtcgcaccgtaaggcgaatgaatctctgcattcggtgccacagccttcaaatccgccatcaactccggcggcactgatgcccccgccatcaacacccgacgcaaatgggttaactccaaccgattccgctcacaatagcgaacaatcatccgccacaacaccggagaaccaaaactattcgtcaccgcatgctcctgcaaagccctcacaattgccgcaggcttcgccttcgcaggcttggaaggattgaccggcggcaccaccgtcgtcatccccaatccaggattgaacaaagaaaacaccggcaacagcggcaaatccacctcacccggctcaatcccatatacctccctcaccaactttacctgagcatcaaaatgacgatgttcataacaaacccccttcggtgcccccgtggaacccgaagtaaacaaaatcgccgccaaatccgtaggctcggccatcgcaggctccagcttcaaagcaccctgcgaaagaatctttgccaaaaaaccacgccccaccctcaaccgaattccaatcgacgaaaaatccgctttaaaaaacaaagaaaacaccatcgccaaaccaatgccgaccaacgccttcggacgcgttctcgccacacattgacgaaacgacttgatccccattcccggatcgatcacgaccggcaccgcccccaactgaaacaaagcaaagacaatcacgatcaactccaaccccggtcgcaccatcaccaacgtccggcaacctcgtccaaccccctgactccgcaaatattccgcggctccagcaaccaaacccgcatattcctcaaaggtccattggcggcaagacccactcccaggctcaatcagtgcacacttctcaggatgctctgcggccatctcggccaaaaaccggcatacattcgagttgtccgcggacaccagcccgttccgcccctcaataatcagtgacagtaatcaacccccacaaaaaagaacgttcctgcccactgaaattttcccgctgtagcatcacttctttagtcgttatcggaagcgtcaccttcgaagttggtcgaaaagacgccggcttgctacgataaatccccagcagattaaactcctcctgcttgtaaggattcatcgactgacgacgtgagcagccactggcaaaaataagactcaaacatgccaatatcagggtaaaaagaatggggttacgtttcagcataaccgcgaaacaatgagtaaatcctcccattcgtcaagctcatgaaaaaatcgccccccagttaaaaaccggagggcgggtagtttaccttaaaaaaggatatcctgcgaagcttagcttcttgttatggcaagcaaaacaggcttcttttgattacaaaaccatttgaaatatttccatttatggagtcaattaaatagatgcagaaaatcttaggactcgatttaggaacgaattcgattggatggtctttgctggaagaagattcagcagactcctcaaggattctgggagcaggtgttcgaatcttctctgaagtcactgaaagcaaaagcaaaactcttaagaataacaaacgcagacaaaaaagaggggaaaggcgtcaacgggctcgacggaaaatgagaagggacaccctaatcagttttttgctaaagaagaattttcttcctgcacacacagaagatagcaatccccttgaagaatggttctgccaaatgcccaatccttatgaactgaggaccagggcactggatgactctctctccatggcagagttggcaagaatatttctccatatttgtcaaagaaggggatttcaatccaaccgaaaagcgaaaaagaaagatgacgatggtaaggtaaaatctgaaatcctagagttgcaggaaagtatcgatgactccccttatcgaacactgggagaatacctgtttcatcaaccgactcaaagacgccgctacacatccaggcaaatgtacgaagaggagtttcgcaccatttgcgaatctcagcagaaacatcaccccgatctccttgatgcagccacacagggaaggttgtttcagatactgttctttcagaggccattgaaagtgcaaaagcatttgattggcaaatgtagcctcgaaccaaaccggaaaaggtgttccaaggctcacttggattggcagcggtttcggatatggcaggatctcaatcatttaaccgtcaaagatccgattactcggcaaaatcgtgcactgagtggtacagaaaaggaaaagcttttcgagaaattggacgagaaaactcacctcacttggaagcaagcccgtaaagttctagggctccatgatggtgaacttttcaaccttgaagaatctgatcgcaaacacctctcagggaatgaaactcaggggaaattgatcaaggcgatagggtcaacctactcaaatttaactccagatcgacaagaccaactagtcaccgatttattcacaatcagtgacgagagaccgctgatcaatcgtctaaagaattattggaatttctcagatgaggagatcgcaagcttatgcgaagtagaactaccagatggttatggcaatgtctcaatgaaagcggttcgaaaactattgccccatcttcaacaagggaagccttatacgaatgcgagagaggatgcaggatatgaaatcgtcgtaaattatggtgaaggtgcagacaaactggaagaagttccagatttgcgaaaccctgtggtcagcaaagcactccatgagctgaggaaagtcgttaatggagtcctccgccagcacggtaaacctgacatcattcgtgtggaaatgagtcgggatctcaaacagtcagaaaaacagaggaaagaaactcaaagaatcatcaaccagaacgaacagaaaaatgagagagtccgtgaagtactcaggaatgatttcaagctttctaatcccaaaagagaggatattcagaagtacattctttgggaagaaaccaatcatgaatgcccctacacaggagctaccattggtagagagaaactatacagttccgaagttcaaatagagcacattttgccatacagccgcactctggacaattccttgtccaacaaaacattgtgtttagccatcgagaaccagcagatcaaaaggaatcaaactccttacgaggcttattcaggaaaacctgagaggtatcaggaaattctccaaagagtcaaaaagctacctctctccaaacgcagaaaatttgaacaacaggctcttgaagaagatgccttttcggaaaggcatctgaacgacacacgatacatcagccgtgctgccaaggattacctactgacactgggcacgaaagtccagatagggaatgggaggttaaccagtatcctgcgaaacaagtggaatctgaaccaaatcctcaacccgcatggagatacaaagaagaagaatagagacgatcatcgtcatcatgccatagacgccactgtagtagcactgacttctcctggattgctccaaagagtatcccaactctcagcaaaattagaagaaaaagaattaaacgatgcaaacttcgtccttggagaaccttggcctggttttcatcaagaaatttgcaaactcatctacaatatcaatgtatcccatgcacctacgcgaaagattgcaggagccctgcataaagatacagcatatggatatatcgaatcggagaataaatttgtttatcgcaaacccattgagactctgaaaaagtcagaattggaaagagtacgtgataaaagtgtaaaggaaatactgaagactcgaatagaggaatacgatggcaatttaaagcaagcctttgcagaaccagtgtatcatgtggatgggaaaacgagcataatgaatgtacgcatcaataaagacaaaatttcaaaagtttctgtattctccgtagccagaaatgggaaagaatacaaacactatcaaacagggaataaccatcaccttgaaatctttgaggaagtctcaggcaaatggacttgtgaaattatatcaacacttgaagccgcacgaagggtgagaattcgaaaaataaatctctacaatcgtgagagcccaaaagggaaattcgtattctccttagttgcgaatgattgtattcagataccagatggtgaattcaaaggtatttaccgagtccaaaaaattgagacgacaggaggaggtcgagttgttttaagaagaatcgaaattagctctactgattccaaagagggctcaattaccaaaaacattaaccccttaaaaaaattgaatgcccgaaaggtgatgatcaaccccattgggcaaatctaccctgcaaatgactaaccgagttgttctcatcacccaacaggccagtctacactacagcaaaaaacatatcatcatagaattcgagtggggcaaagcttccgaaaaaatccccttggaagacttgtctgtattgttgctggagcatagacaaatcagcctgaccagttccgttctgtactattgtgctgaacacaatgttgcattgattacgtgcgac

SEQ ID NO: 3061 - DNA, 7682 bp, synthetic construct
  source 1..7682: mol_type = other DNA
  misc_feature 1..7682: note = Synthetic
cctcactacactttaatagacctgagataatagacctgagacctgagacttttttagcttcgagcctcgagtactactttttacttcgtgcttccaacttctcaactcctcagccacgcccttgacgtggcaagctctctccactcctctctactccaacctctctacacttctaaacaactcctcactcctccctcctccctacacttctaaactccttatcctctcaaccacgctcacgccttggcgtgacgtgacaagcctcactcctcactcctcactcctcactcctcactacacttctaaactccttatcttctcaacttctcaacgctctgagccccataatttccagcctctgctgaacgttttaaaagcagaacgccatttaaggcactgttttttatatacaaatagataccgcatcaaccgaagtccagacgaaatacagaaatccaaaatattattgtaccttcgctgtaagaccaactaaaaagctttcttttacgattttccattgcatatgactaccctcgtccattctctttcctctgccgttcgcaagcgctacaacaacctgctggaagccatcgggaatacgccgatcatccgcctgaacaaggtttcggaagatctcggcacgcaggtttgggccaaaatggagtccttcaaccccggcatgtccgccaaggatcgcattgcactccacatgattgaagaggcagagcgcagcggaatcctgcagccaggcggtaccctgatcgaggccacctcgggcaatacgggcttcagtctcgccatgatcggcgcgatcaaggggtataagtgcgttttgaccctgaccagcaaggtgtccaaggaaaaaattgacctgcttaaagctatgggcgcagaagtagtcatctgccccaaagatgccaagccggatgatccggaatcctattatcgcaaggcggaacaattggcccgggaaattcccaactcgctgtacatcaaccagaactacaacaacgaaaatatgcgggcccattacctgtccaccggaccggaaatctgggcgcagacggaagggcgcatcacgcatcttgtcagcagcaccggcaccggcggcacgctctgcggcaccgcccaatacctgaaggagcaaaaccctaatatcaaggtcgtcggcgtggatgcgtacggctctgtattgaagaaattctgggaaaccggcgaatatgatccgggtgagatcaaatcctatcacattgagggcaccgggaaaaacatcattcctgccaacttcgacccaagcgtgatcgacagcttccaaaaagtttccgacaacgacagcgcccaccgcgcccgggagttggccgttactgaaggattgatggtcggctattccagcggcgccaacgtacaggcgctgtatcagatgaaaggacagtttaagcgcacggattgcgttgtggtcatcgtttgcgatcacggcagccgctatctgggcaaggtattcaacgacgaatggatgcaggaacaaggtttcctgtagttaaacgatattttatccccttaatagccaaaggaaagtgatattgctatgcagagttgggctgacacggacactttgaaccgctacctccggcgcatcgacggcgccatactggccggacgttatacgctggcgtacaaactggcataccgctgcctcaaggcgtattataaggcattcatccaatccaatatgccggaagaataccagcgcaccagcgtcgacctgatgtcggtgtccatttgccggtatttgtaccgctactacaaaacgaagggactcccctactccgacaagaccatcctgttcatcgccctgttcagcagtcgcctgagcctgatgaatatggatctcaaaaacccctccggctccagcggcatcgaccgcgccgttgccacctatgcccgcgacagcgtggaccggattgtgcggtatttgctggggtattgaggggtgcggtgcatttctaacacacgagctacagccaccatgcaggtgacaaaactaacgtttaactcttccttgagttaactgtaacacctcattacatttccgtgactgggcttattgctgggaaatgtttgaaccacattactgtcaggaccagacgggtgaattgtctgattagtgatcagaaaggccttccttccataaactacaatcccggaacaaaactgccccgggactctagtcaagcttccgcttcggaataatccttattgtgagttacttcaaattgtaacaaatttaatacttttggataaaacaaggtattaatatgaaaaagattttgggattggaccttggcaccaactccattggatgggctttggtcaaaatggaagaggaagaatgtaaagaaatatccggagccggtgcaagaataattcctgccgggaacgacgagatcatagaattccagaagggtcaaaccaaatcgaaagcggcggaaagacggcagtatcgcatgtcaagaaggatcaatcatcgctatattcaacggcgggacaatctggtaaaaggattgctcgcaattggaattatgccgggagatctgttttacaaattgcatcccaggaaatgttcccaaattctagaaaggcttgccaaggaagatatcaatggcagtacgttagaaaccaatgttcctgaaacagatatagaacattattctttaagattgaaagccttaaaccaaccagtttcttcaggtgcatttggaagaattctataccatttcaaccaaagaaggggatatcaaagcactagaaaagaaaggaaacaatcgtccgatggtgtgccctccaactataaaaagcaggttgaaactatagtaatcgttgctgcagagcccaccggagaaaccaaagccaaaaagaatgagtatttacttcatttgaatgatggaaggactgcaaccacacttaatgaatactatgcccagaaactcaaggagcctattcaggtagaaacaagatggcggaaaaataaaaatggcgaagaaaccttagaagttgcttatttcgatcctaccgactggcaaaaaaggctggatgctttagaccgcgagtttgaacaatcgggtatgtttcccggagcctattttcattcacaactaaagctaatgccaagcaatcaggccggcaaagactatcgaatccgtcaacaattcattttgcggaaaagatacatagaggagttcaatgctatctgggacaagcaggaagaataccattcttttctaaaagatgaaagtgcaaaagaaaaagcggttaaggtcatccttcctgaaaacagcccagagaggaaatattggttaaagcgcccgttaaaagagctggtaagggactacattatttattatcaaaggcctttaaaaacaaaacgatcaactatcggtcattgcaccttcgaacccctaaaaaaagttacgcccaaatctcatccggactatcaagagttccgtgtttggcaagcagttcataacctaagatatttaaatgaagaggaatctttgactgagctttctaaaaaccaaaaagtgaacctttttgaagtgctttcacaaaaagagtatctggagccggtaaagctgcctacaatattgcagcttcctgaaaatacccaatttagaattacggataaattacctggaaatgaaactttaagcgagtttctcaaggcagctcgaaaggcagaaattgaaattgaaagcatcattaccaatcctgcacaaaaaatagacctatggcatatcatttattctgttgacagtgaagatgcaaggataaagaccttacgaaaacgcttcggttggacgcccgctgtggctcaggtttttgcagatctttattttgaaagagattttggcagtttaagtgcaagagcagtgacacaaatactgccgcttatgcgggttggtcaatactttaatcaggaagatatttccacaaaagcacaggaaaatattaaaagcctgatggaaggtgttattcctgttgacattccggaagatattgccaaaaaactggctgaaaaaatcaatactacgccggtagataatgggttttcatattcggaggcagcagccttggtgtatggccaacatgctaatcttcattcctctggtaaaatactggctcctgaaaatttaaaaccacttccggcccattcattacgcaatcccttagtcgaaaaagtcatcaatgaaacacttcaattggtagctgagatttggaggacatatggaaaacctgatgagatcagagtggagcttgccagagaactcaagcaaaacaatgaggaaaggaagaagtcctggcaaagaaatttacaacgtgaaaagaaacggaaggaggttgcagttgaaataaagaatcaaaaaaattttggaatatcccaaccttccaaaaaagatattgaccgctatttattatgggaagaagccggctttcgttgcatttacagtggcaaaaatatcccggtttctgcacttttcaatggtgaaacggatgttgatcatattctccccaaagagcgtttttttgatgactcatttgctaataaagtgctggttttccgctcggaaaatgaacgaaaaacgaataaaactgcctacgaatacatgcagggaaagggacctgctgaatgggaccggtttgagaatgaagtgaaaaatcaatttcggggcgctaaaaagcgcaacctgcttgcaaaggaaataccgcaagattttgtaaaacgccaactcaatgaaaccaggtatatctcccgaaaagtgaaagaagaactccaaaaggtttgccccggcaaaatattttccacttcgggtaccattactgactacctgaaaagtatctgggatttacacgaaacattcaaaaaaatccagcttccccgttttgaacgcatggaaaaaataaccggggatgcctggattaaggaagagataaaccgtgaaaataaaagagtgctccatttacgagaatgggacaagcggattgaccatcgccatcacgcccttgatgcaattgtagttgcggttacccggcaggggtacatcacccaactcaataccttaagccagcaattcagtttttcaaccatgaaagacaagtctgtcaggcgatttaagctccccaaccctgcattcagatcgatggtaatggaggctattgatcgcataattgtttcacatcggtccagaaaaaggctaacaaacgcaacagtcaaccactatcttttgagagatccagatggaaaactgatacagaaaaaacaggatgcaggccatttgaccggtgtgcggggagaattgcacgaacaacaaccattcggaccggtacagctatacgaacgaatcaaggtggaaaaagcctttgaaaatcttggaaaactggctgttgactggcaaaaagccctggtaaaacagcgcttaacagatcacaacggagataaaatccaggcaaaaaaatcgctaaaaaaatcgcctttggtagatatgaagggcgagccgctttctgaagtaatcattttcgaaacgcggtttgcaaaaagaagagatttaaatcccaatatctccgaaaaacaactcaaagaaattgctgaccggaaacttcaaagagaattgctggattttgttgatcagttccccagcgggattaaggaggccttcacagaggaaaacctggaaaaattcaatcaggacaggcataagcctgtttttaaagtacgaacccacaccaacggaaacccggaagagctcaaccggaaattttcgacgaatgacaagttgtttgttgaaaaagggaataattattgttttgtaatatatgaacacgagcagacaaaggaacggtcttatgaggtagtgtctttctatgatgctgtgatgcgacgcctgaatggagagccgcttgctcctgccaaagatggctgccgtcagttcactttgtcgcacaacgaaatagtgtacgtaccggaatcggatgaagtactggaagaaattgactggaccgatacaaaacgaatcgcggggaggttgtataaagtggaaaagtttacctcaaaaggctatgaaatccatttttctcctatacattttagtttgagtctatccggtgaatttattcatcctaatccatcggataaaagcacattcactttagacaccccaaggatttcaataaaaaccaaatgcataaaagtattcattgaccggctgggccggataaaaccaggataacatgttaaaaagaaccctctatttcggcaatcccgcctatttgcggaaagaatcagcacagcttgtggtgcaatatccaggaaaagaagaacataggtcggtgccgatagaggatcttggaattgttgttttggatcatccccaaattaccgtaacacaatctcttttgtccaccatgctggatcaaaagattgcaatcgtttggtgtgacgcaaaacacttaccctccggcctcatgctgccgatggcagggcaccacctccacgccgccagaattaatatacaagccagtgtatccttgccgctcaaaaagcggctatggcaattaacggtcgctaataaaatcgctaaccaggcaggattgcttcgcaagttgagcaagcgcgcacccgtattggagcggatggcggacctggtgaaaagcggcgatcctgaaaacctcgaagggcaagctgcaaacctctattggcaaaacctctttggagattttaaccgcggcagatatgaagatccgccgaatcacctgttgaattacggctacgccatccttcgttctgtcattgcaaggagtctggtgagtaccggtttgcatccggccctgggtatctttcatcgcaaccaatacaacccatattgcctggccgatgacattatggaaccctaccggccttttgtggacgaattggtttaccgggtttgggtcagcgaagaccagcagccggacacgctcagtacagaaattaagaaagtcttactgcaaataccagccattgatgtgcttattgagggaaaaatgagcccgcttatggtagctgcccaaaggactgccgcaggtctggcagcttgtttcgaaggagacatgcgaaaaattccctatccggtcattcaataaattgtgcatcaatggatttgtcctttaaccggctaaaccaatatcgcatcatgtgggtatttgtattctttgatctgcctgtgcagaccaaacaggaaaggcggcagtacaccctgtttcgcaaacatttgctgacaaacggcttcactaaaatccagtattcaatttatgcacggcactgtatgagcaacgaagcggccgatgtgcatacaaagcgggtaaaaaaagccttaccccctaaaggagaagtcatcattttcaggttaacggataaacaattcggcatgatggaatactttttcggccctaaaatgacccaccgaccggatactccccagcaacttgaactgttttgaaatgaaaaaaccggcttaaatgaccggttttccaagcaaaaaagcgagttttttatttctattttcacattcaactatttgaatataagcaagttaaaccctaataccttttggcaaaactcgctatttcaaaatctgaaagcaactcacaac

SEQ ID NO: 3062 - DNA, 23357 bp, synthetic construct
  source 1..23357: mol_type = other DNA
  misc_feature 1..23357: note = Synthetic
gtgcatctcgaaatgctcgttcaagcgcattgcctttgcgaatcgcgctgccaccagtcaaacgcatcgcaatatccgaaacctttatcgccgcctctgttgccgcgatctttgcaatggatatgcgagcaggacgctcgatcgccggccacgcggcgtcttcaccggccgccagcaagtcggccgttcccctgatcacgcgctcggccaaatccagttcggcaagggcttggcctagttggtgctgcacatagccggtatcgcggaccaggacattgtcgcccgaaaccgttcggccgagcgatttcttggacagcgagtctcgcaccagacgatatgcgcggtctgcgattccgagatagacccctgcaaacggaaagctgacccattccatctgtgcgaccagtccggtgcggaacgggccggcatagctgtcagccgaaaccggaaccttgtcgaaaacacaggtctgcgtgccggacgcgcgcatgctgaaggtgttccatgtgcgatcgatgctgatgccaggtgagttggccggaatgatgaacaccgactcgcgctgtttatgctcttcgaagctatcggggagcctgccatcggcatccgtgatcgttgcattgaaggtgacgatatccgccccttcgatgaaagtggcccagttctttttgccggaaatgtaccagccaccgttgccatcgggcacggccacagtgtccgcaatcgttgaaaagcccgcccgttcctcgctgaacggaccagagatgagggcatcatcctccacgatcttcttgaacaggcgcgcccgcacatcttcgggcagcatatcgcggaagatgccaaccatcacatggtgcatattgaaagacagggtaatcgctggatcaccccatgaggcgagctccttctcaaccaaggccaccgtccaaagatccgctccatgaccgccatagcttttcggaacaatgagcttggcaaggccgctctctttatagattggcaccagctccagtggaagttggccctcctcgtccgccttggcactcaacgctgagaaattttccgcgacctttcgcgcccgtgccacgagatcttcacgttcagccggtgtgatttcaatactatgcttgcccatgggcctctccttcgcttgtgcaggatcgcgagcatggacgatcttgcgactggctgcgtgccgatcgatcgcgccagggcagggctcgaccacttgcaacccaacctgttccgggctggaatgtaagcggttcggcctcgatcacggcatctttccgatcagcacttgcggctatacctagtcaaatactgcattttagcaagtgtttattgaatgaacaaaataacgattggtgcgcctccggatttaccggatcgcggagccgcccgtgagcgcctccacacgctccatccatggcaatatggcaggtacggtgcgcagcaggtccaggccgtgcccggaaccggcaacgcattccagttgcgacaccaccgcgatgtccgccagcgtgaggctctcgccaacgaggaagtcccgatcatccaacagggtgccaagcgtccgcgcgtggcgcttcagttctgccagaatatcggcttcgctccggcgcgcgagtccctgtgcggtcccctgctttcgcgtaagatagggaaccagcgggcgggcgacacgacgcatcagcgcattgtcatatttgaggatttcgctcacccagcgtttgcggtcatagggccacgtgaatcgcattgtcatctcgaagaaatagaggctctcgtccgcccagtcttccagcaggtgaaccagggcgcgagcctgcgggtcttgcggaaagagggcaggctggggggtgtggaggtcgagcgcgcgacagatgtcgctcgaatcgtgcaggacgcgcccgtccagttcgaggattggaaccttgccgaccggcgacaatcgcttgagtttgccaaggtccgccatgggcacgttatgcaccgcataatcgaggcctttataggcgagaacacgtcgcaccttgtcgcaaaacggcgaaatttccagttgatggaggatgattcccgccatggcgctctcccgtcattctttaaattgtgcattgacgacactatttaataacgatagagtttggccgagcttgggtcaatgcacatcgcaggcccggcaatgagaggatagcgtcccatggcccttgtcgaatatgcgcgtgaaggcgtgatcggccggttgacccttaaccggccggaggcgggaaacgccgtcagcccagagttcgtcgccgatcttgcaaaggcgatcgacctcgcctgtgccgatccggtccgcgcgatcctgatcgacgcgcgcggagcaaatttcagtcttggcggcgatgtccgtcatctcgccgccgcggggaatgatgtggcgaatgtcctgcgggatatggccacccgcttccatgaagcccagctcaaactgtgcgagctgcccttgcccatcgtgtccgccgtccagggcaatgcgattggcggcggcttcggactcgcgctttcggccgatttcattctttgcgccgacacggcccggttttcgaccggatattcacgcctcggcctgagcgcggacgccggcgtcagctacttcctgacccgcgcattgggagccaggcgcgcaacagcgcttctgatcagttcacggttcctgtccgccgaagaggcgcgaacgatcggtatcgtcgatgatatcgtctctgaagcggaccttcagggcaaagcgatggccttcgccgatcaattggcttcgggggcgacttcagcctacgcggcgatcaagcgcctcaccgacgcggccagcagatcgggactggcggaccatctcgatcgcgaagccaccgaaattgtcgcccttgcggcagccgatcaggtgcccggtgcgatcgatgctatcgcaacccggcagcagccggtttttcagggttgaaccagcaggggcactaagaatcgacatggccggattatatttcgacgaattggcaccgggcctgatcttagatcacgcgaccaggcgcaccgttactgaaacggataatgtcctgtttacgacgatgacgatgaatcccgcgcagattcatctggatgcggactattgcactcgcacggaattcggacaaccgctcgtcaacagcatcttcacccttggcctcatgatcggtctttcggttggcgataccacgctggggacgaccatcgccaatctcggcatgaccgatgttggctttccggttcccgtattcgtgggcgataccataaaggcgcgaaccacgatcaaggaggcccgaacaagcaagtcgcgggacgatgccggaatcgttaccttcgagcatcaggcgttcaaccagaaggaccaactcgtcgcccggtgcctgcgtgctgcgctgatgctccggcgaccggtatgatgttgcgctcctttctctttgtccccgcggataatgagcggaagatcgcgcgggggttgcagtcggaggccgatgccttgatcctcgatctggaggattccgtggcgcccgaccgcaaggaggaagcccggaaacgtctcgccggacatctcaccaatctcggcgggaacatcgggccgaagctttacgtacgggtcaatccgctcgacagttcccatgcgctggatgatctgcttgcggcaacccatataatggttgcgggcatcgtcctccccaaggcctgcggccgtcaggatatcgaccgctgcggacactatctggatatggcggagagagcgcagggtatcgctcccggcgccatcggtattctccccgtcgttacggagacggctgcggcggtgctgagattgccggaactcgctacgccaatcgggcggctacaggctatgacctggggtggcgaggatctggcgacggtgcttggcgcccgtgggaacaagcgttcgtccggggaatgggacgacagcttccgtttggcgcgcgcgctcgcccttctggccgcggccgcttgcgacgtgccggcgatcgatacgcttcacgccgattttcgtgacgacgaagggctgcgggcagccgctctttccgcccgatatgccggcttttcgggcaagatcgcgatccatcccgatcaggtcgccatcatcaacgagatattcgcgccgagcgagacggagattgaggacgccagggccgtcgtcgccgccttcgccgcgtcacccggaagcggcgttgtggggcttggcggccggatgctggatcgtccgcatcttgtcgccgcgcaacggttgctcacgataacaggagtggcaattcaatcatgaccgatgagccgggtgcgatcctcgaacgccagcatatgcaatcgcgcgatccctcatcggtatcgattgcgttgcgcaaagaccgcttgcgacgcgccatcgaggctctgtcgagtcacgagtcccggttctgccacgcgctggccgaggatttcggagtccgcgcccgcgagcagtcccagttgtacgatatcgtcgcgtcgctccagaccttgcggcatacgctcaaacatgtcgatcgctggacgcggcccgaacggcggccggtggacatggcgcttcgtctgttcggggcttcggcctggattgaatatcagcccaagggggttatcggcatattgtcgccctggaacttcccgctctatctgaccttcggcccactcgccggggttcttgccgccggcaatcgtgcgatgatcaagccgtccgaacatagcccggcgacatcaagcgtgttgtcggatgccatttcctcggccttcgatcaggacgaaatcgcggtggtaacgggaggcgccgatgtggccgccgccttttccgccctgccgttcgaccacatcgtctttaccgggtcgacggccgtggggcgtcatgtcatgcgcgcggcggcggacaatctggtgcctctcacgcttgaactgggaggcaagtcgccggtgatcgtcgggacgaatcccgacacggcgctgatgtgcgatcggatcgtcaccggcaaacttctgaacgccggccagatttgccttgcgccagactatatgctcgtgcccgccagggaagaggcggctgtcgccaggggaatcgctgctgctgcggaagccctctatccgaatctgaccgccaacccggaatatgcctccgtactcggcgaccgcaaccgcgagcgactttgccgctacgttgaagaagctcgtatgcgcggcgcgcgcgtgaccgagatcggtgcctgctcgaacgacggccgactgcctttcacgatccttcaggattgcccgccggacgctgcggtcatgaaggacgagatattcgggccgattcttccaatcatgtcatatggctcgctcgacgaggcgatcgcgttcgtcaatgcgcgtccacgcccgctcggcctttatttcttcggccgggacaaggccgaggagcgggaagtgctgtcacggaccgtctctggcggtatcacgctcaacgatgtcgtgtttcatgtgaccgttgaggatctgcccttcggcggcatcggggaatccggctttggcgtttatcatggcatcgaggggtttcgcgagttcagcaatgcacggggtattttccgccagtcgcgcttcgatgtcgcacgcatcgccggctttcgcccaccctatggtgcgaagctgaagaaattcatcgcaaagaatctgggcagcagccaggcataatgatcccaaggagaaggatatgaccccgccgatcgatcatccgctcaatctcaccacgcaggcgatattgacgtggggcagttggagcctgaccgcagtagcgttgctcatcgccgttctgcttgggatgcgggagaaaacgccattctaccttctgcttcttctggcttccatgttcggagccttcgctgaaccgctctatgacgaaggtctgatgctctggttctatgagcccggcatctggtcccattttaccgccttcggcgtgccccagcccaattggacccatagcggatatgccatactctatggcagcgccgccatgatcatcaccaagtccattcatgacggggcgatttcaaaaagcagcgtgtatatcttcttcgcgctggaacttgccatgtcctgcatgtttgagatgttcgggatcaacggcggcgcctatgaatattggggtccgcacgtctttcgcttgttcaactatcctgtcatcatcggtatccttgaagccacgcaggtcatttttttctcgtttgccgcgatcgagcttcgccgtcgggcgaagcatccctcgcaccttcttggcctcttcgcgatatttccgatgactttctatgccgcgaactttggcatcggcggcccggtcatcatcgcactgcatcttgacgcgccagccacatccacggcattcgtgatgtttggtaccctcctgagcatcggcctggtattcgtcgtcctgcggatggccggaaacgtgatgatgggtcaggccgcagcaggagagaatccggctggatagacgggaaattctacgagaggtcggactgcggcaatcctgcaaatatcttcatggccgatgagttgctggacaatgtcatgccctaccggctgacaaaaagcgggaccggttaagtccgatcatattggaaaagcttccaacgaatatttggtgcgagcgagattctacttccggtcggatgcagcatctcctttcaatacatttacagggcgccctgaagctgggcagagaaatgcatacactgaacgaaatgggcaggggagggcattttgccgcgtttgagcagccccgcatcttcatctgcgaagtgagacagacatgtagtgagccggcctcgccggcggtgcttgccggctgaatttcgcggcgtgggcgccattctctccggtttggccgaacgtccagaatcgtgccagataaaaaccatgtattatttgcatggtttctatattgaactatactcacaatgttgtaatgactaggtagcgatcggggagtcgacagcatcgaccccaacccggcgaggttctgacggccatgatgcgatggccgcataaggtggaggatgtcatgaaaaagtcgcccttgaaggctcggtttctgtttcagtcacttggcatggccgtgctggcgcaccagtttgtgtcaccggcattcgcacaagccgaaccttcgtctgcaccgcagactgccgagcggctatccgacgaccaactgggcgagattatcgtcacagcccaaaagcgttcgcagtcgctcaacaatgtcggcctctcgatcacggccgcggatggcgagcaactcactaaactgggcatccgtgaaaccggagatctcgtgaagatctcgcccggattgaccttcaccaagagccaggacggcacgccgctcttcacaattcggggtgttggtttcaacgattacacgttaggcgcaagccctgccgtgagcgtctatgtcgatcaggttccgctcgtttacagcgcctacacgcagggtgcgacgctcgatctggagcgtgtcgaagtgctgaaggggccgcagggcattctcttcggccagaattcgacgggcggcgcgatcaactatatcgccgccaaaccgacggcagactttcaggctggcgtgaaagcatcctatggccgcttcgacacgttcgacggcgaggcattcatcagcggtccgatcaccgacactctgggcttccggctggccggcggcgcaacgcaatcggggaactggcagtatagctacacgcgcgatgacaagatcggcgcgcaggacatcctgcgcggtcgcctgcttctggattggaagccgaccgatacgctctcctttctgttcagcgccaatggttggcgtaacaagtccgacacccaagccgcccaactcgtgggactcaagctacagcaggatgcttccgctctgggcctctacgatactgaggaaaccctgagccggattgccgcattccgggcctatcctcttgcccccggcgacgcgcgttcggccgactgggatatgggcaggaacttgaagcgggatgacagcctctggcagctttccctacggggcgatctggagttgggcagcgggattatattgacctcgctgacttcctacacgcgcttccgccaggactacggactggatcgcgatggcacgaccctgcaaaacgccggggtcgaatcgcgtggcaatgtcaaaaccgtcacgcaggaattgcggctttccggagagagcgacaggctgaactggatgcttggcggcaactacgcgaaaaacaagattcgtagcgcagacaattttctggtgaacgattcgaccaatacggccatcttgcctggttttggcgtcgacaacggaaatacgacgatcacggagaatattcgggatctggccgcattcggcaacgtcgaatataaggtcacggatcagctaaccatcctcgccggtgcccgctataccgataccaaaaacgactacactgcctgcatgcgcggcggccctggccagcaattcgtattttggcagctctctcaggcaatcagcggcgttgctcaacccgcacccgacgcgaacacctgcgtcaatatggatgaaaccacgttcctgttgatcagaacccctttccagagcaagctctacgaggacaatgtctcgtggcgtgtgggcgtcaattacaagccgacccgtgatgtgctgctctattcgctggtttcacgcggctacaagtcaggaaatttcccgacggttccagcgtcgaccacacagcagttcgcgccggttaagcaggaatcggtcaccgcctatgagatcgggatcaaagcgaccgcccttgatcggcgcctgcaagtcaatgccgcgatcttccactacacctacgatgacaagcagattcgcggacttgtcatcgatccgatcttcaaccagcttgaaaagttggtgaatgttcccaaatcccgaatcaacggtgcggaaatcgacatcacggcccggccgatgtccggattgacgcttcggacggcaggcacctggatcgactccaaggttctgaattttgtcgggatcaataatgaccgggttttgggtgactatcgcggatcggaactgcccttctctccgaaatggcagttggttggagatgcggaatatcgctgggcgctcagcagcgatctcaatgcgtttgccggggccaacatcctctataatagcaagaccaattcgaccctgggcgctccagagagttcgcggatcaaggctttcgcaacgctcgatctccgcgccggaatttccgggccggatgacaagtggaccctgtcggtatggggacggaatgtgacggacacctattactggaccaaccagtttgtcactcaggatgtgattgtgcgctatactgcaatgccggcaacctttggcctatcggcgagctatcgcttctaacactccctgtctcaggcttcccgacggcggcattggccgggattctggatctggttcgttcaacaggcgctgtttgtcgttcgtggggttgtttccttggggttagcgactcatgccgcagatgatgtcatggccgtgatcgagagggatgccccatttttgagggatcaggaggtagcacattctgcgccgtcgctttggaacggcgaatggaggtgcgttgcggcgcaacttccctgatcagtcgttgtgaagaacaggtgatgatttttggcacggtccggcttgaaacaagtataaaaaaggcgacgccggagcgtcgcccttatctgttgcgtactgacacttgttaactgccagaccgcgatctctgagtggtaatactgggcgattcgacagatgtagtcaagcttgtccttgtatcatcattcatttcggttgcgcttttttcttgaccggaacgggagaggctgcctcactggcaatgccaaatccggtggggacgtgatggttgaaaagaaaggccgaatttggcgtctgggcgccgatcttggtgcaaactcgcttggctgggccgcgatcgagctgagcgcggcggtcgatggcaagcccgtctcgatccttgctgccggttcgcgcattttcagtgatggccgcgatcccaagtctggcgcatccctcgccgtggaccgccgcgatgcgcgggcgatgcggcggcggcgggaccgattccagcagcggcaaagggcgctgatcaaatatctgatcgccgacggcctgttcccggccgacgaggccgcgcgcaaggccatggccgcgattgacccctatgccgtgcgggcacgggcgctggatgcgcctctctcgctgccggaactggcgcgcgcgctgttccacctcaaccagcggcgcggcttcaagtcgaaccgcaaggccgatcgcaaggcggacgatgacgctggcaagatcgcgctgggcatcgaccggacacgcgacgccattcgccaggcggaggagggcgccggcgcggagccggggagctggacctatggaaaatggctgcacgaacggcgcgccagtgccgctgacgccaacgccatccctggcgtaagaacccggttgcgccccgaaagtggcgaagatgccaggggcgacggctatgatttctatcctggccgcgcgttgatggaggaagagttcgacgccatctggcaagcgcaagcaccgcatcatcccgatgtgctgacgaacgcggtacatgatcggctgcatgagatcatcttctaccagcggccgcttaagacacctcggatcggcatgtgcacgctggttgccggcgaccagcgcctgcccaaggcgcatccgctgtttcagcgccgtcgcctgctggaggagctgaatgcactcatgattgtgcggccgggcgaggtggcgcaacggctgacgcgggaagagcgcgacatattgttcctaaagctcaaggataaagggaaggtcagcttcgccagcctgcgcaagactttgaagctcgaccccgaagcccgtttcaacaaggaaagcgagaaccgccccgacctgaaaggggatgaagttgccgctgcgatgggcgcgaaggcccgctttggcaatcgctgggttcatctgtcgatcgaggagcaatgggatgtcatcgcacgactggaagcggtcgagagcgatgccgaggacgcggctctccgtatttggctaagcgacacccatgatctgacgccggaacaggcgcgcgctgtcgtcaatgcgcctttgccgccgggctatggccgtttcggcgaggatgcgacccgaaggctgatcgaggcgctgcgcgacggtgaaaaggatgggcgtgtactggtctatagcgaggcggtgatcgcggcgggttttggtcatcatagcgacctgcgcaccggtgagattttcgaggatagggaggggcgtccgcagcttccctattatggtgtggcgctggagcggcacatcatgccgggcacgggcgatccctcccacccagaggaaatgcgggtcgggcgcctgaccaatccgaccgtccatatcgggctgaaccaattgcgccgcatcgtcaacgcgctgatccgcgcctatggcccgcctgccgaaatcgcgatcgaactggcgcgggaactgaaactgaccgacgaggacaagaagcggatcaacaaggaaaacaacgacaaccggttggcggccgagcggcgatcggaaaagctgctggccatcggcaagcccgacaccggcgccaatcgtgcattgctgaaattgtgggaagagcttaatcccgacaacgtgctggaccggcgctgcatctatacgggccagcagatttcgatcgatatgctgttttcagcggcggtcgaggtcgatcatatcctgcctttcaccgcgaccctggacgacagcaacggcaacaagatcgtctgcctgcgcgaggccaatcgcgaaaagcgcaaacaatccccttatgaggcatgggggcacagcgatcgctgggacgaaattgccgcccgcgccgcgcaactgccgcgcaataaacgctggcgcttcgagccggacgcgatggacaagttccgggaggaaggcggctttcaggcgcgccatctggtcgatacccaatatctcgctcggctgtcgcgcgaatatctggcgacgctctatcccgacaaaggcgaggggacgggcaaaatctgggtatcgccggggcggatgaccgagatggtgcggcgcaagctgggtcttaacgacctgttgcctgatcataacttcggcggtggagcggatcagcccaagaaccggctggaccatcgccatcatgcgatcgacgcggtggtggtggccattgtcgacagagccatgctgaacgcgatttccagagcctccggtcaggacggtgtggacggacgcgagcggatcgagatcccaccaccttgggatgggtttcgcaacgacctgcgcgcggctgtaaacgccatcaccgtcagccatcgcgccgaccatggcaccgcatccaaggcgggactggccaagggtgccgacgcgaccgctggccgcctgcacaatgatacggcctatggcctgaccggtgagaccgacgccaagggcaacagcatcgtcgtgcggcgtgtgccattgtcgagcttcaggaagctcgccgatctggatcgcattcgggaccgcgacctgaaggccgcgctctaccagcatcttgacgggctggagggcaaggccttcgaaaaggcggtggcgaatttccccaatctgggctggcataattttggtggggtgcgccgcgtgcgcgtgaccgaaccgctgacggttatcccgatacgggatcggaatggcctgatctacaaaggctataaaggcgattccaattatcgctacgatgtgtgggaattgccggggggtaagtgggtgacgaactggaaaaatgaggacggtaacgccttatccagcgtaatatcgacatttgatgcacatcaatcagtcgatttaccccgcccgcatcccgccgctcgaaagattctgagcctgcatcaaaacgatcttttggcgattgaacatacaggagaagatcggaagctcatgcgcgtggtgaagtttggtcaaaacggacagattacactggcagagcatcaacaggcaggcgacctgaaaaggcgcgatgcggctctcaacgatgaggatccgttcaaatatttcgcgccaactgctggcggcctgaaaaaagtaaaagctcgacaagtccgtatcgatgagatcggtcgcgtactcgatcccggcttcccggcccgcacggctcgtcgcaagacgcgtaaacgggcctgaggtgcaggcagagacaggccgatggaccggatcgtcgatattgccacggatggccgccatctgtccgcctatcgcggcttcctcatcgtgtcggaggatcgcgccgaagtgggccgcgtgccgctcgacgatgtcgcggctgtcatcgtccatgcccatggcgtcacctggtccaccaatctgatcgtcgcactggcgcagcgcggcgcggtgatgctgctgtgcggcagcaaccatgccccagtcgccgtgtgcctgccactggacgggcatcatgcccagaacagccggatgcgcgcgcaatgggaagcgggtaaacccctgtccaagcaattgtggcgccggatcgttatcgccaagatccgctggcaggcggcggtgctggacgcccacggcatttccgcctccgccttcgacctgctcgcccggcgcgtaggatcgggcgacccggacaatgtcgaggcgcaggcggcacggcgttactggccgctgctgatgggggagggttttcggcgcgatcgcaatgcggatgatatcaatgccctactcaactatggctatactgtgctgcgatcactgtgcgcgcgcgccgtggtcgcatctggcctgcacccgtcgatcggcgtgcatcatgccaaccggaccaatgccttcgccctggctgacgatctgatcgaaccgtttcgaccgctggtcgatgcgctcgccttgcgcctggtcgcgcacgggatcgatagcgtcacgcctgaagccaagcgcgcctttgccggactgatcgcactcgatctgcctggggtggacggtagaccaccgtggcgggcgctgcgaaccgggccgcccagagcctggcgcgcgccttccagagtgggcaggcggccgacatccttcttcccacacccccgtccgcgctcgaactggccggacttgatgcgctgctctcatgagtgcgagccagttgagcggatatcggctgatgtggattttcgtgatgttcgacctgcccgtgactacaaaagaacaggcgcgcgcagcaacaaaatttcgtgaatttctgttggatgaaggctttgagaaaagccagttttcggtctatgctcgcttctgcaacggtaaggaacagttcgaaacctacatgcggcgggtcgagtcgcacctgccggatcatggtgatgtacacattctcagcttcacggaccgccaatatgaaaatatcgtgcgattttcagggcaacgttggcggcggcagcgcaaaaacccggatcaattggcgctcttctgatgattcgaatgattttcgcagcgatagatcaatcaatattacattgtttttcaaagtaatatcaattgatctatcatagcggttcagagatcgcggtccagcggcaacttcggcgctgggcgaacgaccggaagaaatatcatagcggttcagagatcgcggtccagcggcaacctttaccggtttcgaacgccagcgggatcgatcatagcggttcagagatcgcggtccagcggcaacctttaccggtttcgaacgccagcgggatcgatcatagcggttcagagatcgcggtccagcggcaacacaatcgcggccggcgtgctcagcgcgggcatcatagcggttcagagatcgcggtccagcggcaactcgatcgttgcttgagcgatggccgctgccatcatagcggttcagagatcgcggtccagcggcaactgcatagaattgagcataggcaaagcggcgatcatagcggttcagagatcgcggtccagcggcaactatgcgaactatcgtcagttcctttcgacgatcatagcggttcagagatcgcggtccagcggcaacccctacagctatgaggatgatgtcgccgagatcatagcggttcagagatcgcggtccagcggcaacaaagtgaggcggtgaaaacggtcgcccatgatcatagcggttcagagatcgcggtccagcggcaacttgaagtcgcgcttggcgctgccatggccgatcatagcggttcagagatcgcggtccagcggcaacggatgaattgatcgttgccgttcgtcacgaatcatagcggttcagagatcgcggtccagcggcaacacgccgaagcccaacggattgccgaggagaatcatagcggttcagagatcgcggtccagcggcaaccgatggagatcattggcgatcagccggtcgatcatagcggttcagagatcgcggtccagcggcaacaaggcgacgacgaccccgacgaccggggaaatcatagcggttcagagatcgcggtccagcggcaacgccttcaatgcctgcctcactcaagggcgatcatagcggttcagagatcgcggtccagcggcaactcggtcgcctccatctacggggcgcagtcgatcatagcggttcagagatcgcggtccagcggcaacattgatgaacacagcggttatcgttcgatcaaggattacttaacaggccgtgacaccaccagccatagcaggggccagtatgttgatctggccgaccgcccgatcaacagcaatatcgtgaaaggctatttcccgatcttcaagctgcactatcaccaaaaatatgcgttcggcatggacgagcgttacgacttccagcggacgggcgctggcgctatatccgcaactacatgccgcatcggccctggggccagcatcagccatttgaatggctggccaagggctgtcaggcttgggaggcggcgcgtccactcattcgcctgctctgcgccgccgcttctgcaatcatttcggcattgtggtcgtcgttttctacgccttgtcgagatagcggaaatcgaactgcgatgtgggaatgatgtcgatgcgtgcgaaatcgataaaggccgtacaactgtccatcatcgctttctgattggcggcaagcttgttcgcatcgccgaccgcgtcaaagaacgcgctctggtccgtcattgcctcgaccgcaaagcattcctccacaaaggcgtcataggcggtggcatcgtccgtcagcggcttgacgatgagattttggacatattcgacattggcctgcgtttcgatggctacatgtgtgtgatgagaatgccagtggctgatcgcggcctcacgcggcatgtcggcacgaaaactgataaaactcgcctgggcccacccagtgctacgtccgggttgagccggttcggaaccggccttgggggcgatgatcgttgactcgcataccaaccatgcggcgaagcgtgcgctatgagaagccagcgccgcgtccactgctccccggaagcgtcggttgctcgaaggcatccagaactgagctaccgccgtctgctgcggcgcctgccaacgctgggtgagggggtccgccggcatcacctctgcatcgcgcacattgagccggatatgctgtgcgccccctgctcgcagcgcttgcggcaggctggcgagaatgcgcgcggcgtaggcttcgcgactttcgccttcaggcgcccacagggcgacaatgatcttttccattctctatcgctccattcagtcgaaattggcctgtccgccatcgagtggaatggtcgtgccggtcagatagccaaggtccgacccgcacagggcgacgatggcgcggcctatatcgtcctccaatcgtccgacgcgacccagcgggatggtacggaaaaaggcttccgcttcctccgggttgttttcgatccaccatttgaggcccggcgattcggcatggggggcgatggtgaggacgcgaatattgtcccgcccccattcggatgctgcggcgcgggtgagggcgcgggttgcctgtttgatcgcgccgtagcagccatagcctgccatgtcccagcggatgccggcggaggaggcgaagttgaaaatagtgccgccgccgcgcttcgccatcagcgggtgaaccagtttcatcagccggaaggaggcgagcggtcccgactcgaaaccggcggtgaaggcttcgtccgtgacatcgtcgatcaggccgagcggcacttcctgtgcattgttgaccaatatgtcgatgccgccaagcgtgcgcgcggctgtatcgaccgccctggcaagatcgtccgccgctttcacattgcagccaaccggaatggcacgcacgccccgttctttggccaggcgggcggtttcctcgaccttttcgacggtgcggccggcgagcagcaggtcgaccccctcgcgcgccatggcgagggcgatgccctgcccgatcccttgccccgcgccggtgatcagggctaccttgccgttcaaagcggacatcagctctcctttatattcatcgtagaataattgccttcatactacgcaggaagttgactttatggcaaggagggccacaatctgcgtgaatatggcgggagaggggtggcagagcagccgttgtggcttgccggccttcgttccgctggatgacaatggatttcaagaagcggacgagcatgagcaactgggacaaggaagtcgatatcctcgtggtgggatcaggcgctggcggcatgttgtcggcgctggtcggcgcccataatcgtgccgatgtgctgatcgtcgaaaaggcggatctgtggggcggcacgtccgccacatcgggcggcggcatctggattcccggcagcgaccccgccaaagcggcagggttcgaggataatctggatgacgccttcacctatttgcgggcgctgtccgcagacaatgtgccggacgccaatatccgcgcctatgtcgacaatgccgcgccgatgctgcgctgggtcatggccaacacgccggtccagtatatggcctttccctatcccgactatcatgccgaaaatccaggtgggtcggcgcagggattccgtacccatctgccgatgcccctcaatggcaagccgctgggcgcggatattcgcaagttgcgctttgcctcgcctgcggccagcctgttcggctatctgaactggcatttcagcgagacctatgaattgctctaccgctccaaggggtggatcaggaatctggtcgtcaacatgagcaaatattggctcgacatgcctttccgcctgacatcccgcaaggaccggcgactgacgttgggcaatgcgctgaccggcgggctgcgcatggcgctcaaccaacagaatgtgccgctgtggctgggaacgccgctcagggatctggtgcgcgacaatggcaaggtgacgggcgcggtcgtggagaaggatggcaagccctatcgcattggcgtgcgcaagggggtcgtgctggccgcgggcggctatgacaagaatcaggcgatgcgcgatggcaatgcgccgctctatcccgccgcacaatattcgggtggcgtgaccagcaacaccggcgacagcatccgtgcaggcgaagcggtaggcgcgggaacgctcaatatgcagtcggcctgggcggcgccggtatttcatgtgccgggcgaggatcgcggacgcctctgcacgatcgagcgggcgctgccgggttgtatcatggtgaaccagcagggggagcgctacctgaacgaggcggcatcttaccatatcgtcggtcaacaaatggcgcggcggcaggcggaacatggcgatgcatcaccaagctggatgatcttcgatcatgaatatcgacacaaattcccgatggggccgctctatccgctgatgccgacctttctgcataaccgggccgtacggtcgatcctgaagcaggggcgatcgatcgaggaactggcgcagaagatcggcatggccccggccgcgctgtccgcgacggtcgcgcgtttcaacacgcatgcggcgaagggccaagaccccgcattccaccggggcgtggccacctatgacaaaatgtatggcgatccgcgccatgggccgaacccctgcctgcgaccgctggacaaaggaccgttctacgcgatgccgatctatccgggcgatatcggcaccaatggtggtttgctgaccaatgcgcatgcgcaggtggtcgatgcggcgggcgatgcgatcccaggcctttatgcggtgggtaacaatgcggcatcggccatgggcgaaagctatccgggggcgggcgtcaccataggtccggccatgaccttcggctatgtcgcggcgcgacatatgaccggcggaaacgcctgatacggggaaggcggcgcctgactggcgctgccttcccgcgcggggtcagatgagttcaggccgcaggatcgcgtcactgccgccatcgatgaagatgatctggcccagcagatagtgattttccatgcccagcaggaaatcgatcagctcggcaatctcgccgggtccggcatagtccctgacggcgatcggattgctctggccgatcagcttcaccatgtcgggctgttccagcagcggtgccgtcatcggcgttgtgaccacgcccggcccgatgccgttcagcaatatgcccgcgccggcccattcggcctgagtggcggtgcaacgcagccagcgggacagggcgtttttggaggttgaataggcgctttgcggatcggcggtcatggcgtcgagcgcgccggcttcatccccggcgaggcagaggtcgaccaccgtcttgctggatggcaggaaggcggcggtggagcagatggcgacggcacgagggcgcgcggacttcgccatcatcggccgcagcccctccagcgtcgcgaccgcaccgaaatagttgatggcgatggtttcgcgcggcatgtcgccccgcgatatcccggcgcctgccagcacggcgtcgatgccatcgggggccagccgggccacctccgccaccatgtgcgcgcggccggcagcattccccagatccgcttcgatatcggcgttgcgcaggtcgacgccgatcacccgttggcctgtctgcctcagccgttcgacggtggcggcgccgatacccgatgcggcgccggtgataacggtgatgcggctcatatcatcctctctttcataaaaattcagccgaaaacggccatcgatccgatcagggcgcggttgagcttgcggcgttccgccagccgccagcgcccgtcgatccgccgccagcggtcatgatagtcgccgagcgaacgaaaattgggttccggggcgtcgtcccgccccagatgcatgtcgctgacataggatcggctgatcgcgctgtcgccatccgcttccacgatcagattgcccagcagatgctggctcgtgccgcaggcgtcgagatattggcggatcaatgtgatgatcgcgtcgctgcccgcaagagtcccggtgcccagatcggcggtcgcatcgtcggtcaggatcgccttcagcgtttcccagtcgcgatcgtccatggcgcgggcgaagcgggtgagttcgcggccgatttcataatgggccagcatggcgtccatgctcatatgatgcctttcctgctcggagttcagccctgttccacgcgcaaccgggtcaggcggatcgatgcgatccgccatgcgccatcgacgcggcgatagcgttcatgataatggccccagccatgcagccagcggaaaggcaggcgcgcgccctcggctggccatagccagtcctccattgcccagatgccatgggcatgatcgttattctcgacatggatttcgggcatatggccatgatgcacggtgacgaccgggccgagcatcggcgtcagcatcgcgagataaggctccgcgccctggatcagcatggcttcgttccgttccggcgtcgcatcgcggaaatcggcgatcagatcagcggtaaagaccgccgccagtcccgcccagtccttgctgtccatggcgcggaaatagcgggccttgagcgatttgatggcttcgatcgccagaatttgcgctttactgtccatggttcagccctttaaggccggggcgctttcgcggcaccattcgatccgaacgaggtcggtcccggactctgcctccaggaacagccggtcgccttcgaagcgaaagcggcggggctgatccgacccgatccagtcgggataccaggcgccctcgacatgatgggtgacgatgctggcgcgtgcatcgccgctatagcggccgaaatagccgctataggcgcggatcgcctgacccagcgtggcgtcgtccacatcgtagacgctcggcacgcccagcgcggggcggttcgccatcatcagatggcagctcatatgcccgtcggcgctatagatgatctgccccagcgcatcgcggccaaaggggaagatgtctgtcccgttggcgcgatgcgtggtccaccgcaccagttgccaggcgccgacaaactgcgtgaacggatcgtccatcagcccgacactgtatagccgccgtccaccgccagcgtctggccggtgatccatgcggcggcggggctggtgaggaacaggatggccccggcaatgtcctttggctcgcccagtcggccgagcggtgtgcgggcaagggtaggggcggtccattcgtcctgcgcgaaagtgcccgccgtcatctgactgcgggtaagaccggcggcgacggcattgacgcggatgttgcgcggcccccattcgaccgccagcgtgcgggtcaggccgagcaggccggtcttggccgcgccatagcccggcacgacgggaatgccgaagaaactgctcatcgatgcgatgctgatgatcgacccgccaccctcgatcgggctttgcgccagcagatcaacggtgcggcgtgccatgcggaaggcgccgaccagcaacatgttaaccgcgcgggcgaatatctccggttcatattcgtcaaggccgatgctgggcagtgccatgccggcattgttgatgaggatgtccagccggggcagggctgcggcgaccgcgtcgatgctggcgccgtcctccacatccatgcgcagatagcgataggccgacaggtcggcgtcataatcggcggcgctgccgcgcgtgccagtgatggtgacatttgcgcccgccgcgcgataggcggcggcggtggccgcaccaatgccactggtaccgccggtcacgaggacatgggtattcgcatagtcgtgagtgatgccggtcatatcgcttccacctccacccagcggccttcagccgcagatcgccgcgcggcatccagcacggcctgcccagccgccgcatcgcgaaaatcaccgcccggatcaggcaaaggcggggcgcgtccctcaatccgcgccttcatctgaccgaacagcttggcatagggggcaacatcaaaaccttgcgtgtgccagcggtccatttccgtctggatcagttccgcaatgccgaaaggttcgggggcgggattgaccagttcgggcggcatgggaatccggcgggggccgtcctcattcttgacccagatttcttcgggatcgccaaaggcggcgccggactgaacccatgctgcgcctttcgtacctgccactttggtcgccatgacgaagggaccggggaaggtcatggccgcttccatcaccccgcggcagccggatttcgtgacgaactggatgttgtaataatcgtcggatgtcatggcgggacggttcgtcgacagcttgctcaggatcgcgctgacggtggtgatcggccccagggtggacagcacctgatcgatcatgtgcgtgccgaatgcacccagaaagccgccgccctgcgccgcatcggtccaccagtcggccagcggctcgtcatcgtcaccgccgggttgctgatagaggcggctgaacatcagcgggtcgccgatcagcccatccttcaccacccggcgtagcagcgcctgcgcgctgtcgaagcggaattcggcgcccagcgcatggacgatacccgccttttcggcggcggccagcatttcgcgcgcctgcggcaaatcccgtgcgaagggtttttcgcacatgaccgctcgcccggcggcgatggcctgcatcactggccggtaatgggcatg

SEQ ID NO: 3063 - DNA, 23333 bp, synthetic construct
  source 1..23333: mol_type = other DNA
  misc_feature 1..23333: note = Synthetic
atcgttaccttcttggtgtactggatggttggatcgccgccagcggtacctcctgcaggcgagagataagaaaagttcaaaccgttcccgtagctgtctataacccttgcgaggcgcctttgcgcaggccaaccgcctgatttattgtaggccacctcatagctgtaggttagaatattgccgttaggtcgtttgactgtagaaatcagcaggcacgtccccatgccgcaccagtttgatgacgccttcgtgaagttatattcgatgccgtcagccgtagcgaaaatgaaaccagtatcactttcgacaagggacgagccatccgcataaaatggcacgaaagagcccgacaccctgttgaacggataccattcgccagcaatctgcacggacataccctgtcctcggcacaatgggtagcctgtccctggctgattattatagttagcaccccaacaatttacaaaaattgattgcgaagaatgaaagtcaccaacgtttacagcttcggcatcaggtcgcagaccacttcgataaactcttgaaaatactagaggatcatcgcttgctccaatagaaatgtcctgcacggtttctgcgaaatacccccggttcagatcgacgcctcggaaattgctatcatagcgcccgtcaggatcttgagcgatctgcgcggacgtggcagcaggaaatgatagggctgcaagcaaggcaagcggagaaatcgccgcttgcaaaggctgttttgcagcatgtccacatacagacatgaaattatcccctaattttttaatatttcaaatgtaaaatttccgaagcactagtcgtccaagatcggaatgaccgtcaacccattgatcgggaccacgaccactttgctggtcgatcccgtcacccgataggtggtgcggttgtcggcagcgtcgtaggtggtgctcatctgcacgccattgttggcagtgccggtcgtgctggcctgcaccagccttcccaatgcatcataggtgtaggtggtcgtgctggcggcctggacactggctggtgtcagcgccacaagcgcccacgataatctgttcgcgatcttcatcggcgctctccccaggttcaaggctgctgcttttgccacacataggaaatggtgcagcccgacgacccttccacgatcctgatgcgctcgagcttgccggcggctgccgtaagggaggtcagcaacgtcgcgtaaatccagtcggaattcgtgtcgctgcggagcagggtcatatattccgaattgagcggagtgcagtcgagcggggcaaggctgtcggaaatttgcacataaaccttaccctccgtgcccgcccagagacgggttatggtcacattgccacaggcattggtcccgcaggccgcccatgctggagaagagagaccggcaagaaaagcgcaagcaattcgacgaagcttcatctcatcctccgatactgtggcaggcaggcgcgacggatcgcgtcctgccaaacaaggcaagacagttcagctcatctttcgctttcgaaagatgatatccattattgttgcgatcctgttatgcctgaacgatgaccggtaaaatcctacattgcaacccaataattggcgccgatttggtcatgccggagtcctgatccggttatcattccattaactcgattcggttatcgcccatggcgcatcgatctcgcgtcaatggacccgtcgatcgccagctcacccaggcttggtatgcaggatgatatttcatccaatattacaagcagcgttcaatccattatcggaccagaatccatgcttgttttcgctttcctacacctcccttatttgccatcctgatattcatcggccactttatgaccgaggcccgctggacgtcgtggcgatcgaaacggacagcgtcgctccaaccgccgacatgatatgcttgcttgtgtttttcgatcattgtccttggaccagctgcattgccgtgatggacgactggtgggtgcaaggcagatttcagccatttttctgaacaggaagtcgagatgaagaaactgttatgctctgtcgcctgcgcatttctttttacctcgcccgcctgggccgtgatcgacgctaacaggaccatctccagagtcggcgtccagaacacaaatagcaccgcctatgtgcagttcaccgtcgctcccagtggcggttgtaattatgacattctctatgtctcgctgacgaccgatgcggggcgcgccaattatgccttgcttttgaccgcgcaagccaatcgaagcaccataaaaagggtcgattacagcgtctccagcggaacctgcaccatcaatctgatcgagatttgacggaaatggggggcagcacccctcagcctgtttccgcgcccactgcgacagtgcaattcaccggctcttttgccttggcggccgccttttcgcatgccgcgatcgtttcgcgattgccccgccgcatctgcgcagcggcaacgatcgcctgccacgcttgcgggtctccagcccgcatgaggcggatacccgcttcccataaggacggctcgcccagggtgcggcgcgcgacccgctctggccagagccagccttgcggcccgatgcctgcggcccaaccgggatagatgagccacagcagcgataggacgagcgcagtgccgccgatcgcttgaagaaggcgccagcgctgttgctccttgctccggacggcgccgatcgcatttgtcaggtccgcatgtgtctggcgatgaagctgctgcgatatcctgatcgtcgcctggtccgtttcgcgagcctggtttgccgcttgcctcatctgttcggccatgccccgcggcgtcagcttcaaggcaggggcatcggccagtttcccgacctctcccgccagcctggcgagaacctcacccatgctggcgagcgtcgagccataatcgggtatctcgatatcctgcttctcgatggcgacatgctcaaccgcgcgcgtcaataggaccatgcgccgctcgatgcgatcctcgatcccggcaatgcgcgcctcgagccgcgcgaatgcctcggccgccgcgtcgggcggtggttcctgttcgttcaagagatcctgttcgtcgtccatcgcgtcatgctccatgtcagtggctgatccccatgccgcgtccaggggtgcggccatggtcgaagggaatggaatcggcgagctggcgcgacagggtgcggctgatctcgcgactaatctccaggccaagttcgcggctgcgcccgcccagcaccgattcaagctgggggtcgcgttccaggctcttggccatgccggccatatcctgcgctacgcgctttgcgccgcgatggtcgccatcgcgcagcatctcctctcgatggcgctgcaattgctgccagccctcgacgaaccggtcggcgcgttggaagggatcgatgcggatgtccgtctcccgctgcatcgcgcgcagcgctgcctggctgcgcccttccgccgcctcgcgcaccagctctggctgacgctggaaggccgcgccaagatcggtggacgcctcgggacggaccgcatcgagcgacgccccggcgcgcgccagcgcctcgcgctggtgcggcatgggaaccatgccctgcgcgcgggcctctcgcatctcgtccagcgccgtcgcatagcgctccaccgcgccgcgcagaccgcctgtgcggatcggctgccgatccgggatcgggtcatggctttggggcgccaggtcggcgcgagggatgggccggaaaccggcaaataggccctgatcacgatcgggctgcgccttcgggcggaaattgtcgaacatcccgcgcgcttttccgggcagcttgcggaccatctcggcaatccggtccccaaagctgatcccgcgccgttcggcgaatgcctgggcaagatcacgccggtcatagtcgcttgccatatccttggcgcgcgcgcggctgagcgtgcggacaagcctgccctgatcgcgaaaatcgtcccggccataatggagcgccaggccgtcgcgatgacgggacagcccgacataggcgccatggcggtccatgccgggggtggcgaggacatgcgtcctgcccacggtcatgccctgcgccttgtgtatggtggccgcatagccatgatcgacatgggcatagtccttcgtgtcgaaggcgacggagcggccgtcatcggtcctgacggcgatatggtccgggctgaccttctcgacggtgcccaaggtgccgttcttcacctcgagactgcgctcgttcctcaggaacatgatgcggtcaccgggcgcgaacagccggtcaccgcgctccaccctcacgcgcatgtcctcgccaagcgcatcgctcgcccgcatccggtcgcgggccgcttcgttgagtgcgcgcacctcgtcattggtgtgcgtgagaatgatccgcgattgatcgggcgcggcgatgcgttcgcggtcccatcgctcgacaagatcgctgcgcgcctgttcccgcatctcggccgcgtgaaccatgccgcgcgcgtcataggccccgatcgcctcgccggtgcggccggtcgccaggtgccgggtggcctcgcgctgccagtcctcctgctggcggcgcacctgtgtgatctcgacgccgccatgccgctcatggatcgcgcggaacgccgcgcccgcctcgatcgcctgcaactgttgcggatcgccgaccagcacgacctttgcgccggcgtgggcggcgtgggacagaacgcgctccatctggcgtgtgccgaccatgcccgcctcatcgatcaccagcacgtcgcgggcggtcagaagatcgcgcccctgcgcccagccatgttcaagtgcagcgatggtccgcgaggcgatgcccgaaccattttccagcccctccgccgcgatccccgacaatgccgcgccgcgcaccttgaacccggcattctcccacgcctcacgcgccacgccaagcatcgcgctcttgccggtgcccgcatagcccaccaccacgcccaagccgcgctcgcccgtcacatgatccaacgccgcgcgctgctcgcccgtcaacgcaagcccgcccgcttccgcgcgggcaagggcggcggcgcggtccttctcgtccacgcgatgccgttcgcttgtcgccatcaactccgatgcttggtttaaccgctgttcggtctcgatcatgttgcggctggtgaaccgatcctcgccgcgcccgtccttgcccagcgcgacaagttcgggagacgcgcgaacggcgctcatcgcctggtcgaactgctcctttccgtccgtgtggcgatggacgaacatcgccatgtcgcggcgcgtgaatgtagcctgttggtgagtgatcgcattgagcgccacggacgggtcggcaatgatgcgctcgccgttgcgctgggcgagagcgcagtgatcctcgatgcgttcggactcaagcccgcgctcgcccatccgcgacgctgcggggccgaccttgtcctgcggctcaagcccgatcccctgcgcctcaaggctgcggtgatcgatctgcgcgtcgatgtcgagttcggccaggcgctgattgacatgctccgcccaacgttcgcgccattgctcgacacgttcggtccggttccagtcgcgtactttcgccccgaagccagcggtgccatcttcgcgctgcacaacctcccgcatggtgagcatgacatgggcatggggcttggccatgccgtccgcgccgatatcccaatgcacattgagatccgcgatcatgccgcgatccacgaattctcgtgacgtgaagtcgcgggcgagctcaatgccctgcgcctgggtcatctcgcgcgggatggaaaactccacctcgcggacaagctgcgcatccttgcgcttctcgcatccctcgacctcgttccagagcttttcgcgatcggagaagcgttcgggcgcgccttcgggcaggaggatttccgaatggacgacgcccgacttgttcgtgaagtcgtgatcacgatcgatccgttcgtcatgcagccgctcgcccgcgcgataggcggccgccgccacggcgctgcggccggaggcgcggctgatgacctggacggagaaatggaagatcgccatgacgatcatccatctactgcaacaacgtgcacgtcgtaacgacgtataagcgcgcccttctcgaaaatttctcggacgggactaggcggtgtcaggctgtcccggcgactctactgcgcggtgggtgagatcatcttatcatagcgccatcgtcactcaatggagactttgcgatgcgaaagccccgcgattttgattcggaactcaaagccctggccgacaaggccaaggcgctcaaggaacggcgtgtgaggcagcttggcgaactggtgaccgctaccggggccgacgcgctcgacgccgatctgctggccggggcgttgcttcatgccgcgacggtgaaggacgccgccacaaaggagggttggcgcaagacgggcgcggccttctttctgggcaagggcgacaagcctgcgagcggacctgctggccagcagagcggcgctcttccgcagggcggcggcgcggcatcggcttgaggctcggaaggcgcgaaccgacatgcgggactgggccgttgcacgccgcgaacgcacgcggcacctgatcgaactgggcggcctcgtcattaaggcgggactggtcgatctgaccgacgatgaccgcgctacgctctacggcgcgttcctcacggttgccgacagactgcgcggagaggaacgcgccaacgcgcttgccctctggaagcgtaagggcaagcgggcgtttgaagcggaactggacggcagttagcgcgaaactgacaagcgcacattgccgcccggttctgcctgatactcgaccatcgccgctattggtgggctgttcttgtcgcaatagcgcacggtgatgaagtcttctcggatagcgggacacagaccggaaccatagagaatgtctgccagcgcgtcgaaggtcgtcgccttggcgcgataggctccggtccaccgcacggtccaaatatcttcattggcctcgacccggtagcccgccctctgcgcaacgtccatgaccgcgcccagcaccgtgtccgcgcgcacatcgaagtccaggacggcggagaggtcggcgggttcggagcggacggcctgcgcggactttacccgccatagcgttgcctcggcccccgccatgaagaagcacaggcagacaatcgccaagggcagatggtcaacccagtccctgcacctgtcggagcgccaaaaccggcgaacggaaacgagcggattccatcggccctgttgcggggcaactcgtcgcacgatccgccatgtccgttgcagcatattggcgcggcaagcaggctgggaaagcgccaccgccgttgtcggtcctgcgggcggcggaagcatcggcgctgataggcttgcggcgagcgaagcttgatgatctgcgaccgcgcacgccgcacgttccgccagtatctccacccgcgcgaacgcccatgccagttcctcgttcgaaatacggtaggatcgcccatagcgcgcttcgacataggcgcggcggatacagccgaatgcgcgccgctcgaagcggctatctcgcggccatgccgaatgcaggtgtgggtccagcgcttccgccccctcgcgcagttcatccaacgcatgggtgcgcggggcgtggaggctgatggatcgcaagacgcacagatagaaatgttcgcacgcctgatgcagcatcatcgccgccatcggcgcatcgcctcggtcccgatagaaagccgcgcctgccagaaatccggttccgcgctcatgccacctgatgaactccgccaccccccgaatagcccgttcccgcaccggaaggcggcgcggctcactcagccgcaatccctccatctggtaaagcgcgattccctgctcggcgatagtgacgaaatgcgggacgccttcgacaagagcgccgttgaccccctcaaggctttccaccgccagccgcaccgggcgggtaatttcgccatgctcccacgcgcggcggagccgatcacgcaccagccgccagtcgcgttcgctgcgggcaaggcgggaatagttgacgatcgccagcaggcggaacgcttcccccgccgcgatctcatcccaatctttctcggcgtgggggccgtgcaggatcagggtgaggacgcggcccgccctgaaatgttctgagcatcggcccttggtcgtttcttcgaacgcctcgaacaggatcgtggtgacatggagaagctcgtcccggatcagcgcgggcagatgatctgcatcggtgcgcagcatcatgatcgcgcctcctgcgggcggcgttggcaacccctcgggcgcgggtggccagtcacgtcatggacgcggtccaccaaggcacgcacaaggggcgtaatcatggcgggaatgaagccgcccgtgcggggccggtcttcctcccaatcatgataatgatagccccatttccagtagggcgagaggactgtcgccaaccgcgccatgtcagggcagtcatggccaaagccgcaagcattggagtaggcaagcgccttggcgatgtcctgtttgatgtggctggcgttccacgtatcggcaaagcccatgtccagcagataggcgcacagggcctgctgagtcacgaaaccggcctgatgcagcgcttcctttgcatgtcgcggatcggctaggaaatctgcttcgagcgtggtcatccaccgttcggcgttgtgatagcggaagcggcttaggcttcgcccctccttcgtccgagcaagcgtcgcgcgttcgtcttcatagcgttggtgaagcgccgccagtgcgccctcccagggcgaggcaattgccgacgcggcaactggcgcgatggtcaatgcgcgcagcagggcgcggcgcgacgtggcgatcttcgaatcacccaagagagaatcggataaagtcatgggcctgccttcctcacttcactgtcacggccgcaccaaaatgcgttcgcagcactaagcggcaccgcttataacataaaaggaaagcaatattcaataaccggcaccggttactctggttctgattgaacgggtgtcacacgcggttacgacgcaattatgggaaggccaccgctcaacgtgaaatcaaccaacatccgattgcccgaaggtctcggcgagcggattgataagctggtcgggcggcagcgccgcgcagccttcattcgggaagtgctggaacgggaagtcgagcggcgcgagaaccagcagggtaaggctggctaattaggcggccactaatccctgaccaaaatccgaaacggccctggtcgaacactcggcgatggcgagtttccgtcacaaagatttactggaccaccgcgaacgtgtgaggtttatggccgaaacgtctgtcaggcggcaatgcgccccttgtcgccgctcgatgggatttccgggtcgcctagaagcggacgttcccgaacatacgattttgtccagctgtcgacagcccgtgggccatttgcgacggtctgtttgtgataagaaaattacaaagccgccattgatcgaaatttggaccaaagcaaactttgacacgcaaacgatcgtgccaatcgccgaacatcgcatagacgcaaccgtcgcatcgccagataatactaaatcgcaaagacgaaagttgcgatatcaccggacgaaatgctgattgggaaaacacaaaaaaaaaaggcgacgccggagcatcgcccttatctggtgcgtactgacacttgttaactgccagaccgcgatctctgagtgcctcatctggcgcatctgaagatcacggtcaagccagaagcgcgatcctgatcattatggggacgaattgatcttgaccgcgatcgccgagcctgaccctctgtaattctacttaagggcggaatgacatgacagcacgtacacacaaaatctggcggctgggcgccgatcttggggcgaactcattgggctgggcggccatcgaactgagcgcgcccgtcgatggcaaaccgatcgccatcctccacgccggatcgcgtattttcagcgatggccgcgatcccaagtctggcgcatcactcgcggtggatcgacgcgatgcgcgggcgatgcggcggcggcgggaccggttgcagcagcggcaaagggcgctgatcaaatatctgatcgctgacgggctgttcccggcggacgagaacgagcgcaaggccatggccacgatcgatccctatgcggtgcgcgcaagggcgctggacgaggcgctgaccctgccggaagtgggccgggcgctattccatcttaaccagcggcgcggcttcaaatcgaaccgcaaggccgaccgcaaggcggatgaagatgcgggcaaaatcgccatcggcatcgaccgaacccgcgacgccattcgccaggccgaagaggaagcgggcgcggaaccgggcagctggacctatggcaaatggctgtatgagcgccgcgccagcgcgaccgacgcaaatgccatccccagcgtgcgtacccggttgcgcccggaaacggatgagcatgccaagggtgacggctatgacttctatcccggccgcgcgctgatggaggcggagtttgccgccatctgggaagcgcaggccgcccatcaccccgatgcgctgaccaatgaggtccatgaccggctgcacgagatcattttctaccagcgcccgctcaaagcaccgcagatcggcgtgtgcacgctgatcaggggcgaccagcgcctgcccaaggcccatcccctgtttcagaaacgtcgcctgctagaagaactcaacgcactgacgatcgtgcggcccggcgaaatggcgcagcggttgacgcgggaggaacgggacaccctgttcctgaaactcaaggacaaggcaaaggtgagttttgtgagcctgcgcaagacgctgaagctcgatcctgacgcgcgcttcaacaaggaaagcgagaaccgcagcgacctgaaaggcgacgaagttgccgccgcgatgggtgccaagacgcgcttcggtaatcgctgggtgcatctgtcgatcgaggaacaatgggacgtcatcgcgcggctggaagaggtagagagcgatgccgaggatgctgcgtgccgcgcgtggctggccgctacctttgacctgacgcccgaacagatccgcgccgtcaccaatgcgcccttgccaccgggctatagccggtttggcaaggttgcgacccagcggttgatcgacgcgttgcgcgatggtgagaaggacgggcgcgtgctcgtctacagcgaagcggtagcggcagcgggccttggccatcacagcgatctgcgcaccggcgagattttcgaggatgcgcagggtcgcccgcaactcccctattatggcgtcgcgctagaacggcacatcatgccgggcaccggcaacccggaccattcggatgaaatgcggatcggtcgcctgaccaatcccaccgtgcatatcgggctgaaccagctacgccggatcgtaaacaccctgatccgcgcctatggcccgcccgccgaaatcgccattgaactggcccgcgaactcaagttgaccgacgatgacaagaagcggatcaacaaggagaataatgagaaccggcttgccgcggagaagcgttcggaaaagctgcttaccattggcaggcctgataccggcgcgaaccgcgccctgctgaaattatgggaggagcttaatcccgccaatgtgctggaccggcgctgcatctataccggcacgcagatttccgtcgacatgctgttttccgccgccgtcgaggtcgatcatatactgcccttcaccgcgacgctggacgacagcaatggcaacaagatcgtctgtatgcgcgaagccaatcgtacgaaacgcaaacaatcgccctatgaggcatgggggcataccgatcgttgggaagaaatcgccgcccgcgccgcgcaactgccgcgtaacaaacgctggcgtttcgagccggacgcgatggagaagttcaaggatgaaagcggttttcaggcgcgccatctggtcgacacccaatatctcgcccggctgtcgcgtgaatatctggaaacgctttaccccggaagcggcgaaggcagcagccacatttgggtttcgccggggcgactgaccgagatggtgcggcgcaagctgggtctgaacgaccttttgcccgaccataattttggcggcggcgcggatcaggcaaagaaccggctggatcaccgccaccacgccatcgacgccgtggttgtcgcgatcgttgatcgatcgatgctgaccgaaatttccagagtctccggcctggaaggcgcggaaggccgtgagcggatcatcatcccgccgccatgggatgaatttcgcaacgatctgcgcaccgccgtcaacgccattacggtcagccaccgtaccgaccatggcactatatccaaggcagggctgccaaaagggaaggacgccaccgccgggcggctacacaatgacaccgcttatggctttaccggcgaaacggacgccaagggcaacagcatcgtcgtgcgtcgcgtgccgctggcaagcttcaagaagctggccgacctcgaccgtatccgtgacacagacctgaaagccgcgctgtatcagcatcttgaagggctcgagggcaaagcgttcgaaaaggccgtgatggatttcccgaatctggaatggcacccctttggcaacgtgcgtcgcgtgcgcgtcacggaagtcctatccgtcatcccgattagcgaccagaatggacgcatctataagggatataaaggcgattccaattatcggtacgatgtgtgggaattgcctggaggcaaatgggaggcggaagtggtttcgacattcgacgcacatcagcccgattgggtgtcaaaaattcgctcccgaagccctaccgctcgcaaggttttgagcttgcaacaaaacgatctgatcgcggttgaacgagcccatgaaacgcgtgaactcatgcgcgtcgtgaaatttcgccagaatggagagattaccttcgcaccgccacaggaagcgggtagcctgaagcgtcgcgacgccactcctaacgaagatgatccgttcaaatattttgcggtggccgcaagtagccttcaaaaggcaaaggcccgtcaggttcgcatcgatgaattaggccgcgttctcgaccccggcttccccgcccgcacggcccgtcgcaagacgcgcaaatcgacctgacggcaaggcggggcgaaacagatggaccggatcgtcgatattgccacaaacggtcgtcatctgtctgtatctcgcggcttcctgatcgtatcgcaggagcgcgaggaagtgggccgggtaccgctggatgatgtcgccgcagtgatcgtccatgctcatggcactacatggtccaccaacctgatcgtggcgctggcgcagcgtggtgcggtgatgctggtctgcggcagcaaccatgccccggtcgccgtctgccttccgctggatgggcatcatgcccagaacagccggatgcgtgcgcaatgggaagcgggcaagccgctgtccaaacaattgtggcgccggctcgtcattgccaagatccgctggcaggcggcggtgttggaagccaacggcctgtcctcttccgccttcgacctgctcgcccgacgcgtgggatcgggcgatcccgacaatgtcgaggcgcaggcagcgcggcgttactggccactgctgatgggagaaggttttcggcgcgaccgggatgccaacgacatcaacgccctgctcaactatggatatacggtgatgcgttcattatgcgcgcgcgccgtggtcgcatccggcctgcatccctccatcggggtgcatcatgccaaccggaccaacgcattcgccttggctgacgacctgatcgaacccttccgtccgctggtcgatgcgctggccttgcgcttggtcgcgggcggaattgaaacggtcacgcccgaagccaagcgcgcctttgcccgattaatcgcactcgacctgcccggcgcggagggcacgaccaccgtagcaggggccgccaatcggactgcgcaaagcttggcccgcgcatttcagagtggccaagccgccgacctcgtccttcccacacccccgtccgcgctggaattggccggactcgattcgttgctcacatgagcgcaacccaattgagcggataccggctgatgtggattttcgtcatgttcgacctgcctgtgggcaccaaggaacaatcgcgtgccgcgacgaaatttcgggagtttcttttggacgaaggttttgaaaaaagtcagttttctgtctatgctcggttctgtaacggcaaggaacaatttgaaacctatatgcgccgggtcgaacggcacctgcctgatcgcggcgacattcacatcctcagtttcacggaccgccaatatgagaatatcgtacgattttctgggcagagccgacggcggcaacgcaaaaacccggatcaactcgcgctattctagcgactggcgctgcttttttagcgatagatcagcagatattacattgtttttcaatgcgatacccgctgatctatcataaccgctcagagatcgcggtccagcggcaacttcttgaacgctatgtcaccggccccgacgatcataaccgctcagagatcgcggtccagcggcaacgaaccactcctccacctgctggacggctcgatcataaccgctcagagatcgcggtccagcggcaacgctgcgccttgttgagcgtgccgaccaatatcataaccgctcagagatcgcggtccagcggcaaccctgcgccatgcggtgcagcgcgcgcagccatcataaccgctcagagatcgcggtccagcggcaacacgacaagctcatgaatgatgcgcgcgccgatcataaccgctcagagatcgcgttccagcggcaactcaacgcgctgctggaagctggctgcagcaatcacaaccgctcagagatcgcggtccagcggcaactcaacgcgctgctggaagctggttgcagcaatcataaccgctcagagatcgcggtccagcggcaactcagctcgtcgccgctgccctgggtccattatcataaccgctcagagatcgcggtccagcggcaacagcgcttgcccgtgatccgcgcgccttctgatcataaccgctcagagatcgcggtccagcggcaactatggctgcgaagccgacattgccgagcgaatcataaccgctcagagatcgcggtccagcggcaaagctgcggatcgcggacgaacgctgcgccgtagcatagccgctaagatattgcggcaatcaatagctgcccgtctgcacctgacatcggaattttggttgctgaatgtctcatgagggttgataatcgaaaggcacctgaatggcagctatcttggcgtaagcgctccgaaccggacattccgcaatcggccattgcgcgacaatcagaagatggcgtccggcaaagctggaggcgtgaatttttgcagaatgcaccgcgaatttccacggaggtcgctcgaaaaggaacccggaggcgtaaacgtcgccgggtccatcacgatcaaaccgtctgcgccaagggccgttgctcgtcgtcgcaagcctgggtttcgctatcaagcaaatgggaaatgtcattccaccgctcggtgcttccgacgccgccccggtccgtataactggaaggcgggaatgccatccagcgcggcacccagctatctgctttggcgcgtccgcccgttcccgcaagacaatcgcgcacaatctggcgttgcaccttgacgctctccccggcattggccgttgccacggcatcgcccgcgacctccgcgacaatacggccgatcacttgcttgtcgcggatgctatcgagcagcgcatcatcggcctgccagaccgccgccacatcaaccgtgagcaatgcgccaagcaactcgactatcgcgcttcctgccgtcagcgtctcgcccatcacgatcgagaggatcgacagcaccgcctcatcgggcagtttcagcagatggacggacagtcccgacaggccatcgtcgcccgcatagccacccgtgacggtaggcgtttcgggatcgaaccccagcaatgccagaacctcccgccgtccggcgtcaaacatcgcttccgaaacacagacctccacgctctcggcgatggcgtccgtgttggcgcgctgcttctccacgtccacccgccacatcggcgaaccgacaatggcatgagccaccatcaggcgtagcgccatagcaggctgtgagagcagggaagcgcgcacagcggcatgacggtgcagatcgacatagttctggatcggcgcgctgatctccgggcgcaccggcttgatcgcagtttcgcctttctgttgcctctgggcttccttcgtggtcagatacccctcatggaaggtgacttcgccgcgatggctgatggcgacatggacccgtccgcctttcttcttggagcagcgctcatgctcccatgtgtggaaatacgcgccgcgttccatgacgacgacctccggccatcctgcctcgcgatagcttgcggctcgttcctcgaccgccgccatctgtgccgtccagaaatcagagggacatgcaaaatagctgtcctcgccaaacaggtcggagacgatctcgccggaatagctggtgaggtcgaatagcgcgaccttggtagaaatggccgagccgcccatcagccataatttgagattctgacccataggtacatgatcgttctcgctgtcaagcagagccaaccagtcccgctgttgcctcttagtggcgaaggtcaggtgccgcacggtgacggcatcgatcctctcggcccgatagagattgcggatgcggggcaggagattgcccaacgccagcgtgcgcttcacctgcaatgtcgtcagaccaaaggtaagggaaatgtcctccacattgcgcccttcgcgcaccaatcgggtgaaggtttcgcactgggtcatttcgtcggcatcaagccgggcgatattctcgatcagcgacgcttccagcgctgctgcatcgtctccggcttccatgacggcgcaggggagcggatcgatgccgtcattctcctgtgccacggccagtgccgcatgatagcgacgcttgcccgccacgatctcataggtggtcggtgatccattctgccgcacgatcagcggcacgaggatgccccgtgcccggacggacggcaggatattggtgaggtccggtgtcttcttcacgccccgcatgttggtgggcgaaaccgagaggcaggcgatatcgatgtgcttgagttccatgtcttttactccttgccaaaacaccggccccgaaatgcggggtgggcggcaagagcgaccggaaggcacgtcggcagaggcgggctgcacccgcaaaggctggaacgaagaggaagacccggcatggccgggttgcagcccgccgcgacgcgcctagagggtagcgacgcccacaccgcttgtcggagccgtgccaacctcatcgcgcccggcgcgatggccgtcgggaacggcggagccgatcctttgcgtcagctgggctaatcggatcgcgcgcaactgataggctgcgacctggtccgattagaaggagatcagtcatgagcttgttcgttggcttggatatttcgctcaagaaaacgtcgatctgtattctcgatgcccaaggtgtttccattttccaggggacggcgctgtcagagcctgcggcgatcatggagaagcttagccgatggcgtgaagacatcgtgctcgtgggcattgaagcgtgtcccctctcggagtggctgcacgcggcgctgacgacgtcgggctacgatgcgcgctgcctggagacgcgccatacgcagcggtttctatcgacccggccaaacaagactgatcgcaacgacgcgcatggcatcgcgaccatgctgcgacttgggcacttcaaaccagtccatgtaaagagtcgggaagcgcagctactgcgcgcccttctgactggccggcgccaggtgatggacgcaatgctgaggatagaaaacacgatccgtggcctgcttcgggtgcaggggatgaaaatcggcgtcgtccatcgcaaccgctacagcgagcgggtcatggtattatgcgaagatgatcctgcggtgctcgtggcagttgcgcctctgctagctgctcgcgataccatgcgcgaccagctgagaaagctggatttgagtgtcgccaggcaagcacggcatgatccgatctgcgcgttgttcatgagcattccgggcatagggccgatcacggcgttggcctataaggcgacgattgacgatcctcagcgctttgcaaaatcgaaatcagtcccagcccatttagggcttacgccaaaggtctatcagtcgggcgagatcgataggtccggtcggatatcaaaatcaggcgatcatctgcttcggcaccttctgacgaaagctgcagcctcgatgttgatgcgcacatcgaaatggtgcgcacttaaacattggggcgtaaagctcgccggcaaaatcgggatgggcaaagcggttgtcgccgtcgcacgcaagatggcgatcatcatgcatgcgatgtggttgacaggtgaagttttcagatttggatcgggagaacccgttccaaataccccctgatcgtcaggggacatgctgcccgcctgatgacgaggggcaaggtcagtccgtcacgatcggtgtgccggcttctttgaagaagcctgagcacgacgtcagcttggacgaccgcttctcttcgagacccaacatggagctgccctgaggcagactccggacagaagcgcgacacagacggtgacagcccatatggaccttacgccgcttaccacggcgctattctgcgcgccttaactgcgccatcccattgttatagcttcagaaaatacttgcacttgacgaaagcgatccgattacagaagcgatcgtcacgccgaaggtgacgagacggcgcacagcggcggctcggtggagcgcagcggaatagagcgcggcccgtgcggaacgcgcgggggcgcccaccagccggtgtcttcattctgtctgcagaaaccagacgctgaaatgcacaaagcggcgtgcaaatgctcaaccggcactccaatgcccacgcccttgcgaggcgggatcgtttgaggcagattgagtcgcgacgggcaggccatcgaaaaggacgatggatatgctaaatacatcatagctcagacgatctgcggggaccgtcgagcgtaaaaagcgtggcaatcaggcaacagcgcctgagaaaacgcgcgtgggcaatgaggctggtaagttcccgccaattccctctacgtccgccggtgtccctcaccgtccctctacagcactacgaggtatatccgtgcggcctgacaggctgcaatggacgtcttgtcttgcgcggaaactccgccaattctggcttgagggggctttggcaacgcatgacttgaaagctctcttatgccgaacaccgatcgtatcattcgcctgaaaaccgttctcgaccgcaccggcctctcccggtccaccatctatcgcaagatcgcggaagggacattcccccggcaagtgccgatcagcatccatggcgctggctggcacgagtccgccgtcaatcgctgggtcgccgatcccgccgcttaccgggcggacaacgacaatcctccagcgcttgggaagtccggccatggaaaagggtgataacgccgcgccgcccaatcgcctgatcgccgccaacgataacgggcctgtcacggagccgcccagcgtggacatggacgcagcgctgatccgcatcgcggaggctatcggccgccatattgcgcgccagcatattcgcgcgtgcaacgccgccaatgacaatgaaccgaaagcaacagaatgatggagtcgttgacatcaacgctattcgatggcatataatccatcatggaggcggaaccgttgctcaacgaacggcaccagcttgatgcgaagtcctttgtagagcttcgtatctggcgggtgccgctaccggtgaagggatcgatgcacgatctcaaatatgccctcgcctatgtcgtcgatgatgtctgcgtgctgcgctatgacaatgaggcgggcaagggcgatcaccggcatgtcgggggaagtgaaacggcctatgccttcacgacgcccgccgcattgctggcggacttctggaaggacgtggaccaatggaggccagaatgaacatcgtgacgctctccgtcgccagccgcgacgatgtgacgcgccgtgcgcttgccgctttcgagggtgaggcccagggtgcgcatcatagcttcgccagtcccgatctgctgtggcagacgctcacccgcaagcgctgggatttgatccaggcgatgaccgggcaaggtgtgatgtcgatccgtgaagccgcgcggcgcgtgggccgggatatgaaggcggtgcatggcgacgtgcaggcgctcatcaaggctggtgtgatccataaggaagggcgcggcatcgtcttcccctatgatggcgtccatgtcgatttcatgctgaccagggccgcctgaccgcgaaacggatcgcaggagcttttctcatgacccgcattgccctttatgcccgttactcctcggaccagcagagcgccgcgtcgatcgaggatcaactgcgcatctgccgcgagcatgccgagcgtgagggctggcatgtcgtccacagctatcaggatgccgcagtctcgggtgcgagcatgatcctgcgtccgggcatccagtcgctggtgcaggacgcgcaagcgggtcagttcgatatcgttgttgccgaagcgctcgaccgcgtgtcgcgcgatcaggcggatgtggccacgctctacaagcatctccagttcgcgcgcgtgccgctggtgacgctggccgaaggcgagatcagcgaacttcacgtgggtctcaaaggcacgatgaacgctctgttcctcaaggacctggcgaagaagacccatcgcgggcagcgcgggcgggtggagaagggcttttcggcaggaccggtgggttatggctatcggacggtgcggcggctttccagcgaaggtgaactggtgcgcggcgaatgtcggatcgagccgtcagaggcgcccattgtggagcgcatcttccgcgagtacgcggcgggcaaaagcccgcgcgccatcgcgcgtgacctgaaccgggacggcattcccggtccatccggccgcccttggagcgatacgaccatacgcggcaagcccaagctgggcatcggcatactccacaacgagatgtatgtcggcgtacgggtctggaatcgcaagcaggcggtcaaggacccgcgcacgggacgcgccgtgcgccgtcccaatcccgaatccgaatgggtccggagcggagttcccgttctgcgaatcgtcagtgacgatatctggcaggcggtgaagcggcgacgagatgtgctggtcgagcagtataagccgatgatcgatggccttcatgcggcgcaggcgagccggatgcaccgtgcccgtcgtcccgtcactctactgtcgggccttgtcgaatgcggcgtttgtggcggcaccgtcggcttggcggtcaacgggcgctttggctgtatcaatcaccatcgccgccatacctgcgccaacaaccgcaccattcgccgcgaagcgctggaagagcgggcgcttgcgggtctgcgcgaacggctggtgtcgccagagaaggtgcaggcggcggtcgccgcttacgccgaacatatcaacagggagaaccgcgaacagcgggtgcagatcgaagccgaccatcgcgcgctggacaagatcaagcgcgccattgccgggatcatgacagcaatcgaggatgggctataccagcccacgatgaaggcccgcatggcggaactggagcggcagaagaccgaaatcgctgcccgcatggcgttggtcccgcccgtcgttccggcggtccatcccggtatcgccgaaatctaccggcgcgaaattgagcggttcacccgaacgctcgaagacccgcaaacccggctcgacgcctccgacgccattcgttcgctcattcaccgcatcgtcctgcatcccggcgaaaagcggggcgaaatccatgccacgctacatggtgccctcatgggcatcctcgactttgcaaaggaggcccctcgtcctgaagccgttgttacgacaaaggtggctcagggttcgctggagtgacggcagtggtgacggcgcaccccgctcgacagcccgtctccgctcgtttccagacctcccgaatctgtccatgccgcctagcaatcgagccgatgcgccattaggcgttgagggatgagcaatgagccgattgccgcgggcgcgagtccccgttcttcccggacgctgggcctggccgcctgcgtcgcactggtcatgggcaacatgatcggatcgggcgtattcctgctcccggccagccttgccccgttcggctgggacgcggtggcgggatgggtgttcaccatcgccgggtcgctggtgctcgccttcgtcatcgcgcggctgaccgtggccatgcctgacgtcagcgcgtcgcaaatggtcgcgcgcgcctatggaccgctggcgggcttcgcgatcggctggatctactggatctcgatcatcatcaccaatgtcaccatcgcggtggcggcgaccgcaaacctgagcagcatcgtgccaatgctggcccgaccgggggtgggtgcgctctgttccgtcgcctttttgtggatgatgacgggcatcaacctgatcggcgcgcgcgcggccggcctgacgcagatcggcacgacaatcatcaagctgatcccgatcatcgtcgtgctggtcctgctggtattgatcgtcggcaacggcgaggcggaggtcgcccccttcccggcgcagggcctgaccggcgcgggcatcaccgcgtcggcggccttgaccttatgggcgttgctggggttcgaatccgcctctgtcgcggccgacaaggtgcgcgatccggcgcgcaccatcccccgcgcgaccttgatcggcacggcggcgacgggcttcatctatctgttcgtctgttccggcatcgccctgactctgccagcggccgaaacccagacgggatc

SEQ ID NO: 3064 - DNA, 23330 bp, synthetic construct
  source 1..23330: mol_type = other DNA
  misc_feature 1..23330: note = Synthetic
aggcggacataggggatgtcggggatcaacgcggagagcgcgagcagccgggggaaaccccgctgccgccgcagatcccgcacggcattggggaacacgatcgaccggtagcgatcgatactgctctcgtcccgttgtttcgaatccggcgcttcacgaaaattccgggaaggagacttttccatattggataacgcgcctcagccatcagcgaagccgccatttttggccgctccatgtttcataagcacgcgttttcggcacaagtcaacattctggaatagcggattaatatgaaaatttgtcctatatagagacaggaattttgctctccgccgaacccgtaaccgggtttaacgcaagtgccgcgacacggttccgaaacaaattcggccgcgatgctccggccgtctcacggcacgccggccgcgcctcggatgcgcgctttcgtccatagccgccggcttcgcttccgggacgttttcaggaaccggggcgtcgcccggccacccgacgaggcccctaataatccacattgtttatcgcccggatttccgggatttttctgcatttttccgatttatttcggcacgaaacatatccagcgacggcgccggccgtgaatggccttcggaacgcatcgatgcgccgcgccgggttccgccctgaacgagcgcgatccggcgtgaagcgtcgcggatcgtggcgcagttcctgcgctgttatggcacgcccgctgtcgccctcgattgacgcgacggcgcatcttccctaattccgccctcggcaatggattctgccaggtcttcgggccgaaccgccatcagggctgatgactcctactttttgcaggcgttctgcaaggaggagtcgtgcgcgctacgtttcgcaatctgttcgatgccctgaatctcgcggcctttgtccgcacccagcatcatcatgcctcgtccgtcctgcgctggacgatggtcctcgcgccgatgtcggtcgcggtcggaacattgtgcgcggccttcctgtggagcctcgacgccgccacccatgcgcgcttcgatcatccctggctgctcttcctgctgccgatcggcggcggcgcggtgggctggctctatcatcgcctcggcaagtcggtggagggcggcaacaacctgatcgtcgagcagatccacgagcccggcggcggcgtgccgctgcgcatggcgccgctgatcttcctcggcaccgtcgtcacccatctgttcggcggatcggccggacgcgagggcactgcggtgcagctcggcggcagcctcgccagcgccaccgcgcggctgttccggctcgatgcgccgagcgtccgcatcctgctgatggcgggcatcgcggccggtttcggcgcggtgttcggcacgccgctggcgggcgcggtgttcgcgctggaggtgctgacggtcgggcgcatggaatatgcggcgctgctgccctgcctcgtcgccgcgctggtgggggactggacctgtcacgcctggggcatccgccacccgatctacccgatccataccccgctggagagcgccgccgcgacgttgctcgccgggccgctgctgtgggccaagagcgcggcggcgggcatcgccttcgggctggccgggctcgccttcgcggaggccaaccatgcgctcggcggctggctgaagcgtgtcgtcccctatggcccggcgcggccggtgatcggcgggctggcggtgatcgcgctggtctatgcgctcggcacgcgggcctatctggggctcggcgtgtggagcgccattccgggcgatccgacgctcctcggtttcttcggcccgagcgtcgatccgtggagctgggcgctcaagatgctgttcacggtcgtgacgctgagcgcgggcttcaagggcggcgaggtgacgccgctcttcttcatcggggcggcgctgggcaatgcgctggccggcctgctccatgcgccggtggacctgttcgccgggctcggcttcgtcgcggtcttcgcgggcgcggccaacacgccactcgcctgcacgatcatgggcgtcgagctgttcggcggcgcctatgccgtgccgatggcggtggcctgcttcgtctcctatctctgctcgggccatagcggcatctatctgtcgcaacggatcgccgtgccgaagcgccgcgggcgcgcccttccccccggcagcacccttcgcgacgcccgtgctcccaccaaggagccggcggccacccgacatccggcctgagccgcacgatgccgacctccgtctggatcgccgccggcggagcgatcggcaccctgctgcgctatgggatcaacctcgtcatcacggcttggctgggcgaggcgatgccgtggggcacgatcgccatcaacgtcagcggctccttcctgatcggcctgttcgccgccctcaccgagcccggcgggcggtggatgctgtctcccgatatccgcctcttcgtgctggtcggggtctgtggcggctatacgaccttctcctcgttcagcctccagacgctcgcgctgatccaggccggcgaacccggccgggctgtcgccaacatcctggtttcggtgatagtctgccttctcgccgtgtggctcggatatgtcgcgccggcgttcctcttcccgggagggaggaattgacatgaagctgctcgccatcctcgtcggcgcgaagagcacgcccgcctgcctcgacgcggcgcgcaccgccgcgcattccctgccccatgcggagatcgcggccctgcatgtcgtggtcgatcccgagaccatgatcgcggccagcgaggaaatcgaactccagcgcctgcgcgcggggaaggaaggctccgccaggcagcgtgccgacgcgacccatgccgccttcgcgcaatggcgctcggagaatggcagcccggatatgcggtggacgtccattcccggcgccgaggaggagatcgtctgcaacgaggcgaaagccgccgacgtgatcgttctcgtcctcgcacgggaggtcaatctcgatagcggggatgccctccacgccgcgatcttccgctccggcaagccggcgctgatcgtgccgcccggctggcgcagcggcgaacgcccctgcttcgcgcacgtcgccgtcgccctcagcaacagcgaggcgacacgccacgccatcgaaggcgccggcccgtggctgagggccgcgacgcggctgaccgcgatccgcgtcggcgaggagggcgatgccgcgccatgcctctcgcatctcctctccgaaaccgggatcgagccggccctgcacatcgtcccccgcagcggaccggacctcggcgcccagatcgtggcggaagccagggcggtgggcgcggaccttctggtcgccggcgcctatcgccactcgcagatcgtggagtggctgctcggcggcaccacccgccatctgctcgcggcggccgacctccccatcctgctcgcgcattaggggagaccgcgccccgcgccctcaggggaacagcagcagcttgccggtggtcgcgcggctttccatgtcgcgatgcgcctgcgcggcctccgcgagcggatattccccgccgatccgcaccttgagcttgccgccgatgatccagtcgaagagctgcgcggtgcgggcgcgcagcaattccggcgtggagatatgatcgaaaaagaccgcgtagccgatcttgatgctcctcggcaggctcatgatgtcgagcgggccggggccgcccagaacggggccgtaccagcagaaggtgcccgatcgccgcactatgtcgagcgagccctggaaggtcgcggggccggagccgtcatagacgacatgcacgccctcgccgccggacaggcgcagggcctcgtccgcgaaccggccttcggcatccacgatcacatggtccgcgcccgcctctttcgcgatggccgccttgtcgctcgacgagacccgaccgatgacatggccgccgcgcagcttgatgatctgggtgagcagcagcccgaccccgcccgccgcggcatggacgaaggcgatgtcgccgggctgcaccggatagaagtcggttgcgaaatggctggcggtgaggccctgcatcatgatcgccgcggcggtccggtcgtcgatggcatcgggcacggggacgagcgtgctcgccgggatcacgaccttcccggcatagcttccgggcgcatagacccaggcgacgcgctggccgggccggaagccctcgacaccggcgcctgtcgccagcacgcgcccgactccttccacgccgaggatcttcggatcgggcatctcgcgccaagccatcccctgccggacgccgacgtccatgaaattgacccccgcgacggcgatctcgaccagcacttcgccgacgccgggcaccggctccggccgatcgacataggccagcataccggcgtcgccgattccgttcatcacgacagctttcatgttctcacctcagaattgaacgatcattccataattgaacaaataaaaaggcacctatcgcaaggcccgaagcgccagatcggcgaggccggcgagcgccgccgggcctgcgccgccgcgcgcggccacgcggattccgacgaagctcgcgatcaggaattcggcgatcgcctgccggtcgagccccggcgggatatcgccctcggcctgggcttcgcggacgcgatcggccacggcggcgcgaatggcgtgggcaagcggcgcgcgctcctcgacgagatccggccgcgcggtgccgaactcgcagatcgagctggtgccgagacagggctggcccgccgtggcgaccacccgccgcagcatcgcctcgatgccgtcgatcgcccgcggtccgctgcgcaacgcctcgatatgggcggcacgctccgcctcgccataacggcggacggcggaccgatagagctgccatttgtcgccgaacgaattgtagaggctttgccgcccgatccccatcgcatcgacgagcatctgcgcggacgtgccctcgaagccatgctcccgaaacaccccgatcgccgaatcgagggcagcgtcagcatcgaattcccgaggtctcgccatgccccgcttctatgcgatcgggaacgatcgttcaagaattaaatcggcgcctttcgtcgatcatatttcccaggcgacgatcgacacggggaaatggaagcggatgccgtccggcgcgtgccaggcgcctaccccgatcctgtccgcgccgctcgcgatgtcggcgtcgaacatggcggccagccggggcatgtcctccacgtccgccagcgtgtcgaggcgggcttccagccgatagccgtcgatcaccatctcccgcagcccggcctcgcgcccgatctgccggagctggtcgagggtgagcgcgctggtgtgggacggatcgcgcagccgctccatgatgtcataggcctgctgcgtctcggccgacggcgtggcgtcgatcaccacgatgcgcccatcggcccggcagacgcgcttcatctccgcgagcgtcgcggcgggatcgggcatgtggtggaaactgtagcgcgtggtcacccgatcgaaggcaccgtccccgaaaggcaaggcggtggcatcgccgacatgccaggccagatgggcgagcctcgcctccgcctggcgcagacgggcctgatcgatcatcgcgggcgtgatgtcgatgccggtgacggaacggacatgcccggccagcgcgcaggccagaatgccagggccgcacgcgacatcgagcacatcgagatcgggcttgagcgcgcaggccgcgagggtgcgggccaatgcgccggcttcggcatggatcggcagctccgcaaagggtttcgcccagcgggtgaactgggcgacgatacgctcgtcatgcgcgctcaaggtcatgatgtgctcctcctgagcgacggggatagcggtttgccccatgaccggctaacgacgatcggccaatgatcgatggatatcggccatgaagtcactgaccgacgcagaaacgcgggacgtcttgcaatcctatggcctcgacaggccgacggggatcggcttcgctttcctggatagcgcacgcgacaccttctacgattggcattcgcacgcctatcaccagctcatctacgccatcgacggcccgacgcagatcgaaaccgcgcgcggccgtcacatcctgccgatcgggcgcgcggcctggattccggcggacacacagcaccggacgctgatttccggggccgagggggtatcgctctatttctcgccggaggtcgtggcggacgcgacggggcgcgtgcgcatcctcgtggcgagccggctgatgcgggagatgatcctccacgccgcgcgctggccgctcggcgcgagcgagagcgatccgctcgccgccagcttcctgcggacgctggccctcctgtgcggcgaatggctggacaccgagctgccgctgttcctgcccggcgccggccatccgtcgatcctgcgcgcgatggaccatgccaccgcccatctcgccacagcgacgcaagccgatgccgtggcggcggcggccatgtccgaacgatcgttccgccgtctgttcgaaagagagacgggcatgggctggcagagctggctcacgcaggcgcgcatcctgacggcgatgggattgttgagcgagggcgggcgcgtcaccgacgtcgcggcggatgtcggctacacatcgctcagcgccttcgccaaggccttcgcgaaactcgcgggggaggccccggcgcagttccgggcacgccagcaaagctcgaaagccgcccgccaggagagcgccggaatgggactgtttcgccacggtcatcctcgaccgccgctcaagccgtgataagcgtccggccatggacactggccgaccgatgatcgaacccgctcaccattcctccccgatccgcacgcgctacggcacggctcgggggctggtgcggctcctgctgtcccaccttcaggtcgcggggcgcctgtcgcatatcgtcatgcccgagccgggatcggtccggcgcttcgtgttcgtgtgtcagggcaatatctgccgaagcgcgttcgccgatcagatgacgcgcgatcggggcttcgacagcatctcgttcggcctgtcgacatcggcggacgggccggcccatccgccggcggcgcaggcggccgcccgtctcggcgtggacctgtctgcgcaccggacccggcgggtggaggattatgttccccggcccggcgatttcctgctggcgatggaggtgcgccagcttgcacgtctcgccgggaacgagcggctccgccacctgccccgatcgctgcttgggcgctgggccagcccggcaaggccgcatctgcacgatccgttcggcctggacgccgcttatatggacacctgcttccgatcgatcgaaacggcggtggccgaactcgtcaggcgctaccccgccgcacggctttcgcaaggacgttgagcaggtcgcgcaggaagggcgcgggatcgcgcaggctcatcacataatagcgggtgcggggatcgatgaaccccagcccataggacaggatgtccgcgagcgggcgaggcgcgaacatcggatcggcgatggccgaccggcccaacaggacgcgcagcaggcgccgggtttccgggatcatgtaacgggcgcggaggccatcgcggggagatgcggccgggcgatgatcctccagcaccgcgcggcgataggcctcccaggcgaaatgcgcaccgcaatgccacgccagcggcaggctgccccagaaccttccattgatttccatcagccaatagcggccggtccgggcatcgaagcgatattcgaccatcgccgtgccctgccagccggccgcccgcagcagcgcgatcgacttctccatctggtcccgatggcgatcgagcggctccgcggcgcaataggtcgagacaccgccctccggcggccattcgtgcagccggcgatgctggaaccgcagcgtcggctcgccatcggccatatggatcatctgccccagcccgatgccggggcaatagctctggatcaaaggccagcaaccaagcgggcgatagcgatcgagcaacgccaacaggccgcctttatcgaggacgaactccgctttctcgaattcgagcccatgcgctgcgagcctgggcaggatggccgtcggatcggcccatttcgccacgatcgggtagtccaatccaccggcgcgcgccatgaaatcgtcgccatcggccggctgccagctttgcggcgtatcgatccccagggccgccgcgcgccgcaacgtctcgcgcttgtcgagcacgaggcgcagggccgcggcccgtggcgtcaatattgcgcatcccccgatccgctgcggcaggtcggccagcgccgcgagatcgctctccgagatcgccagcaccgccgccgcgcccgtcgcctcgattatctccggcaaccattgcccgatgggccgctgcggccgctcggaaaagccggtgcaatagcgcgaggcccggccgatcgacgaggccttgccgatgccatgcaccggcacgccgtgcgaacccaaatcccggatcacggccagcccgatcggagaatccacgcccagcacgatcgccagcggatgatggctcatccgggcagcagccggcgctcatagcgccaggttccgatcaactggtccgcgaaccgcaggccggtccgcagcagattggcgggcaggcgctcctgtttgcgatccccgtccagcagctcgcccggatcgagatccgcgaagccgctcgcccggagcgagggatggtccgcgatggcccggcacaggctgtcgaaccgggccatgaccgaacggttcggccgctgccgatcccgcgacagcatctcgaagctgtgggtgacgatcatgaaggccggctgtttcgtctccgcggcatgagaaagcgcggcacgcatctccatgcccgacgcggcgcagatctgggccggcctgaagtgacggggccgatcgaaaaatcccgacacgggcaacaggaaaaccccctccttctcaaccgcgccgatctgcccctgagccaccgaaacgcggcagtcaccgccgagataggccggattgacgctggtgtcccacgcgatcccgagcgcggcgagcgcccgcaggctgttgtcgtcggcaccgtaattgcccgcccggaaggcgatgggccgtggcgccccggcgcggacgagaatgtcccgtgcgaggccgagcaaccgcacctgatcgtcgagatcgaaatccccgatgttgcggcccgaacggccagccacgggcgacgcgttcgcccattgcagccattcggtgtggatgtgcaattgaacctcgtggccgcgggcgaggatcgggccgacgatatcggcgatcacctgttcgccatggaccagcgccggcatgggatcgacgaagaacacgcccttgagcccgtgctgctcgaggcgatccatctgccagccgacgccgaaatcgcccgccgggcatcgccccaggatcgaactctcgaaattctcgcggatgccctgcccccgcgcctgccctcccgccgacaattccgtgtccacagagatcagcacatgggtcatcgccggggcttctcgcagaattgttttaacgtagggataagcatggcacagcatcgttgccggtgcctgtctgtcgcgcaccgcgccatcatctcgggcagccggcctttccgcttcgagtgccatcgatcgatggccataaaaaaggcggcgccgtggcgccgcccttatctggtgcagactagctgcttgttagccgccagaaccgcgatctctgaggcgccgatgatatccacctggagcccgtggtcaagggatcgggggccatggcttcgcttttattgcgccagcgatggaaccaatcctgcttgatccagcagagatttcctgatgctgtcgccccgttgggggagtgtttgcatgacgtggcgtttggggttggatctcggcacgaattcgctgggatgggcagcgttgcggctggatgaggcggatcagccctgtggcatcatcgccgccggatcgcggatattcagcgatggacgcgatcccaagtccggcgcgtcgctggcggtcgaccggcgcgatgcccgcgcgatgcggcggcggcgcgatcgcttccagcagcgccagcgggccttgctcgactatctggtcaaggatggcctcttccccgccgatccggccgaacgcaaggcactggccgcgctcgatccctatgcgctgcgcgctcgcgcgctggacgagccgctgagccttgccgaaatcggccgcgcgatcttccatctcaatcagcggcgcggtttccagtccaaccgcaaggccgatcgcggcaaggacgaggatgccggcaagatcgccatcggcatcgaccggctgcgcgacgcgatcgacgccgccggcgcgcggacgttcggcgagtttctccatctgcgccgggccggtgccgaaagcgccaacgccattccctccgtccgcacgcgcctgcgccccgagaccggagagggcgccaagggcgacggttatgacttctatccggggcgcgaactcatcaaggcggagttcgatgcgatctgggacgcgcaggcccctcatcaccccacggcgctgaccggcgacgtctacgggcatctttatgagatcgtcttccatcagcggccgttgcgaacgccaaaggtcggcaaatgttcgttgcctcctcacatggaggaacggctgcccaaggcccatcctctcttccagcgccgccggctgctggaggagttgaacgcgctgatgatcgtccggcccggcgagaccgccgaacggctgacgcccgagcagcgcgatcttctgctgttgaagctcaaggacaagcgcaaggtcggctttgaaagcctgcgcaagacgctgaagctcgatcccgccgcacgcttcaacaaggagagcgagcatcgcaccgagctgaagggcgacgaagtggcggccgagatgtccaccaaggcccggttcgccacgctctggtgccacctgtccatcgatcggcaatgggaggtgatccggcgcttgcaggccctcgaaagcaaggaggacgaggctcgcttctgcgcatggctggccgaagctcacgccctgtcggaagagcaggccaaggccgtcatgggcgcgcgcctgccgcacggccatggccgcttcggcccgaccgcgacggccgcgctgatcgaggctctcaccacgggccgcacgccccaaggccgaggccccaccgccccgccgatcgcgccggaccgcgtggtcgtctatagcgaggcggccgctctcgccggctatcatcacagcgaccatcgcaccggcgagattttcgaggacggagatgggcgccccgccctcccttattatgccgtgccgctcgaacggcacatcatgccgggcacggccgatcccgacgagagggatgaggcactgcggctcgggcgcctcaccaatcccaccgtgcatatcgggctcaatcagctccgccgcgtcgtcaaccggctgatccgggcttatggccccccggccgagatcgcgctggaactggcgcgtgacctcaagctctccgacgacgagaagaagcgtcgcaatcaggagaatagccggaaccgcctcgatgccgagaagcgctcggaaaagctcgaagcgatcggccagcgcgacagcggcgccaatcgcgccctgctcaaattgtgggaggaactcaatcccggcaacgtgctcgatcggcgctgcgtctataccggcacgcagatctccatggagatgctgttttcgggcgcggtcgaggtggatcacatcctgcccttcgacgcgacgctggacgattccaacgccaacaagattctctgcctgcgcgaagccaatcgcgagaagcgcaagcgctcgcccttcgaggcctggggacataccgaccggtgggaggagatcgccgagcgggcctcccgcctgccgcgcggcaaacgctggcgcttcgagcccgatgcgatgcagcgcttcgccgaggagggcggcttcctcgcgcgccatctggtcgacacccaatatctcggccgcctcgcgcgcgactatctcgcggcgctctatccgggaacgggggaagggagcagcccggtctgggtgtcgcccggccgcctgaccgaaatggtccgccgcaagctcgggctcaacacgctcctgcccgatcataatttcggcggcggcgcggatcagccgaagaaccggctcgatcaccggcaccatgccatcgacgcggcggtgatcgccatcctcgatcgcggaatgctcaaccgtatcgcgcgcgaatccgggcaaggcgcaagcgatgccgacctgctcaggatcatcgtgcccgaaccctggcccggcttccgcgacgatctcaaacgcaccgtcgacgccatcgtggtcgcgcatcggccggatcatggcaccgtctccaaggccgggctcaagcgcggccgtgaccagaccgccgcccgcctccacaacgacacagcctatggcctgaccggcgagacggatgaaaagggcaacagcctcgtcgtccatcgcgtaccgctcgcctcgctcaagaaagcggcggatatcgacaaggtgcgcgatctcgcgctgcgcacagcgctggccgacttcaccgccggttccgagggcaaggccttcgaggcccggatcgcgaagttcccggaattggggccgctcgactatcgcggcatccggcgggtgcgtatcatcgagccgctgtccgtcatcccgatccgcgacgccacgggccgcgcgtacaagggctataagggcgactccaattatcgctatgacgtgtgggagctgccggacgggaaatggcaggccagcgtcatctcgatgttcgacgcgcatcggcttgaggcgcagccccgcccacaccccgccgcgcgtaaagtgctgagcctccagcagagcgacctcctcgccctggaagcggaaggagccgcgcgccgactgatgcgtgtcgtgaagttcggccagaacggccagatcgtgttggccgaacatcaagaatccggcgatcttaaacgccgtgacgcgacgtccaatgacgaagacccattcaaatatatcgcgccgacggcgggcggcctgaaaaaggcgcgtgcccggcaggtccgcgtcgacgagctcggtcgcgtgctggaccccggctttcccgcccgaaagtcgcggcggatcacaaaaccccggcggatcgcggcggagtaggcggcgcggcgatggagcggatcgtcgacatcgccacggacggtcgtcaccttgccgcgcatcgcggtttcctgatcgtctcggaagggcgcgaggagatcggccgcgtgccgctcgacgacgtcgccgcggtgatcgtccatgcccacggcatcacctggtccaccaacctgatggtggcacttgccgagcgcggcgcgctgatgctgctgtgcggccccaatcaccagcccgccgccgtctgcctcccgatcgacggccatcatgcccagaatggccggatgcgcgcccagtgggaagccgggcgcccgctctccaaacagctttggcgggcgctcgtcgtggccaagatccgctggcagggagccgtgctggaagccaatggccgcaccgccggcgccttcgatctgctcgcgcgcaaggtcggctccggcgatcccgacaatgtcgaggcacaggccgcccgccgctattgggggctgctgatgggcgaggatttccggcgtgatcgggaggccggcggcgccaatgcgctgctcaactatggctatgcggtgatgcgggcgatgtgcgcccgcgcggtggtggcggcggggctgcatccctcaatcggtgtccatcatgccaaccggggcaatcccttcgcgttggcagacgatctcatcgagccgttccggccgctggtggatgcgctcaccgttcggctcggtgccgtcggcgtggcgaccgtgacgcccgaggccaagcgcgcttatgccggcctgatcgcgctggatctgccgggcatgggtggcgtcaccaccaccgtatcgctggcagcgacacgcgccgcgcagagccttgcgaagagcttccagacgggcaaggccgccgatctcgttctcccccagcccccatcggcgctcgagctggccgggctcgacgcgctgctgcggtgagtgcgacccagcttagcggctatcggctgatgtggatcttcgtcatgttcgacttgcccgtcgccaccaaggccgaggcacgcgccgctacgaagttccgcgaatatctgctcgatgagggtttcgagaaaagccagttctcgatctatgctcgattctgcaacggaaaggagcaattcgaagcctatatgcgacgaatcgaggcacatcttcccgaaaagggagaaattcacatcctgagcttcacggacaggcaatatgagaatatcattcgctatgccggccagcggaagcgcaagccacgcaggaatccagatcaactggccctgttttaagggaacccaccagtgattcgcgaaaatggatcgtcatctatttcctgtgaaaacagagagatagctgacgatccaggatagccgctcagagatcgcggtccagcggcaacgaagccgccgcagtgcgcttgaccacgatgaggatagccgctcagagatcgcggtccagcggcaactggcaatacgatgtcatgccgtgcctcgaaaggatagccgctcagagatcgcggtccagcggcaactggttggcatttactgcatcacgaaggcatgaggatagccgctcagagatcgcggtccagcggcaacattgccggcataggcgtaataataggcgtcaggatagccgctcagagatcgcggtccagcggcaacacatcattggcggccgtcaccttgggcgcgaggatagccgctcagagatcgcggtccagcggcaactgttttcgccgccgccatcgttgccgccctaggatagccgctcagagatcgcggtccagcggcaacgcccggtcggttctctgcgctccgggcaataggatagccgctcagagatcgcgatccagcggcaactgcgtgcttcgacagcccgaccatcgtggtaggatagccgctcagagatcgcggtccagcggcaacgcggcggcgcaggggccggtgctccaagcgaggatagccgctcagagatcgcggtccagcggcaacccatcgcatcggtcaccaacgccgtgggtgaggatagccgctcagagatcgcggtccagcggcaactagaatgtgcgggcctgcaaattttgggtgaggatagccgctcagagatcgcggtccagcggcaactcaggtggaacgcgggcgatctttgtagcaaggatagccgctcagagatcgcggtccagcggcaactctacaaggatctcttcctgctgacgctcaaggatagccgctcagagatcgcggtccagcggcaacatccccacgacgatgccgttcgtcctgttcaggatagccgctcagagatcgcggtccagcggcaacatagaccttgtgatggccgcgtgcgagtgcaggatagccgctcagagatcgcggtccagcggcaacctgcccgtccacatgggcagctacgtcgtcaggatagccgctcagagatcgcggtccagcggcaactatcgacaacgcccgtaacaacggaatccaaggatagccgctcagagatcgcggtccagcggcaacttacggaagcgttcgccgactaccgcaacaaggatagccgctcagagatcgcggtccagcggcaactcgcgacgcgcgaacgccatgcaacgccggaggatagccgctcagagatcgcggtccagcggcaacccgatgatggtcagggcgacggcggcaaggaggatagccgctcagagatcgcggtccagcggcaacacacgaacacgctcccacgccgcatcgtcgaggatagccgctcagagatcgcggtccagcggcaacagctgcgcgacacgggcggaaagctggcgtaggatagccgctcagagatcgcggtccagcggcaacttatggctgcaggtcacaaggagtattgctaggatagccgctcagagatcgcggtccagcggcaacagatcgccggtcgccgaggccacgccccgaaggatagccgctcagagatcgcggtccagcggcaacgcgcaagtgcattgctccatggccacggcgaggatagccgctcagagatcgcggtccagcggcaaccctgcggcgctggcgtgatgatccgccccgaggatagccggtcagagatcgcggtccagcggcaacgcgatgatgctcgctccaagccccaccgagcgtgagcagacggaactcggaagcccaattcagatacagacaagaatgatggccgaggcgcagaacgtacccctccccgacgaatgcccggattgccgccgatctattccttggtcgtcttccgatatcgattgatcgcggccccgaggaaggcggtacgatcgcgatcctccccacgaaccttctgccgcgcgcgcatcaggtctttccagccgacatagccgaccagcgtgcccctgtcgggctccaccaccggcagatgcgcggcattcgccttcaccagcttttccgcgaggctctcaagatattcgttcggatcggcgacgatgatatgcattccggcaagcaacgcgcccaggctcgtgtcacgatgcttgcccgcccgacgccagcccatcaccgaaggcggatcgacgatgccgagcacatgcccctccgcatcgacaaccgggaagctcggatgacgccgttcgggcgccgtcagaaaactcaccgcctcccgcagcgtcatcgccgccgacaccgtctgcacatcgcgtgtcatgacttcgctgacgcgcgtcagcgcgaagggatcgacacgatattcacgaacgatgtggtggccgcgccgggcgatcttctcggtcaggatcgaacgcttcatcagcagcactgtgacgagatgcgcggtcgcgcaggcagcgatgagcggcaacagcacgttcgaattgccggtcagttcgaccgagaagaaggtggcggtgagcggcgcgcgcatcgtgccgcccatcgtcgcggccatggccagcagcgcccagaaaccggggtctgccgccggaagccagccgctcaatgcggcgcccatcgccccgcccatgatgagcagcggtgcgaggatgccgcctgacgtccccgaaccgagcgcaaccgcccagatgatcgccttcacgatcagcagcaggagcgcgatcttgagaatcgcgccgccggcaagcacccgcgcgatattgtcgtaaccgacgccgagcgcatggggatcgatcaggccgccgatgccgacgacgaggccgccgatcatcggccaccacatccagtggatcggcagcttcaggaaaccgtcctcgcaggcatagacgagttgcgtcagcccgaccgacagcagcccgccggcgacgccgatgaacacccagcccgcgagccccaccgcgctgatcgccgccacgccgtgaaacggaaacagcggcgagggcatgtggagagcggtgcgaccgatctcggcgatgatcgcggcgaccgcgaccggcacgaaactgcgcggcgtccattcgaacagcagcaactcgaccgcgagcatgatcgccgcgatcggcgtgccgaacaccgtcgtcatgcccgccgcggcgccagcaacgagcaatgtcttccgttcgttgtcggtgacggggagcgcctgcgcgatcagcgagccgatcgatccgccggtcatgatgatcgggccttcggcaccgaacggaccgccggtgccgatcgaaatcgccgaggaaataggcttcaggatcgcgaccttgatgtcgagctgcgagcggccgagcatgatcgcctcgatcgcctcgggaataccgtgtccgcggatcttgtcgctgccgtagcgcgccatgagcccgacgatcaacgaaccgacgaccggcacgagcacggacgacagcccaagctggtgatccccaaggttgagattggcgaagctgaacgtgccgagataagcgaggttggtacacaggcggatgagcccgagcagcgcgatgccgccgaacaacgccgccacggcaacgaccactgcgatcaatgcgatcaggaggactctgggctcggtggtgaagtcgcccagccggcggtcaatacggtcgttgctcaaatttttcgcttccagacaacagagggacggccttccgggcaaggctacccatatttctatcgcactacgatacaaaaaatcgagtgtcctggataatgcgaccagaggcatccatctcagggggaaggaatggtgccggtatccatcggcggcggaatgggcacgtccgaaaacatcctccttgtccaggatgcctccgaaacgtgccccggctccgcataggcggagcccgccttcctcaagccgccctccgacggtcccgaccgagggagacggtcaggatcgccatccggcaggcgttccttgagcgcagacgcattcaccccggagatggcgtgatgctctgcccgaaggcctccttctggagctcatgataggcaccgaccagccggccgagactgaacgctcggttccgcccgctggggttgggaagaacccagacgccggacgtcccgatgccggcagactgtcggccccagcgaatatcccggcgcccgctcagcgctgaaaaggatgccttgccgagaaacgcgacgaaacgcggcgcgtatcggccgaccttgtgctcgaacgcagccgccgcctccaggaaatccgcgctggaaagctgatcggcccgcgccgtggcgcgctcgacgaccgtcgtcagcccgcagccatgttggaggaaaccgcgatccatctcgggggtcagttcccgcgcggtgaaacccgcgagatgcatgacccgccagaaccgattgcctcgcccggcgaagtgatggccagtggccgccgccatcaggccgggattgatcccgcagaacagcacgccgagcccctcggcgatgacgtcgggaagcccagcgccctcccccgatgcgggatgcgcagtcatccgcagatcacggccaccgccttgcgggcgatgtcccgaagctcctcccgatcggcgcccgccctggcgcgcagggcgatggtctgcatcgtcgccgtcgccatcatggccagcgtttcgggatcggcgccgaccttcaactcgcccgcctcgcgggccgcacggagccgcgcttcgaacccggcatcgagccttcggaagcctgccgccacgatgcgctggatctcggcatcctcggcggcttcggtgatggccgtgccgaccacgaaacagccacgcggccgcgcgccatccacgaaatagatcgacagggccgcctcataggcgcgcatcagcgcctccttcagagtgccgccgctgagcgcctcgcccagggtgacgaatttctggtcccaatattcgcccagcgccttgagatagagcgcgtgcttgtccccgaacgccgcgcgcaggctcggccggttcatgcccgtcgcggcggaaatatcgtcgagcgacgtgccggaatagccggtcttccagaaggcttccgtcgcccgctggagggcgacctcgggatcataggcgcgtggccggccgcgcccccttgcctcgctctcttttgaattttgttccatttcgcataaaatccttgacgcacgtctccgtcaggcatatttgtccatcatcgaacaaaattcaagccggctgaaaacggcgacccgacctcccggttttcgcgggttcatggcggccggaactgttgggtggcgtcagcgtgcttcccaccaaatgacggatcggacgatgcaagaccagattgacgaagcgacggaaagcgcgagccccaacccgccgaagcggacgctcggccagaggctgcgccttcccctgatgatcgcggttccggtactggccctgatgggcgccgcggcgggatattgggcggacaagccctatgtctcgacgaacgacgccttcgtccgggcgacgaagggctccatcaacgcgcgggtttccggccaggtggtggaaatcgcggtgaaggacaaccagatcgtccgcagaggccagcttctgttccgtatcgaccccgagccctatgagatcgcggtcgagcaggccgaggccaagctcgccagcacccgcctccagatcggggggctgaaggccacctatcgccagcagctcgccgatcttcaatcggcccgggtgtcggcccagttcgacgggcaggaattcgatcgcaagaagaacctgctcgcctccgacttcacctcgcgatcggcctatgagcaatcggaaaccgcatataaggtctcgcagcagcacatcgcctcggccggggagcaggtggccaacaccgtggccgcgctcgccgggaaccccaatatcgcggtcgatcgacacccgacggtccgcgaggcgcaggcggagctcgatcgcgcccggctgaacctgtcctacacccgtgtcctcgccccggacgatgggatcgtgaccaaggtggacgacctccaactcggcgatttcgtcaacagcggcgcggccgtcttctcgatgatgtcgacgcatcgcatctgggtggaggcgaatttccgggagaccggcctcacccacatgcgccccggccagcccgcgacgatcatggtcgatgcctatccggggcatggcttccccgcccatgtcgccagcatgagccccggcaccggatcggaattcgcggtgctgccgcccgagaacgccaccggcaactgggtgaaggtggtccagcgcctgcccgtccgcctggagttcgacgcgctcgatccgcagcggccgctttattcgggcatcagcgtcaccgtccgtatcgatacccgcgcacgcccctcccgggcgacgccagaggcgcggtgagcgcgatgcctgccctgagcgccccggctgagggccgccccctgctgtcgggcgcggcgctgctcgcgatctacatgcaggcggtgaacatctcgctgcccaacgcggcggtgctgcacatccagggcagcctgtcgatgaccgacgacgagatcggctgggtcttctcctcctacatcatggcgagcgccatggtgatgccgatgacccgctggctggcgggcgcattcgggcgcaagacggtaatgctcacgtcgctggcgctcttcgccctaggcctcatcctcgatacgcaggcgacgacggcgttgcagttcgtcttcgcgcgcatcttccagggggcggcgagcggcccgcttgcgccgctcgcgatggccatcctgctggaaggcgtgccgcccgagcgccagccccggcgcggcctcctctccaccgtgatcgggctcgcgggcatgttgagcggccccgcgatcggcgggatcatcagcgaatatcatgactggcggctgatcttcgtgttcggcctgccgctcaccggcctcatcttcctgacgatggcgctgtatctgatcgagcagaagccccggcagaacccgcctttcgatttcttcggcctcgcgacgctcgcgctgggcatgatcgggctgcaaatgctgctcgatcgcggggagcgcatggaatggttcgcgtcgaccgaaagctgcatcgaagcggccgccgctgcgctcggtttctatctcttcctcgtccatgtgctgaccgcggagcggcacttcctcaacaaggcgctgttccgcgatcgcaatttcgccttctcgacggtgatgttcttcgcgctcggcttcgtgctgctgccgacgctcgcgctcacctcgccgatgctggaggaactgctcggctatcccgccgacaccaccggctacatgacccttccgcgcggagccgcgctgatcggcgcgctcgccatcaccgccacggcccccaaatggatcgacagccggctgctggtcgtcaccggcatcgggctcaccgctttgggcaactgggtgatgctcggctattcgccgctgatggactggcgctatgtgctggtcgccggcacaatccagggcgccggcctcggcatcctgatggccgcgctgagcaagacggcgttcagcacgctcgcccccgggcttcgccccgagggcactgcgctcttcaccctcgcccgcctctacggcagcaccatcggcatcgcgatcgtgcaggtgcttttctacaatcacacgcagatgatgcatctggcgctggccaagaacctgacgccgcatcatgcgaccggcccggccgccggccttttcgccggcgccggccttcccatgctcaacgagttgctgaccggacaggcggcgatcatcgcgctcatcaaccagttcaagctgatgatgatcgtgatcctcgccgtcagcccccttgcgttgcttctccgcaaatcgcggccgctcaactgaacctcgcggagccgacatcatgatttcgaaacgcttcctcctctcgcgccggatggcccggacggtccttgcgggtgcgtcgctctccctcctgtcggcctgcatggtcgggccggacttccagaagcccgtgccgctcggatcgctgcattatgatcggcaggccgagcagcaactcgccacggggcagaacgccgacgccccgcgtatccgtctcgcgcaggggatcgagggcgactggtggtcgacccttcagtccgcaaagctcgatcaggtgatgcgcaaggcgatcgacggcaatctcgacctcaccgccgccgacgccacgatcgcccaggcgaacgaggctgtcgccgccgcgcggggcacgctccgcccacaggtcgatttcggcgccagcggcggccggcagggcgcgggcggatcggcctccaacatctattcggtggggccgagcgtcagcttcgatttcgacatcttcggcggcaagaaacgcgccgtcgaggaacgcggcgcgctcgcggaccttcagaggcaccgctacgacgccgcctatctcacgctgaccggcgatgtcgccagtcaggcgctccggctggcgtcggcgcgcgcgcagatcgacgcggtcgagacgctgctcgaacaggatcgccggacgctcgcgctcgtccagacggggcacaggttcgggagcgccacgcaggtggatgtcgcgctggcgcagacac

SEQ ID NO: 3065 - DNA, 23324 bp, synthetic construct
  source 1..23324: mol_type = other DNA
  misc_feature 1..23324: note = Synthetic
atcgccttcgcgctggcatggctgctggcacgcgcgcggtttccggggcggttcctgctcgacggcctcgtctatctgccgctggtgctgcccccggtggtgaccggctggctgctgctgctggccttcggccccgaaggcccggcagggcgcttcctcgaccggacgctgggcatcacgctgatgttccgctggaccggcgctgcgctcgccgccgcgatcatggcgctgccgctgatggtgcgggcgatccgcctgtcgatagaggccgtcgaccggcggctggagggcgcggcgcgcacgctgggcgcctcgccctggcgcgccttcctcaccgtcacgctaccgctcagcctgcccggcgtgctggcgggcgcggtgctgggcttcgcccgctcgatcggcgaattcggcgcgaccatcaccttcgtttccaacattcccggcgaaacccgtacgctgcccctcgccatctattccgcattgcagatacccggcagcgaggcgctggtgacgcgactggcgctgatctccgtcgcgctgtcgctaggcgcggtgatcctgtcggaagcgctggcgcggcgcggccagatgaacgaacggatgggccatgtcctttgaggtcgacataagccgccatctgggcgaccgcatcatctccgcccatttcacggcggaccggggcatcaccgcgctgttcggcccgtccggcgtaggcaagagcagcatcctcaacatgatcgcgggcctgctgcaacccgacagcggacgcatcagcgtgggcggcgaggtgctgttcgacgcgctggcgggcatcgacctgccgccggagcgccgccgcctcggctatgtgtttcaggacggtcgcctcttcccgcacaagcgcgtgcgcgccaacctgctctacggccacgacctcgcgccgccgcaagagcgctggatgagccctgaggaagccgccgatttcctcggcatcgcgcatctgctcgaccgctggccgcgctcgctttccggcggcgaggcgcagcgcgtcgccatcggccgggcgctgctgtccgcaccgcgcttcctgctgatggacgagccgctctcctcgctcgacctgccccggcgcgacgagatcatgacggtgatcgagcggatcgcccgcgaactgaagctgcccatcctctatgtcagccacgaccggcaggagatagaccggctggccgacactgtcatcacgctgagttgatcagcgcagcctgaccaccatcagcgtcagcgcggcgtcgccattgcccgaaatctggaggatatgcggcccggcctgcatctcgtaatcgaccatcttgcggatgccggagcattccggcccatggccatgggcgatcgaaggcagcgccgcgcccttttcgatcacgtcgatccacggccccgaccccagcgcgacacgataggttccggcctcggcgatatcgacgcggaacagcccgcccttgctgaccgatccgcccagcttttcgggctgcaccgcaaagctcaatttcgtcatcggcagcagctggaatgcgcagggcgcgctgcgctgggcgccggacgaggacagcgacctgcgcctatccatctcctcccgcacgcggttcccgacgctggcggaccggttcagcagccggttcggcatggcgatcgccaatcccgacctgaaggccgagcgggcgacgcaggtcgagctgggcgggtcgcggcgctatgggcctttgcgggcggaaggcgcggtctggtattcgcgggtcaacgacgcgatcatggcgatcaccatcgcgccgtccaccaccatcaaccgcaatctgggcaatggcgattattacggcgcggaactcagcctgaccgcgacggtcagctccggcttgtcgctgggcggcaattacagctgggtgaagcgcgagctgacggatccgtccgtcgcggccttccgcccgaccggggtgccgacgcacaaggcgttcctctacgccgactggtcgccgctggcgggcctgcggatcatgcccaatgtcgatatcgcctccgcccgctgggtcgtcaccccggcgggcgcctattaccgcaccggcgattatgcgctggccaatctcagcatcgaatatgcgttcaccgccgccatcgatgtcagcgtcggcgggcgcaatctgttcgacgtgaaccatgcgacggcggacggctaccccgaacccggccgcagcctgttcctcagcctgcgggcgcgatattgagcgagacgccggggcggccgtgctgctgccccggcccttgccctatcaagcccgcgcggcggcgcgctccgcaagctggggcgtggtgctggcataatgctgggcgatcagcgcgcagacgatcagctggatctgatggaacagcatgatcggcagcaggatgaagcccagatcggcccgcgcgaacaggatgctcgccatcggcgcaccggtcgcgaggcttttcttcgaaccgcagaagaggaggacgatcgcgtcctcgcgcgccaaccccagcgcccgcccgccgagccaggtcgccagcagcaccagcgccaaaatcatgcagcagaccagcgtcaccagcagcagcgcaccggccgacacatgatgccacagcccggcgacgaccgccgcaccgaacgcgctgtagacgaccagcagcaccgcgccgcgatccaccgccgtcaccagcgcgcggcggcgctgcacgaaatcgccgatccacggccgcagcatatggcccagcaggaaaggcagcagcatctgcaagccgatttcctcgacattccgccaggatacgcccgtccccttgccgcccatggtcaacagcaccagcagcggcgtcaggatgatgcccgcgaggttggagaaggacgcgccgcacagcgcggcggcgacattgccgcgcgccatcgccgtcagcgcgaccgaggacatggcggtggagggcagcagcgtcagatagagcagcccggacgccagcagcggcggatcgagcggcagccggacggcggcgaggccgatcagcgggaacagcccgtaggtcgcggccacgatggcgaggtgcagccgccagttgctggcccccgcgacaatcgcggcgcgggacagcttcgccccgtggaagaagaacagcgcgacgatgcctgccgtcgacaccgcgccgaccaccggcacgaagccgccccgcgcgggcaggaccgacgccagcaccaccgtccccaccagcatcaggatgaaggggtcgagcagcatccgcaatctgttcatcgtccgccactctccgcaggcatgccgtccggccgcgccccgtcatccggatggcccgtcaggccgcaaccagttccttcagcggcaccgaggcatcggcaaggcgcgcgggatcgatgcgcgcgccgtcgacgaccagcgccttgccctgcacatagtccttgaccgcattgacgcaatcgagcgcgatcacgcggccctcgcgcagatagatgagcgagaaggagcgcgtcgccgggtcgccgcgcagcaccgtctggtcgaagcccgacgacagccccacggtctggaggcgcaggtcatactggttggaccagaaccacggcaccgcgtcataatcggcatccgtgcccatgatcgaacgggcgacgaccttcgcctggtcattggcgttctgcaccgattccaggcggatttccgcgcccgccgcatagcggttggcatgcagcgcgcaatcgccgatcgcgtagacatcgggcaggctggtgcggcacagcgcatccacctcgacgccgttggcacccttcgcgcccgcttccagcagcggcgcgaccgaggggatgatgccgatgccgacgatcaccatctgcgccgggaggaccgacccgtcggccatgcgcacgccgatcaccttgccgccatcgccttccagcgcgttgacggcggcgcccagccggacatcgacgccatgggcgcgatgctccgcctcatagaagcgggacagcggctcgcccgcgacgcgcgccagcacccggtccagcgcttcgagcaaagtcacctgcttgccgaacttgcgcagcaccgccgccgcttccagcccgatatagccgccgccgatcaccacgacctgctcgacgccgtcaagctctcgcatcatctggtcgacatgggcgcgagtacgcacggaatgaacgccggcgaggtcatggccgtcgcaggtgaggcggcgcggatcgccgcccgcggcccagatcagcttgccgtaaccgatggacgtgccgtccgcgagggtgacccggtgcgcggccggatcgacggcggtcacgcgctgccccagcagcatgcttatctcgcgctcttcccagaatttctccggacggatcaatatgcggtcgaacgtcttgtcgcccgacagatattccttggacagcggcggccgctcatagggcaattccggctcgtcgccgacaatcgcgatgctgccttcgaacttttcctgccgcagcgcgatggcggcctgtgcgcccccatgcccgccgccgacgatcaaaacatcataatccgtcacgatcaaacctctcccctttattattcgacgccgatcaatcctccggcgcgatggtcaggcgcaggccctccacatcctccgtcagcacgatctggcaggacaggcgcgacgtggcctgacgatgctccgaactgtcgagcagatcgttttcgtcctcgctcatcgccggaaggcgatcggcaaaggcggggtcgacatagacatggcaggtcgcgcaggaacagcagccgccgcacagcgccagcaattcatcgataccggcatcgcgaatcgcttccattgcgttcaggccggacccggcctcgatcgtcttttcttccccttcgcgcgtcgtcaccaccaactgaggcattcccgtaatcctttcctgtttccgcccctttttacggcggaagcccaatttcgcgagccttccataatgcgatcggaccgccgcgtccattgataccctttcgatgaaatgcaacaatgatttgcattaatgaaataacgaaaaccggtcattgccggggcggaccggcttcgggcgccagccccagcgcggcccgcgcgcggacggccagcgcggcgccgtccccgtcggcgtccagcacggtccagtcatccggccagtcctccggccggtcgggatggcgcagcgtctgcgcgcgcacgaccgccgcatcggcatcggatgcgtcgccgcgccgccgttcgacgcgggccacccgcccttcttccggcagcaccagccagaggccgtcgaaccgcaccccccgcctgtccgccaccgcgcggatatcctcccgctccatggggctggcgaacaccgcgtcggcaatgacgccgccgcccgcatccagcgccgtcccggccagccgcgccagctccccatagaccagcgcactcgagtcgcgcgtataggcttccggcggcagcggggcttcgggcgccacgcccgccagacgcttgcgcagcacgtcgctgcgcaggatgcgcgcgcccggcggcgtgccgatccggtcgcccagcaggcgcgccaacgtcgacttgccggtgcccgacagcccgccaatggcgagaaggcgcggcggcgcgcggtcggcccggtccagcaggccgagcgcgaaatcgagataggcccgcgcgctggccgccgcctcgtcccgccccggcccttcgcctgcctgttcggcccgcgccgccagcacatgggcgcggatcgacgcgcgcaccgccatgaacagcggcagcagcgccatcgccccctcgtcattcggcgacaggtcgagatagcggttgagcagccggttcgccgcctgcgcgaggcccctttgccacagatccatgagcaggaacgccagattgtagagcacatcgatggtggcgaggtcggcatcgaattccagacagtcgaacgcgaccggcctgccgtccaccagcgcgatattgccgagatggagatcgccatggacatggcggatgcgcccttcccgcccgcgcgcatcgagcaggggcgccagcgcatcgatcctttcgcgcagccgcccggtcaggcgccgcgcctgctcctccggcaggatggcgggataggccgccatcgcatcggcattgccttccaccacccgccgcagccgcgccgcgccatcggacagcggaaccggatccgccagcgcatgcagcgcggcgacatggtcggcaagctcgcggatcagcgggtcgtcgtccagccgttcctcatcgaaccgtccttgcgcggcctgctcctccagcagcgcgccgtcggggaagcgccgcatttcgagtagccagtccaccacctcgcccgcgccgtcgagcgccagccgcccatcggccgcgcgcgtcacccggtgcagaccgagatagagctgcggcgcggtgcggcggttgagtcgcagctccgcgtccagcgcgctatgccgcttttccgccgtcgagaaatccatatagccgaaccggaccggcttcttgagcttccacgcccggtcccccgccagcaggatcaccgcgccatgggtgtcgatgcgccgcagctcttctcgaccaaacggcccgccgccctgcaaccagcgcagcacattctcgctctcgtccctgcccatgcgccgatgctggcgcaggtatgggccgagggcaagccgcctcaggtccattttgcgcgcgcggatcgtcatcggcggatcaggagaggggttgacacagatcaagggacatggccctctgcgcatctatcatgtcggtatgaaagcggagcaaccttcgggggttatagtcgatctccgcgatcctgccgaacggcacaccgactgacgtttctaccgcgaacggggagtgtgatgcgatgaaaaatatcctgctgctggtccatgacgatgccggtcaggaggcgcgcctccagaccgcgctggacatcactcgggcgctggaaggccatttgagctgcatcgacgtcgcggtggtgccgctggtggcggccgacatcaacggcggcgccgaacaggcgatgctgctggaggaggagcgcgaccgggaaagggccaaccgcgcgactctggaggcccgcctcaaccgggaagcggtgtcgtgggactggaccgacgtgatcggcggcatggcgcaggcgatggtggacgcatcctcccttgccgacatcatcatcctcaaccgccagcttgaggaaagctcgttcctcgacatgcgcgagatcaccagccgggtggtgatgaaatcgcgcgcgccggtcgccgccgtgccggaggaccagacgcatttcggcacggaccgcgcccttgtcgcctgggacggcagcgaatcctgcgcggcgacgctgcgcgcgtgcgtgcccctgctcaagctggcgagcgacgtgcgcatcttcaccgccaccgagaaatcgaaccagctgagcccggcggcggcggcgcaatatctctcgcgccacggcatccgcgcggagatcgatctggtcgagcgcggatcgcgcaacgccgacgacctgatcgccgaggcggcggcttcggcgcaggccgactatgtgctgatgggcgcctatggccggggccgcctgcgcgaaaccttcggcggcgtcaccaagcgcctgctgagttcgagcaagctgccgctgatcctcggccattgaggccgcaggccgggcgccccgcccagccccgtttcgcgatcacaggagagcggatcggggcgacgggcaatattacgtatggatgcggaatgccggaacaggataggctggaccggcatatgtcatgctgatttcaccggactggagattcgatcatggctcaggacaataagggcaccatcccctcggacaagggtgcagccccgtggaccaaattctttcccttcccggccgggcaaagcctgtcggccgtccccgatttccagaagctgctcatggtcggcccgcatatgcaggccgcgatgctgaaagcggcgatcgaccagcagaaggcgctgttcggtttccttcagcagcgatgcgaccaggatatgaaattcgcgcaaaagatcggttcggcggcgagcatcggggaagtggtgtcggccagcctcagcttctgccaggaagcggcggtggattatgcggcgcaggcgagccgcgccgccgagataagcgcgcaggggacgatagaggtcgcccatgatctggagcaggaacgggccgaggtccttgccccggtggaacgcgcgcgggcggcggcctgatccgcagcggcggggcatgctcgcaccgctcaagacttggcgattatccattacgaataggttcgggtggaagtccgttttcggtctattcttgccttccccatcgcgtcatgccagcgaaggctggcatctccggaggcggcgcgcgacatggcctgagaccccagcctacgctggggtgacggatgtaggaaggtggcagctaaccaccccaacccggccgtcaaggcccctgttcgcaagaatataatcgcctaggacttgtcggcgaagagcagccgcccctcgcccagccggtcgagcagcttgtcgatctcccgctcgtccaccgcgaagcagccctcactgcggcccagcttgccgcgctcgtgcgccatggccgggctgacataccaggcgccatggaccacgatcgcgcgggcctcggcattgttgttgccagggtccagcccgaccagacgccgggagcggccatgcttgcccacataaagcgggccggtcagataggccccggcggaggacgcaagcgatcccggttcgttcgacagcctttccacccagccgctatgctgcgggtccgacccgcgcccatgcgcgaccagcatgctttccacccgcccgccttccagatcgacaatgtcgaggcgcggcaggcgtgagggcagcgagaaatccacgatagcgatgcggtcgcgccttttcaccaccccgccatgatactccagcgccgccttggcgcgcgccagcaatctttcctcccgcgttgccgggagcatcgccgcccgcgcgccggcaacgggcgccagaccggcagccgccgcgcagatcagcagcgatcgtctcgaaatcaatttagccatggacgcgatatagaacgaatcgccctgaatttcatcccccctgcgacgaaagcggttcgacccgcaaacggagcatatcgcatatttgccgagccatacgccgggcggtccgctataaggcaatcgatccgcagaacccgatcgggccgcacccagttcctaaccacatcatgtcaggagagatgccatgggccacgccctcatcatggaagacaatatcattgtcggccacgccattgaacggcaactgacggaggcggggttccagtccttcgatcatgcctggacggaaagccaggcggtggaatatgcgcggcggcaggcccctgccctgatcgtcatcggcgaccgggtggagcagggatcggccatcgccgcggcccgcaccatcggccgttccgcgcccgtccccatcctcttcgccaccaccggcatctcccgcccgctggagcggctgcccgacgacatggcgatccacggcccctgccgactcgacgagatcggcggcctgctcggcaggcgcctgtcgaacctcccgaatggtgaagccgcgatgagccggtaagcaaaaaggcagcgccggagcgctgcccttatctggtgcgtactgacacttgttaactgccagaccgcgatctctgaatgaggagaagatagccgaagcatcaggcccgtcaagacggaaatagtccggccgccccatgacccggtgaagaatagcgaattgatttcattttggcgacgattaggctggtccccattatgaagccatggctgatttgccgcacctgaaatgaggtgcggcgacatcggccgcgatttccggggggaaggacagaatgaagcgggcattgcgttggcgtctgggcgtcgatctgggcgcgaactcgctgggttgggcggcgatcctgttgaacgaggccggcgaaccggcgggttttctggcggccggatcacgcatcttcagcgacgggcgcgatcccaaatccggggcctcgcttgccgtcgaccggcgcgacgcccgctcgatgagccgccgccgcgaccgcttcaagcagcggcagcgcgcgctgatcaaatatctggtgcgggacgggcttttccccgccgatgaagccgaacgcaaggcgctcgccgcgctcgaccccatcgaactgcgcgcgcgagcgctcgacgaggcgctgccgctcgcccatctcggccgggcgctgttccatctcaaccagcggcgcggcttcaagtccaaccgcaaggccgatcgcaaggacgatgccgagagcggcaagatcgccatcggcatcgagcgcctgcgcgacgcgatgcaggaagcgggcgcgcgcacctatggcgaatggctccacctgcgccgcaagagcgccgtcaatgccaatgcgattccctccgtccgcacccggatgcggccggaaagcggcgagggcgccaagggcgacggctatgacttctatcccgcccgcgcgctgctggaggaggaattcgacgccatctgggaggcgcagtcgccccatcatcccgatgtgctgacggcggaggtgcatgaccggctgttcgagatcatctttcatcagcgccccctcaaggccccgaaaatcggcaaatgcatgctggtcgacggcgaggaccggctgcccaagatgcatccgctgttccagcgccgccgcctgctggaggaagtcaacgcgctgatgatcgtgcgccccggcgaaaaggcccggcgcctgacgccggaggagcgggacctgcttgtgctcaagctgaaggacagggcgaaggtcggcttcgacagcttgcgcaaggtgctgaaagccgattccgactcccgcttcaacaaggaaagcgagaaccgcacccatcttgcaggcgacgaggtcgcggcgatcatgggggcgaagacccgcttcggcacccgctgggcgcatctgccggccgaggagcaatgggacgtcatccagcgcctgaacgccgtggaaagcgacgcggatcatcgcgcctttctcgattggctggccgcgacctacgggctggaggaggagcaggcgcgcgccgtcgccaatgcgcacctgccgcagggctatggccggttcggcctgaccgcgaccacccggctgatcgaggcgctgaccagcggcaggacaccggaagggcgcaccgaaaaagcggcgccgatcgagccgggtcgcgtcatcgtctatagcgaggcggtcgagcatgcggggctgggccatcacagcgaccggcgtaccggagaggttttcgaggacgagcaaggccgccctcaactgccctattatggcgtggcgctggagcggcacatcatgccgggcaccggaaatgcatccgatccggaggaaatgcgcatcggccgcctgaccaaccccaccgtccatatcgggctcaaccagctgcgccgcgtcgtcaaccgcctgatccgcgcctatggcccgcccgccgagatcgcgatcgagctggcgcgcgaactgaagctgaacgacgagcagaaaaaggacctgaaccggaagaatgccgagaaccgcgccgccgccgaacgccgcggaaaaaagctggaggaactgggccagcccaatacgggcgccaatcgtgcgctgctgaaattgtgggaggaactggacgaaaacgccatcggcaggcaatgcgtctatagcggacaggtcatttcggccgcgatgctgttcgacggccgggcggaggtcgaccatatcctgcccttctccgccacgctggatgacagcaacgccaacaagatcatctgcgtgcgagaggccaatcgcgacaagggcaatcgctcgccctgcgatgcatggggccatctcgaccgctggccggaagtcgccgcccgcgccgcgcgcctgccgaagaacaaaaggtggcggttcgagccggatgcgatggaacgcttccgcgaagaaggcggcttcctcgcccgccatctggtcgacacccaatatctcgggcggctggcgcatgaatatctggccgccctatacccggaccggggcgaaggcagccggccgatctgggtgtcgcccggccgcctcaccgagatggcgcggcgcaagctggggctcaatgacctgctgcccgaccataatttcggcggcggcgcggaccagcccaagaaccggctggaccaccgccatcatgcaatcgacgcggccgtcgtcgcgatcatcgaccgttcgatgctgcaacgcatcgccagggcttccggcatggaaggcgcggacgggcgggagaagatcgaaatccccccgccttgggcaggcttccgcgacgatctgcgcaaggtcgtcaacgccatcgtggtcagccatcgcgccgaccatggcacggtttccaaggcgggtctggacaagggcaaggaccagacggcgggacggctgcacaacgacaccgcctatggcctgaccggcgaggtggacgacaagggcaacagcatcgtcgtgcgccgcacgccgctttccggcctgaagaagctggagcatatcgagcagatccgcgataccgacctgaaggccgcgctctatcgccaggtcgagggactggaaggcaaggcgttcgaaaaggcgatcgcagaatttccgaagctgcactggcacccctatggcggcgtccgccgcgtgcgtcgggtcgaaccgctgagcgtcattcccatccgcgaccgcgaagggcgcgcctacaaaggatataagggcgattcaaactatcgctacgatgtgtgggagctgcccgacggcaaatgggtgagcgaggtcgtttccatgtatgacgcgcatcagccgggctggacctcgaaggtccgcgccagctgcccgaccgcgcgcaaggtgttgagcctgcaccagaacgaccttgcggcagcgaccccaccggatggagaacggctattgctgcgtgtcgtcaaattcggtcaggaggggcggctgtatctcgccccgccggaggaaggcggctctctgaagggccgcgatgccgacaagaatgatccgttccgctacatatcgctgtttcccgccaagcaaaaagcatggagacttcgcaagatccgcatcgacgaactgggccgcgtgctcgaccccggctttccggcgcgcaccacccggcgcaagacgcgcaaggcggcctgagcaggggacggcgacggatggagcggatcgtcgatatcgccaccgatggccgccatctttccgcccatcgcggtttcctcatcgtttcggaggaccggtcggaggtcggccgcatcccgctcgacgatgtggcggcggtgatcgtccatgcccatggcgtcacctggtcgaccaacctgatcgcggcgctggccagccgaggcgcggtcatgctgctgtgcggcagcaaccatgccccggtcgccgtgtgtctgccgcttgacggccatcatgcgcagaacgcccggatgcgcgcgcaatgggaggccggaaagccgctttccaagcagctctggcgccgcgtcgtggtggcgaagattcgctggcaagccgccgtgctggaagccaatggcgtttccgcctccgccttcgacctgctcgcccgccgcgtcgggtccggcgacccggacaatgtcgaggcgcaggccgcccgccgttactggccgctgctgatgggcagcggcttccggcgggatcgcgacgccgacggcgtgaacgcgctgctcaattatggttataccgtgatgcggtcgctgtgcgcgcgggcggtggtcgcctcaggcctgcatccctcgatcgggatccaccatgcgaaccgggccaatgcctttgcgctggccgatgatctgatcgagcccttccggccgctggtcgatgcgctgaccgtgcggctgacggcgcgcggcatcgaccgggtgacgagcgaagccaagcgcgcctttgccgggctgatcgccctcgacctgcccggccccgatggcaccacgaccctatccggcgcggccaaccgggccgcccagaccctcgcccgcgcgttcgaaacagggcgagcggccgacatcaccctgcctacaccgccttcggcgctggaactggccgggctggacagcctgatatcatgagtgtcacccaattgagcggatacaggctcatgtggattttcgtcatgttcgacctgcccgtcaccaccagggaacaatcgcgcgcagcgaccaaattccgcgaattcctgctggatgagggttttgaaaaaagccagttttcggtctatgctcgcttctgcaacggcaaggagcagttcgagacctatatgcggcgcatagaggccaatctgcccgatcggggtgacattcacatcctcagtttcacggaccggcaatatgaaaacatcatccgcttctcaggccaacgccgccgccggcaaagaaaaaatcccgaccagctcgccctgttctagcgattcgcactatttccagcgcgatggatggagcgttttttcattgtttctcaatgagatgacactccatccatcatagccattcagagatcgcggtccagcggcaactggcgaggttcctgctggaccgtggcgagaatcatagccattcagagatcgcggtccagcggcaacccgccgcagattgacccacgccctcttcatatcatagccattcagagatcgcggtccagcggcaacgacccctcaatatagacataatccccggagatcatagccattcagagatcgcggtccagcggcaacagctccagccagccaccgctgtcgacgccatcatagccattcagagatcgcggtccagcggcaaccttgcgcgtgacggggccgacgcttcccctatcatagccattcagagatcgcggtccagcggcaacgcagagcatattcttgcgttgcccgatgcaatcatagccattcagagatcgcggtccagcggcaaccacgccaagcccgtcgccgataggcgagaaatcatagccattcagagatcgcggtccagcggcaacggcggtcagcccgtcgccgataggcgagaaatcatagccattcagagatcgcggtccagcggcaacaagaatactggtcaggcgcatgaagcgggaatcatagccattcagagatcgcggtccagcggcaacgaaatatttcgcgctcgacaccggcccgctatcatagccattcagagatcgcggtccagcggcaaccgtggccgaggtcgtagcagtggcaagcggatcatagccattcagagatcgcggtccagcggcaacaagcgcgcgaagctgctcaaacgcttccatatcatagccattcagagatcgcggtccagcggcaacagccactgcgttcaagaaaatcgtggatgaatcatagccattcagagatcgcggtccagcggcaacacctcaggcagggcaggatattgacactgcatcatagccattcagagatcgcggtccagcggcaacttgcagcgcgagcttgccgctatcgcggaatcatagccattcagagatcgcggtccagcggcaacttccctccccttcgggttgctagccgggtcatcatagccattcagagatcgcggtccagcggcaaccttgagcgccgctgatgcctcgaactcctgatcatagccattcagagatcgcggtccagcggcaacgacgcagcgcctgcgccgagggtccgcgcgatcatagccattcagagatcgcggtccagcggcaaccgccgccatcaccttatccgaaccacttgatcatagccattcagagatcgcggtccagcggcaaccagcttgtgcccggcgaaatgctcgacgtgatcatagccattcagagatcgcggtccagcggcaactgacggcggcgagggcctgattgtcgctaaatcatagccattcagagatcgcggtccagcggcaacgaaaaaggtggtagccaatccgttgactatatcatagccattcagagatcgcggtccagcggcaactacagtaaaccgtcagggatggcttggcctatcatagccattcagagatcgcggtccagcggcaacaccgcctcgcgccgtgcgctgctcgccgggatcatagccattcagagatcgcggtccagcggcaacggagggcgtcggggtccgcgcaggtcggcatcatagccattcagagatcgcggtccagcggcaacgcgctgggcatattcgtcaatgccgagacgatcatagccattcagagatcgcggtccagcggcaacggtgcagctcgcggatcgcccgccgccgccatcatagccattcagagatcgcggtccagcggcaacgcagcgcgtcgacggtcgcgtcggtgtcgaatcatagccattcagagatcgcggtccagcggcaactgatgggtcagcggcacgatgaacggcgagatcatagccattcagagatcgcggtccagcggcaactccgaggcgcgacgccagcggcggcgcaacatcatagccattcagagatcgcggtccagcggcaacggaaaccccgctcgaacgcgcgatagatcgatcatagccattcagagatcgcggtccagcggcaactgccttgaccagcagccagttggttgcaccatcatagccattcagagatcgcggtccagcggcaacatgccggaaagcggcatccccgctcgcctgatcatagccattcagagatcgcggtccagcggcaacacgatgaagcgcaacttcgccaatacacgcatcatagccattcagagatcgcggtccagcggcaactatgggggcggtggcagaaaatggcattgcatcatagccattcagagatcgcggtccagcggcaactcgaacaccgtcgagccgtcgagcggcaccatcatagccattcagagatcgcggtccagcggcaactccgttccgcccagcgaggccgatccggccatcatagccattcagagatcgcggtccagcggcaaccacggccagcccgtcgccgataggcgaataatcatagccattcagagatcgcggtccagcggcaacgacatgggcgctacaggaggcgttcggcaaatcatagctattcagagatcgcggtccagcggcaacgatggcgggcaacgactacgccaagcgcgaatcatagctattcagagatcgcggtccagcggcaaccggagaggcgccggttgcgctccctcaccatcatagctattcagagatcgcggtccagcggcaacgactacgccagcggctcgacctcttcgggaatcatagctattcagagatcgcggtccagcggcaacctctcgacgtggcgaccatcgagaatatgaatcatagctattcaaagatcacagtccaaccgcaacgccatcatcgagagctgcccgacgctttcttataaccgcactgaaatccatatccacccacaatgagaaaatttcaggcgccggctcgcccgcaaatcacagatctttcacgatccagcccagcggcataagcaacgccgccctgcccgacctctccaccatccgcctctcccctgccctcaccggcactgcccgccgcgaatgcaggggcgcagcatcggcgggggcgtgtggcggatgaagaaggcgggcggtttgggccagcggccgctgtccagccgcgcgcccatctggttgatcgcgctgacgatcacctccggaccgaaccggcaatgcccggccgaacgcacccacaggcccttcaccgccctgcccttcgccgcgtccacatagccgcgctgcaacgaaggggaggtcatcccgtcgccgatcgcctgcaccgccagcaccggcaccaacggccgcgcggtgggggtgtaatgatccatcatgtaacggacgccggccggttccgccgtcacccgctccgccccggcgaggcggtcgaggtccttttccagatccagcccggccgccctgtacagccgctcgaccatcgcgcgacggccggacagggagagttgcctgcgataatcgatgccgtcgttccacgaaaagggcccgcccgcgcggcgttcctgatcgccgcgcggcaggaagacgcccgcgacgaaggttttcgccatttcggcgacctgcgcctccgcatcctccttcgccggttccgggccattttgcgtggtccagcccggcaagcccgccagcaccgccgccagagccacgcgcgcgcggccctccggcgtcgccatcgccgcgtccagcgccttttgcgcgcgggcgccgttggctcggtcgtccgtcacgcgggtcagctcgatccccgcatcgggcgcgaccagggtgcggaaggcgaaggcaccgtccagcgccatgttcatcatgccgaccgccccgcccatggacgagcagaccgacaccgcgccgtccagcacgctgtccggctgctcggccagcgcggtcgtcaccaggccgcccatcgaaaagccccagccgatcacccgcctgggcttgccgaagcgctggacaaaggcggcgaccgcggcgcgctgggcggggaccgcctcggccagcgcccagccgcccgatccataatccgacccgaccagcgcataacccgcgtcgagcagcgcctgccgatgcgcgggggaagccgcctccgcgccgttggcggcgggggaatagccccggctccacagcagcagcgtgccgttccagcgggcaggcatctgcgccgcccaatggccgccgccgggcaggtcgccattggcgctttcctgcgccagcccctgccccgccaaaggcagcgtgcccgccagcagcaacggcgccgccagcagcgcgatccatttacccatggctttcccttcccgatctccatcgcctgcccgttcgataggattttgtgtaagcgcttgcaacatcttattggcggctgctacagcatggcgaaacagcaaggagacggattatgcgcgctggactgcacaggctggtggtttcactggcatcggcatcgacctttctcggcaccgccgccctcgcacaggcaccaactcctcccaccgataccgccgcagcggagcagcagcaggcggcccgcgatcgctataatgcgatgcccgacacgcccggcaccggcccctggcccgcgattaagcggcaggacgcccatttccccgaccatgtgatctatcatccggccaatctcgatgcgctggggcagaagaagctgggcgtgctgctgtggggcaatggcggatgccgcgccgacggggcgagcgcgcggctccatctcgcggaaatcgcgtcccacggctatctcgtggtcgcgccgggggccattctctccggccccggcgcggcgcccgcaccggcggaagcgccgcgtccggccaatgccccgccggtcgatccggtcaagaccaccgccgcgcaggtgctcgcgggcctcgacatggcgctggccgagaacgcgcggccggacagccccttccatggccgcatcgatccgaagctcatcgcggtttccggcaccagctgcggcgggcttcaggcgttgcaggcggcgggcgatccgcgcatccgggcggtgatcgtccataatagcggcgtgttcgccgacggcagcaacccgatcaagggcatgaccgtcgacaagtcgctgctgctgaagctgcacacgccggtgctctatattctcggcgggccgagcgacgtggcctttcccaacggcagcgacgacttcgacaagatcgagcatgtgccggtcgcgctcgccagcatcgatgtcggccatggcggcaccttccgccagcccaatggcggcaaggcggcgagcgtcgcgacggactggctggaatggcagctgcgcggcgaccgcaaggccgccgcccgcttcaccggcacgccctgcgggctgtgcgaggaacccggctggacggtgaagcgcaagaagatcgactgaattccccggcgcaggctcgattgatgacgcatccgacgatgccttcgtccctgccccgcgcgtggccggttcatgcctcccggcatggccacgcgcgcggggttcatgtctattcctccggcgatcctgtgaatagggacgccgaaaccgactggtgcggttgagcctctcttaccgtcaccccagcgcaggggacgtaggccatgtggcgtgccgtctccacaaatgccagcctgcgccgacatgacgcgaggggggtggcgaattggggtggaagcggactcaggcattgcaccctatgagttcacgcgaaggcgcggagacgcggagtcgagccgcaggctccttggacccacgctgcctcacttcacgccgccaacatgcgaagaatatgctttgcgacactctactccgcgcctccgcgcctccgcgtctccgcgtgcctgattctgcttcgctggccgcgtccgcttaggccaataaaaaacccgcaccggcgtgccgatgcgggtccatggtctgacgcgcgcgccgccgcccggcagcgcgcgccatgcgcttaccagttggcgcggatgccgatggtggcgaagcggcccatgatgctggcgacctgcgggtcgaaggccagcgttccgttcagcaccaccggcgggtcgcgatcgaacaggttctggatatcggccgagaaggtcacgttcttcaggccgaaaccggcatcgtcggtgatcttgtagcgcagcgacaggtccaccgtggtgtaggcctcgacatgttgcaccggcgtcaccgaattgttgaggtaaccggcggcatagttgacgaacgcattggcgctgaacccgccattgtcccagccgacattgccgcgcgcgcggaattccagcgggttgttgatggtgtcgagcacgtcgaccggcgccgcattgggcgaggtcgtccgcttgaagtcgaaattataggtgccgctgacgcccagattgaaccggccgaggccggtgtcgaacagatagctgacgacgccttcgatcccctgcgtttcgagacggccgatattgaccttccgcccgtcgacgaaggcgaggatgttcgccggattttcgggcacaccggtgtagagcgggttgctgaggaagccctgcaccagcgccgccgagggattgcgggtgaccagcgcgcccagctggctctcgatcgccggggtcagcgccaggttggtgttgcccggcgtttcgatgcggttggtgtattcgacgttgaaataggtcatcgacaggctgaggccggaggcgaagaccggctgatagtcgaagcccagcgaccaggtggtcgccttttccgggcctagcgtgtcggatccgccgcgcacccacagtgtgcgggtgacgccggtcgacgaactcgggtcggtgaagtcgttgaccgagatggtcagcgtgttgggatcgatatccgacagggtcggcgcgcggaacgacttgccgaaggtgccgcgcaggctgaagccttcgaacgggctgtagcgggcggcgaacttcggattggtggtggagccgaaatcgctgtagtcgtcatggcgcagcgctgccgacagcgacagctcctccagccccggccgggcattgtcccgcccgaagatcgggatgaacagttcggcatagccggacttcaccgtgcgggaggtggtggacggcgtatagaccaccgtgctgttgttcgcgcccgccgtggtgttgcggaaataggacagcaggctgtggtcctgatattccgcgcccaccgccagcttcacgccgccgccgggcaggtcgaacagcgtgccgtccaccttcgcgccgaaatcagcgagcttgtagcgcgcgccgatggcagaccatgcgcggatattggccagcgtcgtggcattggtatagctgccgtcgccaaagggattgaacgcggtcagcggattggtgtcgcgcagcgcggcgagcagctgggcggtgttgatgtcctgctgagagcgttcctcgctgttgcggccatagctgccataggcgctgaaattccagccgccgcccagctccgcatcgatgccgcccgcgatctgccacgagcgctgccacgcatcctgctggcgcgggccgtaatcgtcgtagaaattatagttgacggtcacgctgctcgcgccggtgccgctgggatcgacgaagaagggattggcgttcgtcaccgtcaggttggaggtcgacgcgcccacggtgcgcagcaattcgcgatgcgcgaaatagccctgcccccagatcgaaatgcccggcgtcagttcctgctcgatcgagccgatcaccgaatcccggttttgccccggaatggcgtcgacgccttcataggcgctcatccggttgaccggcacgccgacgaaatcggcggcggtgaggcccgtgccgttctgcccggcgggaatgccgtagcgcctgcccgcgacctggatattgccggggttggagttgaacaggcgctggtcggtgccgccataggcgcgcagatcgtcggtgtagagcgagcgcgccgacgccttcagcggcgagcgttcattatgctcgaacgccaccatcgcgctgccgctgtcccatttgtggccgaccacgccgccggcgatgaactggcgcacatcgccgttgaacccctgcttggcgtaaagctccacgccggagaaattcttgcgcagcaggatgttgaccacgccgcccacggcatccgacccgtaaatggccgagccgccgtccgccatcacctccatgcggccgatcgcggcggtggggatgatcgacgggtcgaagaactggccctgcgtgcccgccgggggcaggcggcggccgttgagcagggtcagcgtcgcttccgtgccgaggccacgcaggttgatgccgttgccgccggtgatgttcgcgttgctgttgttggcggagccgaaatattgatcgctcgcgcccagattggcgaccgaaggcacctgccgcagcaattcggtggtggtgttggcgggctgcgcctgaatttcgtcctgccccagcgcggtgacgggcgcgcccaccggcgcgatgccgcggatgctggtgccggtgacgacgatgtcggtcacgatatcggtttccgccgccgcatcggcggcttcctgcgcacgggcgccgcctgcgatggcgagggccacgaccgacgaacagccgccaaggacccgcat

SEQ ID NO: 3066 - DNA, 23324 bp, synthetic construct
  source 1..23324: mol_type = other DNA
  misc_feature 1..23324: note = Synthetic
gagcggcccgccggcagcccggagccttgcggcgaagcgcgccgggccgacggcgtcgagcagcgcgactgctgggatgttcagcgacagcgcgagcgcctcggcggcgctgaccgtgccgtgaaagccttcgtcgaaattgcgcggggcgtagtcgccgaagcgcgacggtcggtcctcaatgagggttgcgggcgcggcgatcccgttctcgaaggcgagcgcgtagatgaacggtttcagcgccgagcccggcgagcggacggcgtgggtctggtcgagcgcgccggcgcgcgtggggtcgaagtaatccgccgagccgatcgaggcctcgagcgcgccggtcctgtggtccgccaccacgatcgcgaccgagaggcccggcccgagcgcccgcgcccgatcgcgcgccagctcctcgagcgagcgctgcagatcgcgccggatcgtcagccgggcgacgccgccaggccctgcccggcgcgccgcggcttccgccgcatgagcggcgaggttcggaaactcccgccggccctgcggcacgggctcgtcacgggcgtaggccgcttccgccgggctgatcgcgcccgcggccgcgagccgcgcaagcacccggtcacgcgccgccttggccgccgccgggtcgcggtcgggccgtcgcgcctcgggcgactgcgggatcgcgaccagcagcgcggcctcggcgatcgacagccttgccggctccttgccgaagaaggcgaggctcgcggcgcgcacgccttcgagattgccaccgtagggagccagccggaaatagaggtcgagcacgccctccttgccgatcttgcgttcgagcgcgagcgcggccccggcctcgcgccacttgcggaccagcgtgcgggagcggtcggggttgagcaggcgcgcgacctgcatggtgagggtcgagccgcccgacaccaccccgccgtgacggacggcctgcagcgccgcccggacggccgccagcgggtcgacgcccggatgagcgaagaagcgcttgtcctcataggccgtgaggaacttgacgaagcgcggatcgacctcgtcgcgcccgaccggcagccgccacgcgccatcggaagcggcgaaagggcgcagcagccggccgtcgcggtcgttgacgagagtggagagcagggcggcccggccgggccccggcgcggggtacgaggcgagcgagagcgcggccgcgccgccggcgaaggccgccgccagaagcgcgcaagccgcgagagcggtcagcgcgcgaggcatggcggcccagccgaggcatcgtcatcgcccgaggcgtcccgcccgccccctccaccgcttcgcggtccccctcccccgctaacgcagggagggcgatcgcatatgacacgacgccggccgccccttctcccgttcacgggagaaggtaaagatgagggggctgtgcgctgtgggctcaggacgacgcccgtccgcgcggacgggctccttccggaaagttcggcgcgaaaggccctcacccttaccctctcccgcaggcgggagagggggacggccgcgcgcggcgccctgagcagcgctctcgatcgcttgcgtccaaatgcaatcgccccgctaacgcaagggaggatccgctcacgagccgccgcgcctccttgatcctcctccgcaaagcggaggagggggggcatcgcgatagctatgggggaagaggcccggcgcgacgtctccatcacttcgccgccgtcacctcgacggaccccgctcccgtccgcgcgaagcggtcggcgcggtacatgtcctccaccgtggcggccggctggacgtagcggcccggcgcgaccgcgcgcaccacataggccgcggagtagctcgatgaagcttctgtcccgcggtcgaaggccgcgacgaaacggtcgtcgcggaactcggaatggaccgcgtcgggctcgtcgcccagcatcgagagcgccgggagcttggccgagctcacgagttccggattgtcgatctcaaagcccgccggcagccggtcgacgaccagcacccggcccggccgcggctcaggctcggtgacggtcagcaccacgacgagccgcgtgttctgcgcgacggaagcggcgtcgacctcgacgcccgcggtcgtgtagtagcggcgctcgagatggaaccccgcctccttgggcggctcgggggtgaccggcgctccacgcaccgtcaccaccgcctcgagcggcgtctgtccggcgttcgcgaccgtcaccggcgcccccgcgagacgctcgggcgaaaaggtctcgtcgagcgcgcccttgcgcgccgcgccgtcgacggtgagcgcgaggtcggcgctctgcgccttcagcgcgcgcgccgcgatcagcagccaggcgttttcctgcgtggtcaggtaaggccggtcgcgccgcgcctggccgatgcgccgcagcgccgccggcgtcacggccgagtcgacccggttctcggccgcgagcgccacgatcgcggcctgatcgcgcagcacggagccgaaatcggttcggtttgcgtcgtcgggcggggcgatctcggccgccgcgaacgccttcgaggcgcgcgtgaaatcgcccgtctgggcgagcgccgcgccgatctcggcgcgcgccagcgggcttgcgaactcctcgatcttgacgtcggcgaggtagcgcaggtcgccgagcagcgggcggccgttcttcgccagcacgtaatgggcgtaggcgaggtcgctctcggtctggtcctgccggaggccgatggcgttcctcagattgtcgagcgccgcggaaaaggcctgatcgggcacggcgaagcccgccccgcgcgcgcggccgaagacgtcggccacgtaagaatcgagccagagatcgccgccttccgccgaccacaggccgaaggagccgttcgagtcctgccgcgacaggatgcgggcgatcatgtcctgcgccctcgccttcacgtcgtcgcgggacgcgccggcgacgttcgacgacatgccgagttcgtcgccgtagacgagcgccagcaggcggctcgaaagctgttcagagcaggcgtaggggtagccgtcgagcgcgagcttgaagctcgcggcgtcgagcgcgccaggctttccgacagaaagcgcgaccgagcccgtgccggcgacgatgtcggccagcatgtccgtcgacaccgtgatccccgcgcccttggcgagcgcgatgacgttgcggcgtacgaccggcgaggtctggggcttcacgtcgagcgcgagcgcctgcgcgaagctcctgccgtccggccccttgaccaagacgtcgacgcgggcagcgccgacgcccttggcagcgagcggaacctcgaccgcggcgcgcgccttctgggcgagcttcaccgtcctgctcgcgccctcggcggcaagcggcccggtgaccgcgaccgagacctgatagtcgcccgccgtccccgagacgttgtcgaggtcgagccgcagccgcgagcggtcgccgtcggcgaggaagcgcggcagcgccgcggtcaccaccaccggatcggccaccgtcacgtccttcgaggcgtggccgagcttgcccgccgaccacgcgaccgccatcagcttgacggtcccgttgaaggccgggatttcgaacggcacggagacgagcccgtcggggccgaccttgacgaggcccgagaacagcgcgagcggcgcctgagtgggcgtgtcctgaaggccgcccgcgcccgcgccgtcgccgcccgagcggatcttgcccttcgccgccgtcatgccgtcgatgagctggccgtagaggtcgcggatctcggaggcgagcttgcgctggccgaacacgtccgtatcgggcgccggcggcttgtagccggtgaggttcaggatgccgacgtcgacggccgcgagcgtgacataggcctgctcgcccgcggcgacgttcgagagcttcagcccgacgtcgagcgtccggcgcggctcgatcttctccggcgcctcgatcgcgacgccgatggtcttctcggcggggtcgatccgggcgtgcgccacgccgaccgcccggccgggcatgcggctcgccttagcgtcgagcgggcgatgtaagaacgccaccacataggcccccggccgccacgcgtcggtcaccttgaaggtcatggtcgcgccgtcggccgagacgtcgagcgtcttgctgtcgatcacgcccgcgcccacgaccagcaccgtggcgcggcccgcgaagcgcgagccgagcgtcacggtcgcggtctcgcccggcaggaacgtcgccttgtcgagcgcgacgtcgagcatgtcgggcgcgtccgcggaagccgcggcgaagtagccggcgtcgaacgcgacgctggtggccggcccccgcgggtcagcgctcgcgacttcgagccggtagcggccatagtcgaccttggcctcgatcttggcggccacgtcggccgcgacgtcgactttgccgtcggcgacgcgccgcgtgcgggtgacggtctcgaagttccagcgcccgtcggtcgcgtaccactggtagctggtttcgagcttcagcagttgccacgtcaggccctgggccgccgtccccttgccgtcaggcccgaccatgcggacgtcgaacttcgcgacctcgccgtcgccgagcgcgcccttgaacgccggcttcacgccgatgcgcgggccggtcgcggccacggggagcgttagcgtgcgttcgagcgtcctccccgagggctccgcgagacggagcgcgaccgtcgcttcgagcggcttcgtcgtgtcgggaagctcgggctcggcgacccgcacctccgcatggcccttggcgtcggtgcggccgaggccgtcgagcggggtgcggaccggcgccaccgtctcgtccgagagaccgaactgatagccctcgaagcccggcaggccgctctcgcgggccttcagcgtgacctcgccctcgagcgcgaggtcggcggcgggcgcgccgtatagccagcgtccgtcgaccgagaccgcggccccggcggagccgagttcggcggatttcgacgacaccgtcatgtcgagcttttcaggcacgtagtcggccacgaggaagctcgtcgagccgatcggctcgcttttcgcgtccgccagcgcctcgacgcgccacgtgccgcccatcgcctgatcgaccagcgtgacgtcgagcgtgcgcccgccgccgccggcgtcgggcgtgacgacccgccggtcctcgacgccgtcggggcgcttcaccaccagcgtcagcggcaggccctcgacgccggcgcccttgtcgtcgcgtaagagcgcggtgaggtggacggtctccttcgagcgatagaccccgcgctcggcgaacagctgcgcgtcgagcggccccggcgccgcgcggccgccgacgccgcggtcggagaggtcgaagccgggcttcgtcaggtcgaggaagccgtagtcggtcccggccgcggcggtgacgagcgccggcgcctgcccgccggtcccgcgcgcgagccccggctcgaaggtcgcaaagccttgatcgtccgtgactttcgtcgccagcacctcgttgttgcgggcgatcagcttcagctcgacgcccttgagcggaccggcgctcgcgagcgaacgcgcgaaggccttgacgccgtcggctcccgagaccgccgtgaggccgaggtccgagaccacgaaccactgggtggcgcgagcctcccagggctcgtcctcgggcgcgcccttgggccgggcggacatgacgtagacgccgggcttgaggtccggcacggcttccgacacggggaaagcggtgacgacgtcggcgttgcgcttgagttcaaccgcgagttcacccgagaacactttcgctccggtgtcgtcgcgcagcttgtcgagcgcctcgccgtcgagctgcttctgaaagtcgccggccgtcacggcctcggcgaggctgcggtcgttgacgcgatagacgtcgaccagcgcggcgtcgacattgacggtgacgaccggcacgccctgctggccggtcgagggcagcacgtagttgcgccccgtgaagcgcgccgccggcttgcggtcgcggacatagatgcgaaagtccttcgaggcggcgagcgtctcgtcgacgttcgagggcagcccagcgcggatcgtgaggtcgtaggtctcgccgtgcctgagcccgtcgacgcagatctgctgcgcgtccgccgtcaccgccggctggtcgacgcccttcaggacgacgtagggcgagaaatcgacccggcccttggcgaggtcctcggagaactgcacgcaggcccgcggcgccgccgcgtcggcgtcgatcgagtagtcgagcgcgcggaagccgtgctcggcgcgaagcgactcgtaattggcgcgcgcgtcgggattgtcggcgagcgcgaggctcgccttcagcgcgtcgatggccgggcgccactcctcgcgggtcgcgagcgcgttcgagagcacggcgagcgcccgcgctttcgtcttggcgtcggcggaggcgagataggcctgccacgccgcgccgaccgcctggctccgcaggttttcgcgttcggaataatcgtcggtctcgaccttggcgagcgcgaccgagaggttgcgccaggcctgctcgttcttcggatccttgccggccgcgagcgcgaaggtgacggacgcctcgcgccagctcccggcgcggatctgggcgacgccctgcttgacgagttcgggcacgggacgggcgtccgaccccgcctcgcgcttcagcttcgcctcgagcttcaggccgctttccgacgcctcgcggttctggaagccgggcgcgctctgcgcggcgaccggcggagagccgaacagcagagcggcgatcatcgccgccgcgccgaaaccgtgagcgagaacgcgccgcgacagcatcttgtccctcccccgcaacgccgctctgcggcggttcgacccggacgatagccccctccggcgcgcgacggaacggccggcgcggcgattcaccgcttctcaaggcgtttcgtgcgaagaccggccgcggagttcggacgggggcggcgaacggacatgaccatggcggacgcctcggcggaaaagctcggcgctgcggaccggggcgcgctgttcgcgaccggcggccgtgcgatggtcgtcttcatctgggccgcctacgccgcgatcgtcgcggccaccggcttctcgggcgcgatcgacaggctctcgaccgacgacgccatgcgcctcgtcgaggttcgcgacctcctcgccggacagggctggttcgacctcgtccagcaccgtctcaatccgccggacggcgtgacgatgcactggtcgcgcgtgatcgacctgccgatcgcggcgttgctcgccggcttccgcctgttcttcccggacgatgtcgcgacccggctcacggtcaccgtctggccccttcttctcttcctgccggcgatgctcgctacggcgtcggcctgccggacgctcgccggcccgtccgcggcggtcatcggcgccttcatgatggtgatgtcgcccggcgtcgcgtcgcgcttccagccggcggcgatcgaccatcacggcgcgcagatcgcgctcgcgctgatcctgctcgcctgcgcgctccgcctcgacaggtcgctgaaggcggccgtgggcgccggagtttcggccgccgccatgatggcgatcggcatggagaccgcgccgcatgtcgcggcctgcgccggactgatcgccctgcgctgggcgatgaccggcgacgagggcgtcgcgcgcggcgccgccgtcttcggcgcgaccttcgcggccgccacgccgctcctcgccgcggcgacgctgccgccgtccgcgttcctgtcgccggtctgcgacgcgctcgggatcgggcacgtcgccgtcgcgacggtcggcggcctcggcctcgcggcggcggcgcgcttcgcgggcgaaggccgcatccttcgcttcgcggcgctcgcccaggtcggggccgcggtcgcggtcgcggtcgcgctcacggcgcccaactgcatcgcctcgccctatggcgcgctgcccgaacggctgaagaccggctggctcgatcaggtgcaggaggcccagaacatcgtcgcctcggcgatctacgaaccgaccgcgagcatggcgatcggcctgccgctcgcggcgctgatcgcggtcgcgctctgggcggtcgtttcagcgccgcgcgacaggcgctggccggtcctcaccgcggccggcatgtgcgccgcctccgtcgccgtcacctgctggcagatccgcggcgcgagcctcgccttcgcgctcggcggcgtgctgctcccgctcgccgtgctggcgatcggacggaccggcgggcggctgcgcacggcgatcgcgatcgcgggcctcagcccggcgacgctcgcgctcgcaggcctcggcgcggccggggccttcggcctgccgccgatcgccgagcgcgggccgatgtcgggcatgtgctcctcggcggactttcgcgcgctcgccgcgcaggcgccgcggggtcttgcgctcaacaccgtcgacaccggcccggcgatcctcgcgaacagcgggctctcggtcgtctccgcgccctaccaccgcaacgtcgacggactgctcgccgcgatcgacgccttcggcggcagcgaggagacggcgcgcgccgtcgcggtctcgcgccgggccgcctatgtcgtcgtctgcacgacggacggcgggttcacgccctacgccaaggccgacgcggacgggttttcggcctcgctcctgtccggccgggcgccggcgtggctggagccgatcgacctcggccccgaggccaaggtcaaggcgtggcgggttctcgccggccgctgatccgtctttgcgggcgggccgcgccccgctagggtcgcgccatgtccgcgtcaggcgcctcccctccccgatctcccggcggcaagcccggccgcacggccgagaccgaagcccgcgaggccgaacgccggaagcggctcgcggcggcgcttcgcgagaacctgcgacgccgcaaagggccgccagaagagacggcgccaagcgcgcccggcgaagccgccggggaaccggatcgagactgagagcggcgtgacggggcggtcgatccggaccggtcacccttcaaggagacgcttcccatgacgcgccgcgtcgacgtctatttcaccgccatgtcgccctgggcccatctcggccatgagcccttcatggccgtggcccgcaagcatgggctggagatcggctggaagcccgtgccgctcggcgaggtgttctcggagaccggcggcctgccgctcgcaaagcgtccgatcgcgcgccgccgctatcgcgacgtcgaactcgcccgctgggcggagcggcgcggccgtccactgaagctgcgcccggcccattggccgttccggccggacctcgccgaccgcgccgcgatcgcggcgatcgccatgggggccgatccggccgacttcgtcggtcgcgccatgcggggcgtctgggaggaagagcgcgacctcgccgaccccgccgccgtggccgagacgctcgcggcggcgggcctcgacccgaagcaggttctcgcccgcgccgcggacgacgacgtcgaggcgagctatcgggacaacggcgccgccgcggtcgccgccggcgcgttcggctcgccgagctacgtgctcgacagcgaggtgttctggggacaggaccgcatcgacctgctcgacgaggcgctgacgagcgggcgcgcgccgtacaggccgctggagtgaggaagcggaaggctcagcccgtcctgcccgagcatgtctcatcccgcttcatccaaaggaatgaccgaacgacaggaagaaattctttctgcgccgagcgagccgtgacagcatccgccaccatgacgggcaaagacgcgccacgcgactttggcgcgagacatggttcggaggtgcgatgcgctggcgtctcgggctcgatctcggaaccaactcgctcgggtgggcggcgctcgggctcgatgcagaaggaaaacccgaacaggtaatttctctcggctcgcgcatcttttcggacggccgcgacccaaagtccggcgcctcgctcgcggtcgaccgccgcgacgcgcgcgccatgcggaggcggcgcgaccggttcaagcgccggcaggcggcgctgctgaagcacatgacgcggctcggcctgttccccgaagatcctgcggaacgcaaggctctggagacgctcgatccctacgagcttcgcgcgcgggcgctgtcggaaaagctgccgcttccccatctcggccgcgcgctgtttcatctcgaccagcgccgcggcttcaagtcgaaccgcaaggccgaccgcggcaaggacgacgaccagggcaagatcgcggtcgcggtcggacggctggcggaagccatggaggaggcgggcgccgagacgctcggccagttcctccacatgcgccgcgagaaggccgaggcgctgcgcgcttccggcgaggagcccggccgcgagggctgggtgcgcacgcggctgcgcgacgcggccgtcgacggctacgacttctacccgtcgcgcgcgatcgtggaggaggagttcgagacgatcttcgcccggcagcggccgcatcatccggacgtcctgaccgacgaagcgcatgactgcctctacgagatcatcttccaccagcggccgctgaaggcgccgaagatcgggcggtgcacgctggtttccggcgacgagcgcctgcccaaggcccatccgctgttccagcgccggcggctgctcgaagaggtcaacgcgctcgaaatcaccctgcccggcgaaaagccggcccgcctcacgagggagcagcgcgacctcctgctgctgaagctgaaaggcaagcgcaaggtcgcgttcaagagcctccgcagcgcgctgaagctcgatccggacgcgcgcttcaacaaggagagcgagagccgcgtcgacctcaagagcgacgaggtcgcggccgcgctcggcgacccgaagcgttttggaaacgtctggtcgcatctgtcgccggagacgcagtgggaggtggtctcccggctgcgcgaactcgaaagcgacgaggacgaggcggcgttcagttcatggctgacggagcgtcacgggctctcgccggacgccgcccgcgccgtctgcggcgcgccgctgccggaaggcttcggacggatcggcgagaccgcgacccgccggttgatcgcggcgctcgaggcggaagtgatcgtctacagcgaggcggtggagaaggccgggctcggccatcattccgacttccgcagcggcgaggtttttctcgacgacaagggccgcccggccctgccctattacggcgcggcgctcgaacgccacatcctgcccggcaccgccgatccgaatgaggaagacgaggcgctgcgcgttggccgcctgaccaacccgaccgtccatatcgggctcaaccagctccgcaaggtcgtgaacgacctgatccaggtctacggcccgccggaggagatcgcgatcgaactcgcccgcgagctgaaactcgacgaggacgagaagaagaagcgcaaccgcgagaacaacgacaaccgcatcgcggcggagaagcgatcggagaaactgcgcgacctcggcaagcccgacaccggcgcgaaccgcgcgctgctgaagctgtgggaagaactgaacctcgacaacgcgctcgaccgtcgctgcccctattccggccgccagatcggcgtcgagatgctgttcaacgggcaggtcgacgtcgaccacatcctccccttcacccggacgctcgacgactccaacgccaacaagaccgtctgcctcgtcgaggccaaccgcatgaagcgcaaccgctcgcctgatgaggcgcgggccgacttcgcggcgaagtggggcgccgacgccgactgggaggcgatcgcggcccgcgcggcgcgcatgccgaagaacaagcgttggcgcttcgagccggacgcgatggaccgcttccgtgacgaccccgagaacggccgcggcttcatcgcgcgccagctcaccgacacgcagcacctgtcgcggctcgcgcgcgaatatctgtccacgctctatccacaccgcggcgaaggctcgagccatgtctgggtctcgcccggccggctgaccgagatggtccggcgcaagctcgggctgaacgatctgctgcccgaccacaattacggcggcggcgaccagccgaagaaccgcaaggaccaccgccaccacgccatcgacgccgccgtggtcgcgatcgtggaccgctcgctgctgcaggagatcgccaacgcatccggcaaagagggcaaggacggccgcgagaagatcgtcatcccggagccctgggaggggttccgcgacgagctgcggcgcgccgtgaacgacgtcgtcgtcagccatcggcccgatcacggcacggtttcgaaagccggcctcaagccgggcttcgacaagaccgcgggccggctgcacaacgacaccgcctatggcctgaccggcctcaaggacgcgcgcggcaacgacctcgtggtccatcgcgcgccgctgtcgtcgctgaagaaggcctccgacctcgacgcaatccgcgacgacgagctgcgcgaggcgctgaagggctggacctcgggcaaggaaggcaaggccttcgagcaggcgctgcgcgacttcggcgatccgctgaagggctacatgcgcgacggccggcgcgcgagctacccccacatccgccgcgtgcgcctcgtcgagccgctctcggtcatccccatccgcgacggttcggggcgcgcttacaagggctacaagggcgattccaaccatcgttacgacgtctgggagctgaaggacggagcctggaaggccgaggtggtctcgaccttcgacgccagtcagcccggctggacctcggctgtccgaaccgacaacccgacggcgaagaaggtgctgagcctgcaccgcgacgacatgctggcgatcgagcgacccgagggcctgcggatcgcgcgtgtcgtcaagttcaaccaggccgggcaactgatcctcgccgagcccaacgaggcggggtcgctcaaggcgcgcgacgcggacaaaacggacccgttcaaatatctctatccctccgcgaacacattgaaagcgtggcgcgcccgccaggtgcgcgtggatccgctcggccgggtgagcgatcccggctttccgccgcggaccgccgtgagacgcacgcgcccgaagacatgagaattcgcgtgcacaggataatttaaacaatcaatgattgtctcttcgggaaatgtctcggggagagcgcgacagccgtggagcggatcgtcgacatcgcgagcgacggccgccatctgtccgcccatcgcggcttcctggtcgtgtcggaaggccgcgcggaggtcggccgcgtgccgctcgacgacgtcgcggcggtcgtcgtccacgcccatggcgtgacatggagcgtcaatctcgtgacggcgctcgccgaacgcggcgcgccgctggtcttctgcgggccgaaccacgcgcccgtcgccgtctgcctgccgctcgaaggccatcacgggcagaacgcgcggatgcgggcgcagtgggaggccgggcggccgctctcgaaacagctctggcgcgagatcgtttccgccaagatccgctggcagggcgcggcgctggccgcaagcggaggcgaggccggcgcgttcgagacgctcgcccgccgcgtgcgctcgggcgaccccgagaacctcgaggcgcaggccgcgcgtcgctactggcccgcgctgatgggagcggacttccgccgcgaccgatcgcttccgggcgccaacgcgctgctcaactacggctatacggtgatgcgggcgctgctcgcccggtcgctggtcgcgagcggcctgcacccgtcgatcggcgtgcaccacgccaaccgcggcgacgccttcgcgctcgccgacgacatggtggagccgttccgcccgctggtcgatctcgccgcctgcgcattgctcgcgcgcggcgcggccgaggtgacgccggcggccaagcgcctgttcgccggactgacggcgctcgacctgccgggcgaggccggcgtcacgaccgtcgccatggcggcgcagcgcatggcgcaatcgctcgcccgcgccttcgagacgggccgcgccggcgaacttgcgccgccgcggccgccctccccgctcgaactctcgggcttcgtcgccgccgtcgcgatcgacgacgccgagccgcccgacgagcctccgccatgacgcgggccgcacgtggcggcagacccgcgccgacctccccgaacgccgccgctccggcggcttcggtcccctccccctcgacgacgcagctcagcggctatcgcctgatgtggatcttcgtgatgttcgacctgccggtgaccacgaagtcgcaatcgaaggccgcaacgaagtttcggcagttcctgctcgacgaaggcttcgagaagagccagttttcggtctatgctcgtttttgcaacggcaaggagcagttcgaagcctatatgcggcggatcgaacgcagccttcccgaccgcggcgacgtccacgtcctgacctttacggaccggcaatatgagaacatcgtccgcttctccggccagcgccgacgccgtccgcgaaaaaacccggaccagctcgctctgttctaaccgccgcgccgatttcgaggcgcggacgcgggcggttatcccgtttgaaatcaacgggataaccgctcgcggagtttagccgctcagagatcgcggtccagcggcaacggcctcccgctcatgtcgacccacgtgaagagtttagccgctcagagatcgcggtccagcggcaaccggatcacgtcgagcgggttgtgcgccgggagtttagccgctcagagatcgcggtccagcggcaaccggcaccgtggcgtggagcttcccgaaataagtttagccgctcagagatcgcggtccagcggcaacgctgtggctctcgaacccgatcgtgtcgttgagtttagccgctcagagatcgcggtccagcggcaactgttcagcgcccccatccagtcccggtccaagtttagccgctcagagatcgcggtccagcggcaacgccgcagcttcgggggcgcgctccccaaaaagtttagccgctcagagatcgcggtccagcggcaaccgcctccgccgaacaccgcgttgtagacggagtttagccgctcagagatcgcggtccagcggcaaccctaacagccccgtcacgatcaagctgaagagtttagccgctcagagatcgcggtccagcggcaacgtcagaaccgaagacgactccgcgccaaacagtttagccgctcagagatcgcggtccagcggcaacagacaggatcttccgtgcgccacgaacgaaagtttagccgctcagagatcgcggtccagcggcaacccggtcgacctcgcatccggcatccgaactagtttagccgctcagagatcgcggtccagcggcaactcaacacggtcctgatcaaccagagcaacaaagtttagccgctcagagatcgcggtccagcggcaaccccttcatgcgcaaggccgccgacgccgccagtttagccgctcagagatcgcggtccagcggcaacggagcgaccaagcagccgggccgcaacgcgagtttagccgctcagagatcgcggtccagcggcaacggctcccaagggaaccccgaacgaaacggaagtttagccgctcagagatcgcggtccagcggcaacgaacctcacgcactccgtgatcgcccactaagtttagccgctcagagatcgcggtccagcggcaactatcgccttgaacgcctgggcgccgatcgcagtttagccgctcagagatcgcggtccagcggcaacagcgcgaccatgatggcgtagttgtaatggagtttagccgctcagagatcgcggtccagcggcaacacagccgacggcacgcacatgccagccatcagtttagccgctcagagatcgcggtccagcggcaaccgggcaccacgtcggccgcagcctcgggcgagtttagccgctcagagatcgcggtccagcggcaactcgtcgtttccccgacgctgaccgcgatcgagtttagccgctcagagatcgcggctctatccctgaattattttagcggcgacctactgctgggacaggagacctttccagcctcacggcaccttgtggatcggatcgacccagtaaacctcctccggcgcctctacggggtcgacatcgtcgatgttcacaaccaccgcctcgttgtcggagcgcaccaggacgcattccagcggctcgtcgggcgcggcgttgatctcctgatgcggcacgtaaggcggcacgaagatgaaatcgcccggtccggcctcggcgacatattcgagcctgtcgccccagcgcatccgcgcccggccacgcacgacgaagatgacgctttcgagcgcaccgtggtgatgcacgcccgttttggcgttcggctcgatcgagaccgttccggcccagatcttctgggcgccgacgcgcgcgtggttgatggccgcctgccggaacatgcctggcgtctgcgccgtgttggggtcgagcctgtcgccccggatcacgcgcacgccgtcatgcttccaccggtcgtcgccgtggccgtgatcgtggccgtccgctccgtcgttcgacatgatcgttctcccgttcgccgcgcttcagctaagcctcgccgggcgcggacgcaaagccgccgtgcgggctttccgcgcaggaccgccctaaaaccggcgggttcgcgcgcctgaaacgcgctccgccccgcccgcgcgatttcgcgccgccttttccgcagaagcctcccgagcgcccatgcgcctgaagccagacacgctcgccctcaccgccgtgctcgctttgctcaccgcggtcgggccgctcgcgatcgacatgtatctgccctcgctgccgcatctcacgcaggcgctgggcgcgagcgcgcccgagggccagctcacgctgtcggccttcctcgtcggattcgcggccggccaggtggtctacgggccgctgtcggacgccaagggccgcaagcccgtgctgctcgcgagccttgcgctgttcaccgcgggctccgcgctctgcgccgtcgcgccgacgatcgagaccctgatcgtcgcgcgcttcgtgcaggcgctcggcggcgcggggccggtggtgctggcgcgctccatcgtgcgcgacctctattccgggccgcgcgccgcgcgcgagctcgcgcgcatggccaccatcctcggcctcatccccgcggtcgcgccgctgatcggcggcgtgctcgaaagcgccttctcgtggcgcgcgaccttcgtggtgctgaccttcgcgctcgcgctcgaaatggccgtggtggcggcgttcctgccggagacgatccgggtgaagaccgccggcgcggtggggccccgcacggttctggcgagtttcggcgtgctgctgcgccacggcggcttccgcgcctatctcggcatgaccgcgatcgccttcgcgggcctgttcgcctacatctcgacctcgtccttcatcctgcagacggtctacggcctctcggcggtcgcttatggcgcggccttcgcgatcggggtcatcggcttcatcggcggcacgctcgccgcaggcccgatcgtgaagcgctccggcctcgacggcgcgatcggcgtcggcgcctgcgcgctcgcggccggcggcctgctgatgctcgtcctcgtcacgctcggtcccaagacgccgttcggggtgatgatcccgatgatgatctacatgttcggcgtcgggctggtgatgccgcagtcgatggcggcggcgctgcagccgttcccggagcgcgcgggcgcggcgtcgtcgctcgtcggcttcgcccagatggcgaccggagcgctggtcggcgttctcatcgggcggacgctcggcatggcgcagggccatctcgcgctgcccatagcggtcgccgtgttcggcgcggcgacgctcgcgctgttcctcacgacgcggcgggcgcgaaaagggctcggcgcctgaattcaggcgagcagaaaatcctggtagctcaggtcgagcccggcgctgagctgcgcgatcttcacggcctcgaaggcggttccggagccgtcccggtcaaaatagagagcgcccgtgtcccggtcgtagatcacccgatcggacttgtcggccgcttcggttccgacgtggaaggctttctcgccgagccggttcgcgccgagcccatgggcgttcaggcgcacgacatcttcgcccacgacgaagtcctggatcgtgtcgaccgcgtccggtccggcggcgacgtcgatgacgaagaggtccgcgccggcgccgccccgcaggaaatccgcgccgccgccgccgttaagcgtgtcgtttccgtcccatccatagaggaagtcgacgtggtcgctgccgatgatcctgtcgtcgccgccccagccccaaagctccacgagatcgtcggcgtcccagttcgagacctggagcttcgaggcgtcgagcctgccgtcaaacccgatgatcgtcaggtgctgcgcgcccgtatcggcgtccgcgccgaagacctcgaccttcatgttccagcgcgcgtcgaagatctggtcttcgcgcgcccggatctcgacgccgtcacgatcgaaagcgaaccgctccaccgagacgacgtcggtctcgtagatctcgttctggcctgcgaacacgatcgtatcgaaacccttcccgccgtggatcagcgcgttctccgtccacagcgacgacgtttcagcgagaaagatcgtgtcgtcgcctgcgccagcctggatttcgtagtcgcccagcaggcggacgccgacgatgctgtcgtcgcccgcgccgccatggaccgtgtcgtcctccgcgacgaggatcaggtcgtcgccggctcctccgaagatcaggtcgccgccgccgtggccgtagatcgtgtcgtcgccgcgcccggcgcggatctcgtccgcgtcccacgtgccgtcgatcgtgtccgcgccgttggttcccctgatcagcttgaccaagcgttccccccaaagctcacggcgaccgacgcgccgagcgacactctgggttgcagccgttgaggaagatttacggcgatcgcagaaacactggcgatcagaggcggcggaacgtcagataggtcccgcgccgcccctcgcggatcgccttcgcctcgtagcgggtgccgggccagcccggaaacggctcgcgccagtcggcaggacgctcggcggtccattcgaaatcgggcgaacgcgcgacatgggccagcgtccaggcgacgtagctgtcgatgtcggaggcgaaacggaacagggcgccggggaccatgacgcgggcgaggcgcgcgagattgcggtccgacacgaagcggcgcttccagtggcgcgtcttgggccaggggtcgggatagagcaggtcgacgcccgcgatcacgccgtcgggcaggcggtcgagcaggatcgtggcgtcgtcgccatagaggcggacgttgtcgaggccgagccgctcgacgcccgcgacgcccttggcgaggccgtcgacgaagggctcgacgccgatgaagccgacgtccggcgcttccgccgcgcgatggagcagatgctcggcgccgccgaagccgatctcgagccggacctcgcggaccggcgctgcgaaaagcgaggccagatcggcaggaaggttctcgggatcgaccgacaggcgcggcagcgcgtcggcgaacgtctcggcgcggcccttgcgaagctgcttgccgtggcggcggccgaagaacgagccgtcgtagcgggaggcttcggtcatggcgatgctgaaccgctccgtcatggcccggcttgaccggaccatccatctcaaacgtcgagcaccatgtcgatgtgggtcctccggtcaagccggaggaagacggcggaggcggccgctcccttaccgtgaccggtccggcctgatcggatgagtctcttgcgccctcagccgagcgccgacttcagcgcctcggcgaggtcggtccgctcccaggagaagccgccgtcggcgtccggctcgcggccgaaatggccgtaggccgcggtgcgggcgtagatcgggcggttgagggagagatgcgtgcggatgccgcgtgggctgaggctcatcacctcgccaagcaccttttcgagcttcgcctcgtcgacgcggcccgtgccgtgcagatccacatagatcgacagcggctccgaaacgccgatggcgtaggagagctggatcgtggcgcggtcggcgaggtcggcggcgatcacgttcttggcgaggtagcgcgccgcgtaagccgccgagcggtccaccttggtcgggtccttgcccgaaaacgcgccgccgccatgcggggccgcgccgccgtaggtgtccacgatgatcttgcggccggtcaggccggcgtcgccgtccgggccgccgatgacgaaggagccggtcgggttcacgtgccagaccgtctcgtcggagatccagccctcgggaagcgtttcgcggatatagggctcgacgatcgcgcggatgtcgcgcgaggtctggctctcttgcgtgtgctgcgtcgagagcacgatcgaggtcacgccgaccgggacgccgttcgcgtagcgcaccgtcacctggctcttggcgtcggggccgagcgtcggctgctcgccggaatgacggacctcggcgaggcgcttcaggatcttgtgggagtagtagatcggcgccggcatcaactcgggcgtttcgcggcaggcgtagccgaacatgatgccctggtcgcccgcgccctcgtccttgttgccggacgcgtccacgccctgcgcgatgtgcgccgactgggcgtgcagatagacgtcgatctcggcggtcttccagtggaagccgtcctgctcgtagccgatgtcgcggatcgcctcgcgcgccgtttcgacgatgcggtcggaggtgacgctctccgggccgcgcacttccccggcgatcaccacgcggttcgtggtcgcgagcgtctcgcaggccacgcgcgcctcgggcatctcgccgagatagagatcgacgaccgcgtcggaaatgcggtcgcaaaccttgtcgggatggccttcggaaacggactcggaggtgaacagatagtcggcgcgggccaagggagtctcccgaacggtcgaacggcggaccgttcggttctacgaacgaccgcgttctttccagaagcccgcccggcggtcaagcgaccaagggcgcgcaaaacgccagggccgcccgtcagaggcggcgccggccggttcgatgggcggatggatcagcttgctttgggttgatcagccagagccgacacgaggtcgacgatcttccgacggaccttaggatcggaaatccggacgaacgacttgttgagctgcagtccttctgtggtggtcaggaagtccaccacatagtcggatcccgccgattcgccgaacccgccgctcttggtttcggcgccgggcgcgtcgtcgaagaaataggacaccggaacgccgagcacgatcgagatctgctgcatgcggctcgcgccgatacggttcgtgcctttctcgtatttctggatctgctggaacgtgatgccgagcgcctcgcccagcttttcctggctcatgccgatcaagacacgcctcattcgcacccggctgccgacatgcttgtcgatcgggttgggcgttttcttaatcatttcactctcctcgcaaccgatcttccggcgtcgcccccgccttggatctccccttcaggacgcgcgcgaatttcgaccgcgagcatgatcgtgccgcgttcggcggcatcaggtgtaaatggtcatttcgtctaaggcttgtcaaacacgagatttacgcgcgaagacaaggcacagaaaagccgcaggcattaacaaatgaagcaaaccatgggtcgtcgcgaagaccgtcggttcaatcggaagcggcaatcgcgcgtcgaccacgccccgctccccgagcggcgccgacgcaaggacgcggccatatgagtcgacgatcgacgacacgcccccgttcgccgagcgcaccatcggcaacccctgctcgatcgtgcgcacgcgcgcctgcgcggcgtgctgataggggccgggcgtgcggccgaaccaggcgtcgttggtgacgttcagcaggaagtcgggccgttcctcgcccgccgcctcctccggaaagatcgcctcgtagcagatcagcggccggaagcgcctgccgcccggcagcgagagcacggcgcgccggtcgccgctcgaaaagcctccgcgctgccgggtgagcgcctcgaagccgagcgcttcgagggcggactggaacggcagatactcgccgaacggcacgaggtggatcttgtcgtaggtcgcacggatcgagccgtcgtcgcccacgacgtagaccgaattccagaaatcggcctcgcccgagccgtccggccgccgcgcgccgcggaccgcgccggtgacgagcgccgcgccgggcgcgaggctcgccccgatgcgcgcaagcgccgcgggcgtttgcgccagcaggaacggaaaggccgattccggccacaccaccagcgaggcgtcggcgaagccgcgccgctgcgggtctcgcgcctcatcggtcagcgcgatataggcgtccatgacggtgtcgcgggcgctctcctgcgacttcacgtcctgcgggatctccggctgcagcacgcgcgccacgaccttgtcgtcgaaggcggtcggagacaaagcgagtcggacgccgccgaacgccgcaagcgcggcaagagccgcgaacgccgttccgagcagcgcgcgcgacggcctgccgtcggccagaaccgccggggcggcgaagatcgcgatcgccgcataggtcagcccctcgacgccgatcaccgaggcgaactggccgagccacgcctggtcggcgagcgcgtagccgtacgagttccagggaaagccggtgaagagatggccgcgcgcgatctcggccagcccaagtcccgtcgcgaagacgagcacgcggcgccagcccggccgccagagcagccgcgcaagcgcgaagcccgccgcgtggaacagcccgagcagcgccggaagccctgcgaccgcgaa

SEQ ID NO: 3067 - DNA, 23321 bp, synthetic construct
  misc_feature 1..23321: note = Synthetic
  source 1..23321: mol_type = other DNA
ctgcagcctcttgcccggcggctgcgccatgatctccagccccgcctccagcggatcgtccgactcgaccagcgcgaggtgtgccaggccgccatcgaacagcgtcgtgaacagccgccggaaatgcccgtccaccgcctcgaacgccgcgagcagccgctggcggccttcgcggttgagcgtgccgatcgacccgcgcagccggtgcaccgcctggcccagctccgcgcgctccgcggcattgtcctgccccgccgcctccagttcggcgagttcgcgctcggcgaccaggttgaccggcccgatccgctcgcgatcgagcagcagcttctcgtgcgccgcgctctccgcggccggcgcgtgcacgccgtcgctcgcgaagcccagccgttcgggcagcaccggcgccgggcaggcgaagcgttcgcccgccaaccgtcccatctcgacgcggcgcaattcctggttctccagccgcgccgccgcgcccgcgcggccctcgcgcgcctccgccagcgccgcattggcgcgccgctgcgccgcctccgcctgctgccgcgcctcgtccgccgcgccctccgcggtcgcgagccgcgccgcctcggcccgggccgcatcgtgcgccgcccgctcggcggcgatcgccgcgtccagcgccgccggccggccgtcgaccgccgccgcctcctgcgccagcgcggcgtcgcgccggtccatctccgcgatccgccgtgccgcctcgcccgcgcgcgcacgccaaccgcgcgtttccgcctgcaccgtcgccagccgttcgcgctgcgtctgcgccgcgcggtcggcggtggcgcagacggtgcgcgccgccgccaccgcctggcgcgcatcctccgcgacgcggcccagcgccgccgtcgccaccgcgctctcgcgcccgtcgggcagcgccgcgcgggcctgctccgccgccgcgcgttcattcgccgcctcggccgcctccgccgcgacgcgcgcctcgcgcaccgcgagatcggcgcgctgtcccgccagccgctccagcgccgctgtggcgcgatcctcgtcgcgcgtcgcctcgcgcagcgcggcatccgcggcggcgatggcgctgcgtgccgcctgtgccgccgcccgcgccgccgcgatccgtgccgcgatccccgcgcaggcaccctccgcctgctccaccgccgccgtcgccgccgggcgcgccgcggtcagcgccgccagccggttgcgccgttccagccgctcggccgccgccgcgccgctgccgtccgcgacgaagccgtcccagcggcgcagccggccgccgtgcgtcaccagccgctgcccgaccgccagcgcacgcccgtcgtccgccgcgacgacgaacacctgcgccagccgacgcgccagcgccgcgggcgccgtcacccgcatcgccagcggcgcggcatcgcccggggcgggcgggtcgccgggcatcggcgcggcgcccggccacgccgccagcgccgcgtccagatcatcgcccagcgccgccgccaacgcgcgctcataccctgcctcgggccggacatggtcgatcagccggtccttcccctgccgctgcgtcgcgcgggtcagcgccgccgcctcgctgtcgatcgccgccaggtctgcgcgcgccgccgcccgcgcgacctccgccgcgtcgcgcgcgcccatcgcctcgcgctcgtcgccctccgccgccgccagcgccgcgcgtgccgcctcgccgcgcgccgtcgcctccgtccgccgccccgcggccgcatcgcgtgcgtgcgccagcggcgcttccgcccccaacgccgtcagctgcgcggcgacctcggtcaccgcgcgcatcgcccgcgcctgccgcgccgtcgccgccgccagcgcggcgtccgcgacacgcacctccgccgcctcgcgcgcctgcgccgccagcccctgcgccagcgcgacctcggcatcgcgcgcctgccgctctgccgcggccagcgccgcctcgcgggcgggcgcctccgccgtcgccgcggcgaggccctgctccagcgccttcgcctcctccgccagctgcgccagcgccgcggcggcatcgcgcgccagcgtcccctcgcgcgcgcgatcctctgcgatccgccgccgctgatccgccaggtcggcgatgcgccgcgccgccacgtcgcgctccgtggtcagcgtcgccagcctgtgtcccgcctcgctcgccgcctcgcgcgcggccagcgccgcgccgcgcgcatcggcgagcgcggtcgccgccgcctgctgcgctgccgccgccgcctgttccgccgcgtccgccgtcgcgacgcgcgccgccgccgccgccgcctcggcgcgcgccgcctccgccgcggccaccgcctcgcgccagcgggcgaagatcatccgcgcctccgccacccgaatctgctcggacagcgcgcggtatcgcgccgcctgccgcgcctgccggcgcagcgctgcggcacgcacgtcctgctccgcgatcagttcgtcgagccgcgccaggttcgcctcggtcgcgcgcagcttcccctccgcatcgcgccgccgcacgtgcaggccggcgattcccgccgcttcctccagcatcgcgcgccgttcggtcggcttggcggcgatcaccgcgccgatccggttctggctgaccagcgcggggctgtgcgcccccgtcgcggcatcggcgaacagcaggccgacgtccttcgcgcgcacgtcgcgcccgtcgatgcgatatgcgctgcccgcgccgcgctcgatccgccgcaccacctcgcgctcctcaccgtccgcgccgtcgagcaggatcgacacttccgcaaagtcgcgcggcggccgtgtcgcggtgccggcgaagatcacgtcgtccatccccgcaccgcgcagcgacttcgcgctgttttcgcccatggtccagcgcagcgcctcgagcaggttcgacttgccgcacccgttcggacccacgacccccgtcagccccggcgcgatgacgaggtcggccgggtcgacgaagctcttgaagccggcgatgcggagccgcttgatctgcatgtcaggggagggcgctacacccctttcggcgaagcgttaaggggggcggatccgcccgagggcgccggctgatctagtatgtttctggtatataatgaccagcgacccgcccgtgcgacacgatatacgttgccccggtgctgtatcgtctgcaattccgtttgttcgaacgccgtacattccatagtttgggctgaacgggtgggctgtgttcttttcgcgacagccttaatccgacgttgataatgtctggagagccatgaagacgttgtttgcccaggcgagaagcgcgatcgatttccttgaacagcatcagcttgaaccggatgccgtgcattatgcgctggcgctggcgcatcgatccggtgcgaatgcgggcctgacggcggagatcacgctgctggtcgagggcggagttcgcctgaatgccgaccaggcgcagacattgatcgcccggtatctgacgccgcaagacccgtcgcggcggccggggattgagcgggaactgacggcacatgcgacgcggctggaaacgctcgccggcgaagcgcagggcgtcgccctggcggtgggcgacgatgtcaggcatgtcgtgcgccatgccgaaggcgtggtgcccggcggcgatgcagtggtcagccgcttgaccagcgcggaggaggagctgatcgagctgaaagggcagtttgaggccttgaaggcaagtatccggtcactcgctccggaatcggtcggccttgaacacgatggactgaccagcgcgctcaaccccgtcggcgcgcggcgtatattcgagcaggtcgaacggcacgagcgccgttatgtgctgctgatgttcagcatcgacgggctggtcgggatcaatcgcgaattcggcgcgtccgtcggcgacaatgtcctgaacgccttcgccaacaagctgcgcaagattttccaggatcaggaaccgatccgatggtccggcaacgagttcgtcgtcgtccttccggatcacacggtcaccgcggcgcgcggccttgccgaagaggtgctctcgctggtcgagcgacgcaagttcaggctgctcgaaaccggtgaatggatcggcacggtcaccggatcggcatcgatcgtcagcgatcagggcgacgatatcgacacgctgctcaccgcgttacgcaaaaaactggtcgtggcggcgcagcgcggcggcaaccacgtcgagacgtaaccccgttcgcggggcctgccgagaaagccgcagcgtccccgaacgctgcggctttctccaatcttacgcgcccgccgccttgagcagcggctcgagcgcgccccaggtgatcgcgtcgaccttcttgccgttgaggatcagcgtcggcgtgccctgcacggtgccgtcggcgctcttgtcggcggtctgcttggtccagcggtcgatctggccctggtcggccaggcactgcatcgccttggcttccgggataccgcgctgcttgacgaagtcgatcaggcccatctgctgcgccatcaggcggaacgcgtcgacgggctttgccgactggatctgctgctgcgccgccggggacgccgcctggatcttgtcgaggaagctctgctggttcgcatacatttgctcgagcagcgggaagaaggcttccttgctggtgcaattgccgagcaacgtcggcggcatgtcgagcgcgccatggaccaggaattcgcggaattcgaagctgaccttgcccgagtcgacgtatttggtggtcagcggctgatagccttcgcgggccagcgcgccgcacgtcgggcacaggcgcgagccatattcgacgagcttgatcggggcatcggggttgcccatcacatagccttccttggtctgcgcgaccacgtcggtccaatgctggccggcaggcgcggcgacggcggcgaccggggctgcgggcgcggcgggcgtgccggtattgccggcatcgccgcccttcgaacaggcgaccagcgccagcggcgcaaggaggagggcaaggaacttcatagcggtgttacgctccacgaaggggacttgggacgaaaggaaaccggggacacggggaaaaaccggacgaacgaggcgctcacttgcccgccggtgcgcccttggcgcgcagcacggcggccagctggtcccacgccatcggcggttgcagctggttgttgatgtagaaggtcggcgtcgattgcacctcgatcggcgcatcgccggtcatcgcggtgatccggtcgacgcccgccttgtccgcgaaacaggcgttgatctgcgccggggtcagtccgcgcgcgcgcaccgcctgcgtcagtcccgcgccatcggccagcgcgcgcgcctgcgcgaggcccggtttggcgtcgagttcgggatgcgcctgggcgtagctcgacaatttgggcagccatgcctcctgcgtcgcgaagatcatcgcgctggtcggaaagaagcccgcggtgcccgtgcatcgcgccaggatcgccgcacccagatcggcaggatcgcggatcaagtggcgatattccaggctgaccttgcccgatcgcaccatctggcccttcagcgtcgcctcgctctccttcgaaaaggcggcgcagtgcgagcaggtgtagctgccatattcgaccagtttgatcggtgcggcggggttgcccagcacgaaagcgcccttcgccgtctgcgtgacatggcgcgtccagtcggcggccggcgcggcggcgaccagcgcggccgtcgtggcggaggcgaggaagacggcgaggccggcgacgtacggacgcatgacttatcctatcctgggcaggccgcgcggcgtggcggcgacgcctgcggcaagcgattcgagcacggcgcgcagctccggatcggcgatcgtcttcagcccttcgcccatctcggcggggaccggacgcaccgtatcggtggcgatgggcgcggcgcggcgcaccggtttggcgatctcgccctgccgcaacgtcagccgcgcgaccgcggtatagccgaagaagcggttgacgcgcgcgacgatctccggcgcgatatgctgcatcatcggcgcatggctgccgcgcaccgtcacggtcagcgtgccgtccgccttcttgccgggcggaaagcgcagggattcgggtgcggacgcgctcgcccagcgctctccgacgatctccggccagcggcttaccagcgcgctctgcacgaagccgaagcggcgaaacgccgcgccgcccaccgcgggcagaagctcgctcaccgcgcgcgggcggttgtggcggggggattcggtctggggggcgcggccgcgcttgctcatccgccgctccatgccatagcggcggcgtggacgctacacgcacttgcctgcccgacgcgccgatcgatgcgggatcgatcgcccccgcgctgctcgactggtacgaccgccatcgtcgcgacctgccgtggcgggcacgggcgggggaggcggcggacccgtatcgcgtctggctgtcggaggtgatgctgcagcagacgacggtcgccgcggtgaccccgcgcttcctcgcctggaccgcgcgctggcccgatttcgccagcctcgccgccgcggacgaggcggacgtgatggccgcctgggcggggcttggctattatgcccgcgcgcgcaatctggtgaaggcggcgcgcgccgtcgtcgcggaccatggcggcgtctttccgcgcaccgaggcggtgctgcgcaccttgcccggtctcggtgcctataccgccgcggcggtggcggcgatcgcgttcggcgaacgcgcggtggtggtcgacgccaatgtcgaacgcgtcgtcgcgcggctgttcgcgattgccacgccgctccccgtcgcgcggcccgcgatccgggcggcggcggacacgatcacccccgacgcacgcgcaggcgatttcgcgcaaggcatgatggacctgggctcgtcgatctgcacggtgcgcgcgcccaaatgcctgctctgcccgctccagccgcactgccgcgcgcatgcgcaggggctggcggaggcgctgcccgccaaggccgcgaaaaaggcgaagccgcagcgtcaaggcacgatcttctggctcgaacgcgacggccgcgtcctcctcgtccgccgtcccgacacggggctgctcggcgggatgcgcgcgctgccgaccgggccgtggcaggagggtgcgccccccggcctcgccgacgcgcccgccgcagcggcgtggcagctgcgcaacgcgacggtcgcgcacggcttcacccatttcgacctgcaactcgcgcttgccgtcgcgcgcgccgacgcgcatcaccggcctgagagcgaatggtggccgatcgccgatctcgatgcggcggggctgccgaccgtcttcgccaaggcggcgagagcgatcatgaggagggaagactgatgcgcgtatccatcacgatcagcgcggcgctcgtcgcgctcgcgggcgccggcacgctcggcgcgcaggcgctcaggcaggagacgcgctcgctgcccgcgcgcgtccccgcacccgtcgccgcacccgcggccgcgcagggcaatcccgccttccccggcacgcaggcgctgttcgacggctacgtccgcgacggcaagatgcccggcatcgtcgccgcgttcggcatcggcgactatccgacgcagttcatcgccgcgggccgcatcgcgaccgacgccgccgcccccgccgcgacgcccgacacgctctggcgcgtctactccatgaccaagccggtcaccgcgatggcggcgatgatcctgatcgaggagggcaggatcggcctcgacgacccgctgtccaaatacatacccgccttcgccaggatgcgcgtcctgaccagcccggacaccagcctcgacaccgagcccgcgaagagcccgatcacgatccgcgaactcctcacccacacgtccggcctcggctacaacatcaacgcgcaaggcccgctgctcaagctctacgaggcgcaggggatcgtccccgccgcggtcaacaatgaggtcgaggcgctcgcccgccgcacccgccccgcgacgcttgccgccttcgccgatcgcgtcgcgacgctgccgctcgtctatcagccgggcacgcgctggcattattcgatcggcctcgacgtcatgggccgcgtcatcgaggtggcgtccggcatgccgttcgaccgtttcgtccagcagcgcatcttcgaccccctcaagatgacgtcgagcttctggaccgtcccgccgcaggacgcatcgcggctcgccaccaattacggcttcgtcggcgatcagctgacgccgctcgatcccggcgcgacctcggtctggctgaagccgcccagcttcccgtacggcggcgccggcctcgtcatgtcggcgcgcgactacgaccgcttcctgcacatgctcaccgaccagggcagtctcgacggcgtccggatcatgaagcccgagacggtgcgcctcgccatgtccaacctgctgcccaccggcgtcaccttcggcggcgtcgcgggcaataccggcggcacgcgcgcggcgacgccgatgggctttggcgcgggcgggtcggtctatctcgccgacgggcccggcggtgtcccgtcgaagggcacgtacggctggggcggcgcggcgggcaccgtcgccttcgtcgatccggtcaagcgcatccgcggcacgatcatggtcaattacttccccgccgatcgctggccggtgcgcgagcagaccgtcgccgccttcgccggcgacctgacgcgcctgcgtccgtgagcatgcatcccgcgcccggcttcaccggcggcacgctcgatcgcgccgacacgctgcgccacgatcccgatgccttcgccgcgctgctcaccccggcggcgcggctgctgcggctcgacgggctgatgccggccatcgccgacgaccggctcgtctggggcagcatcgccgacgcgcccgacggcgccgatttcgccctcctcggcctcgacgccgcgggccgcgcgcatctcgccgcgatcccgccggcgggcgccgaagggcaggcgccgccgatgcgcaatccgcagctcgtcgcgatcctcggcgcgctcgcccccggcgaggcggcgacctacgccgccgcgcgcagcctcctcgactggcatgcgcgccaccgtttctgcccgcgctgcggcgcgacgacgcacgtcttccgcgccggctgggggcgcaaatgcgacgccgacggcaccgagcatttcccgcgcgtcgaccccgtcgtcatcatgattgccgagcatgacgggcgcgccctgctcggccgccagccgagcttcccgcccggccgctattccgcactcgccggtttcctcgagccgggcgaatcgatcgaggaagcggtcgcgcgcgagatcgcggaggaagccggcatcgcggtgcgcgacgtccgctacatcgccagccagccctggcccttcccgtcgtcgctgatgatcgcctgcgtcgcgaccgccgacgacgacgcgctgacgctcgaccgcaacgaattggaggatgcgatctgggtcccgcgcgccgacgtcgcccgcgcgctggcgggcgaacccggcgccttcctgccgccgccgccctacgcgatcgcgcatacgttgctcagcgtctgggcgggcgaagggaattgagcacggtgatcgccggacagtaaaaaggcggcgccgtagcgccgcccttatctggtgcagacatgactgcttgttagccgccagtaccgcgatctctgaagccccaggatcgcgcgaaggcacgctttcgtcaatccccatccccgccgcaccggcgacaattgcctccaaaaccgtgcaaattcccgtcgagcgattgccgcgccgggcttgctccggtgggcaaagactggtgtcctgcagccgttgccgggggatggacgatggtgtggcgtttgggactggatgtcggcacgaactcgctcggctgggcggcggtcgagctcgatgccgatacattgaagccaaagggcttcctgaaggcgggatcgcgcatcttcggcgcgggcatcgcgggggcggggcgcgatcccaagtcgggcgcctcgctcgccgtcgatcgccgcgcggcccgcgcgatgcgccgcggccgcgaccggttcaagcagcgccaggccgcgctgctcaagtacctgcaggcggacgggttcttcccttcggatcccgaggcgcgccgggcgctcgccaacaaggacccctatgcgttgcgcgcccgcgcgctcgacgaggaactgtcgctgcccgaaatcgggcgcgcgatcttccacctcaaccagcgccgcgggttccagtccaaccgcaaggcggatcgcaaggacgacgaggcgggcaaggttgcgatcggcatcgaccggctgcaagacaggatcgaggaggccggcgcgcgcaccttcggcgaattcctgcacctgcgccgcgaatccgccgagaatcgcaacgccatccccagcgtccgcacccgcctgcgtcccgaaacgggggagggggcgaagggcgacggctatgatttctacccaggccgcgcgctgatccaggcggagttcgaggcgatctggcacgcgcaggcgccacatcatcccgacacgatgacgcaggcggtgcacgactgcctgtacgagatcgtgttctggcagcgtccgctgaaaacgcccgcggtcggccgctgctcgctgcccccctatgccgaagagcgcctgcccaaggcgcatccgctgttccagcgccgccgtctgctcgaggaggtcaacgcgctgatgatcgtccgccccggcgaggcggccgtgcggctgacgcccgagcagcgcgacacactctaccggcgcctgaaggacaagccgaaggtttcgttcgagaaactgcgcaaggacctgaagctcgaccccgccgcacgcttcaacaaggaaagcgagcatcgcaccgaactgaagggcgacgaggtcgccgccgtcatgcaatcgaagcagcgcttcggcacgcgctggctgcatctctcgctggatcagcaatgggacgtgatcgcgcgccaacaggcggtcgaaagcgacgccgacgacgcggccttccgcgcctggctcgaggcggtgcacgcgctcacgcccgagcaggcgaaggcggtcgcgcgcgcgccgctgcccgccggttacgggcgtttcgggctcaccgcgacgaccaaactggtcgctgcactcgcggacggacgcacgcctgaggggcgcacgcccgatgccgcgccgatcgagccggaccgcgtcgtcgtctacagtgaggcggtcgtgatcgcaggctatggtcaccacagcgaccatcgcaccggcgagatattcactgacgcggcgggccgtcctgcgttgccctattacgccatcccgctcgaacgccatgtcatgcccggtaccgccgacccgcgcgaggcggatgacgccgtgcggcacggccggctgaccaatccgacggtgcacatcgcgctggggcaactgcgccaggtcgtcaaccgcctgatccgcgcctacggcccgccgcatgagattgcggtcgagctcgcccgcgagctgaagctgtccgacgacgacaagaagcagcgcaatctggaaaacacccgaaaccggcaggatgcggaaaagcggtcggagaaattgcgcgagatcggtcagcgcgacaccggcgccaatcgcgcgttgctcaaattgtgggaagagctgaaccccggcaacgtgctcgatcgccgctgcgtctacaccggcacgcagatttcgatcgacatgctgttttcgaacgacgtcgaggtcgatcacatactgccgttcaccgcgacgctcgacgattcgaacggcaacaagatcgtgtgcatgcgcagcgccaatcgcgataagcgcaagcgctccccctacgacgcctggggacatacccctctctggccggaaatcgccgaacgcgccgcgcgattgccgcgcaataaacgctggcgattcgaacccgacgcgatggagcgattcgagaaggaaggcggcttcctcgcccgccagttgatcgacacgcaatatctcggccggctggcgcgcgactatctgtcgtcgctctatcccgtgcgcggcgaggacagcgggcgtgtctgggtatcgccggggcgcctgaccgagatggtgcggcgaaagctcgggctcaacgatctgctcggcgaccataatctcggcgcggaccagccgaagaaccgcaaggatcaccgccatcacgcgatcgacgcggtcgtggtcgcgatcctcgatcgcgcgatgctgcaacggatcgcgtacgaatcggggcagggcgcgaccgatgccgacatgctgcgcatcctcgtgcccacgccgtgggagggtttccgcgacgatctcaaacggacggtcgacgctatcgtcgtcgcgcatcgtcccgaccatggcacggtgtcgaaggcgggcctgcccaagggcggagacaagaccgccgggcggctgcacaacgacaccgcctacggtctgaccggcgcgaccgatgcgaagggcaccgatctggtcgtccatcgcattccaatcggatcgctcaagaaggccgccgatatcgaacgcgttcgtgatcccctgctgcgcgacgcgttgtcggctttcaccgcaggcttttccggcaaggacttcgagcggcggattggtgagttccccgaattgggaccactggactaccggggtatccgccgcgtccgcatcatcgaaccgcttaccgtcatcccgatccgtgacgcggccggccgcgcctacaaggggtataagggcgactccaactatcgctacgacgtctgggaaatgcccgacggcaaatggcgcgcgacggtcgtgtcgatgttcgatgcgcatcagccgggcgagcggccccggccgcaccccgctgcgcgcaaggtactcagcctgcagcgtgacgacatgctcgcgatcgaccgtggcagcggccgcgaactggtgcgggtcgtcaaattctccgacaagcagttcgccgtcgcagcgcccaatgaaggcggcgcgctgaaggcgcgcgatgcggacggcgacgacccgttcaaatacagttatccgtcgcccaatacgctgaaggcgtggcaggcgcggcaggtgcgcgtcgatcagatcggccgcgtgctcgatcccggcttccctgcgcgcaagacggtgcgtccgacgcgcaaggctgcggaataggggcggcaccatggagcggatcgtcgatatcgccaccgacggccgccatctttcggcgcagcgcggctttctgatcgtggcggaggatcgggtcgaggtcgggcgcgtgccgctcgacgatgtcgccgcggtcatcgtccacgcgcacggcgtcacctggtcgaccaacctcgtcgtcgcgctcgccgaacgcggcgcgatcctgcttctgtgcgggcccaaccacacgcccgtcgcggtctgtctgccgatcgacggccatcatgcgcagaacgggcggatgcgcgcgcagtgggaggcgaagcggccgctcgccaagcaggtgtggaaggcgatcatcgtcgccaagatccgttggcagggcgcggtgctcgacgccaacggccatcatgcgggcgctttcgacctgctcgcgcggcgcgtcggctcgggcgatcccgacaatgtcgaggcgcaggcggcgcggcgctactgggggatgctgatgggcgccgatttccgccgcgatcgcgatgccggcggcgtcaacggcctgctcaactatggctatgcggtgatgcgcgcgatgtgcgcgcgggcgatcgtcgcggcggggctgcatccgtcgatcggcgtccaccacgccaatcgcggcaatcccttcgcgctcgccgacgatctgatcgaaccgttccgcccgctggtcgacgcgctcaccgtgcggctgcgcgcgcgcggcgtcgaggcggtcgggccggaggcgaagcgcgcttatgccgggctgatcgcgctcgatctgccgggggcggggggcatggtgacgaccgcctcgctcgccgcgacgcgcgcggcgcagacgctggcgctgtgtttccagagcggacgtgccgccgatctcgtcctgccgcagccgccctcggcgctcgagctggcggggctggacgcgctgctcggatgagcatcgcccaacctgcgctggcgagcgccacccaattgagcggctatcggctgatgtggattttcgtgatgttcgacctgcccgtgaccaccaaggcggaggcgcgcgcggcgacgaaattccgcgaatatctgctcgacgaggggttcgagaagagccagttttcggtctacgcgcgtttctgcagcggcaaggaggcgcaggaggcctatatgcggcgtatcgaggcgcatctgcccgacaagggcgaggtccatgtgctgagcttcaccgaccggcaatatgaaaacatcgtccgctacgccggccagacccgccgccgcccgcgcaggaaccccgaccagctggcgctgttctgacgatgcgcgacgccctttatgcccgccccgtcgccccgacccgcgccgccggcacctgcgcgccctctgcgggcggccgagggcacgcccccgccgcgcgtcccgccgccgctgctccaccctccggctgcgaacgtgctgtcgtgcggtcgcatgcccctgtcgctcgtcgcgccaccgcagcgccgtttggcggcagatgcactatcgtgctggcgcaagcagccgccgcacgtcgtgccgccgcccgcctgcgcgcgttggtgatcggcagcgcggaatgttctggccaccggatgcgccccgacgatcgaccggcggaccgcccgaacgtcgcgcccatgcctgccgccgcctcatcgcggcgcgtcctagacgccgccatcgtgccgcgaacccatgcaggccggctccgacccgacgatctaccagtacgcgcgcaaaaaatgcgcccctccggcgcattcccaccctgccagaacccgcttttttacaatggatgtcgagcaattctacctaaatccaggaggataactcgacatccatcataaccgctcagagatcgcggtccagcggcaacaagagacggggcttagcgtcgacaccattcatcataaccgctcagagatcgcggtccagcggcaacgactggttcgctgcggcgaatgcagcggcaatcataaccgctcagagatcgcggtccagcggcaactccttgaccttcaacatgacgttgacgtttatcataaccgctcagagatcgcggtccagcggcaacaatttccttcgccatgtttgacatgaagacatcataaccgctcagagatcgcggtccagcggcaacccttccttggccttgacggggccgaccgtatcataaccgctcagagatcgcggtccagcggcaaccttgtgaaaagcgggccaacgcccgcatgcatcataaccgctcagagatcgcggtccagcggcaacattgcgcgtgaccaccgaaaaccccgttagatcataaccgctcagagatcgcggtccagcggcaacattccattctgtccgccggtcgcacggtctatcataaccgctcagagatcgcggtccagcggcaacccacgtctatcgcaccggagcgtacttgttatcataaccgctcagagatcgcggtccagcggcaactgacgtgctgccgacgctgccggccgtggaatcataaccgctcagagatcgcggtccagcggcaacactggcaagacggacccgaacgatccggacatcataaccgctcagagatcgcggtccagcggcaacgcgatctgcgcgcgcttgtcgcggggcgagatcataaccgctcagagatcgcggtccagcggcaaccagcttcgctgtcgaacgccctacttgctgatcataaccgctcagagatcgcggtccagcggcaacgccctgacgggccgggctggcgggcttcgcatcataaccgctcagagatcgcggtccagcggcaacctgctgtaggacgccgcagcgatgcgcgagatcataaccgctcagagatcgcggtccagcggcaacatctcgggcggtttcagccgcacaatgacgatcataaccgctcagagatcgcggtccagcggcaacgtaacggtcgtcgtactgccgaacagcgaatcataaccgctcagagatcgcggtccagcggcaacgacgatcggctttgcgtcctcgctcacgacatcataaccgctcagagatcgcggtccagcggcaaccagtcgggcgggcgcgtccttatcggtcgcatcataaccgctcagagatcgcggtccagcggcaacggtagactgcccgagaaagttattgagcgcatcataaccgctcagagatcgcggtccagcggcaaccaggtgtgcgcgggtgagcggcgtgcccgcatcataaccgctcagagatcgcgatctagcggcaactgtggtccaggcggtgctacggaggcgcagatcataaccgctcagagatggtaattcatctcatgggcatcgcggccttcgtcaatgcaggcgataatcgccggaacgggcgatcgcgctccgcccgggccaatatgcggacgccttgcgcgggatgtcgtttgctttacgcagttcgccgccgcccatcgacggcgggtcacgctcgtgatcccgcgccagccgcaccgcccgttcgcagacctccgagcaaaacatattcgctgctttgctcatacggcgccttttcaggaattggagcctccggcaaactaggcgcggctcactgctatgcttgctttcgggctcgacccgaaattaacggccctgtcgtccgcatcgatcgaattactcgttccttcgagcaaaatcagtatcgaccccatatgaatttcgatgacaatgcataattccagacagcgccgaccaaaatccctatcatcgcagaacctgcagcgcctccgttcttaaaatcgtgaagaaaggcagcaatgccgatattggcgatcaatccgacagagcaaacaatgcaaaaagtgacccagccgtcaagtaatcgccgaaatcctttaagtcttcgttcgcggtaggttagggtgttgttgaggaagaagttgaaagtcatagcgctgaacgcacccagaatctgggcaaacaggaagcttgcgcccagttcgagcgcggtgccgagcacgcccatgtgcacgccgacgccgagcacgccgatgccggagaacatcgcgaagcgcaccggcacgacgtgcccgaacaagcggtcgtaaagcgcgatcagatattccatggcgacgacgtgatcgagcttgctctccccggcggtccgcacgcggaaggtgtagggcagctcggcaaagcgcagcggttcgggcgccgcggtcatcaggtcgagcaggatcttgaagccgatcgccgacagatcgggcgcgaggcgacggacgtggtccgtgcggatcgcgaagaagccgctcatcggatcggacagatcgcccttcagcacccggcgtgacagcttcgtcgcgaaggccgacttggcgacgcggtcgcgatcccagtcgccggtgccgccgcccgcgacgaagcgcgatccgacgacgacgtcgagttcggcatcgcgctgcagcaggtcgagcatcgcgggcagcaacgtctcgtcatgctgaaggtcgccatcgatcaccgcgacgacgggcgcggcggtggcgcacatcccttcgatacaggcggacgacaggccgcgccgaccgatccgctggatgacgcgcacgcgccggtcgagccgcgccagctcgcgcgccacatcggcggtgccgtcggggctgtcgtcgtcgacgaagatcgcttcccacgcgcgtcccgccagcgcctggtcgagcttcgccaccagcgtcggcacgttcgcgcgctcgttgaaggtcgggatgacgaccgcgatctcgagaaggtcgctcatagcgcggcgaggatcgcatccgccatcgcgcgcgtcgacagcgtgccgccgaggtccgccgtccgcgcaccgccgtcgagcgcacgtgccaccgccgcctcgacgcgctgcgccgatgcttcgtcgtccagcgaatggcgcagcagcatcgcggcggagaggatcgcggcacacggattggcgcgcccctgaccggcgatgtcgggggcggagccgtggatcggttcgtacatgccgttggcaccgctccatgcgctgagcgaggcactgggcagcatgccgatcgatccggcgcacatgctcgcctggtcggacaggatatcgccgaacagattgccggtgacgatgacgtcgaactgcgtcggcgcgcgcaccagctgcatcgcggcattgtcgacgtacatgtgcgtcagcgcgacctcgggatagtccgccgacagcgcgatgacgacgtccctccacacctgcgacgtttcgagcacgttcgccttgtcaaccgagcagagcttgcgcttccgccgcatcgcgatctcgaagccgacggtggcgatgcggcgcacttcgttttcgtcgtagcgcatcaggtcgtagccctcgcgcagccctgcgtcggtggtgcgctggcccttgtcgccgaaatagacgtcgccggtgagttcgcgcacgatgacgatgtcgaggccctcgaccacgtcgggcttgaggctggaggcgtgggtgagcgcggggaagatcgtcgcggggcggatgttcgcgaacaggccgagcgcgctgcgcaggccgagcagcgctgcctctgggcgcagatgccggtcgagcttctcgtagcgtggatcgccgatcgccccgaacaggatcgcatccgcgcggcgcgcgagcgccagcgtctcgggcggcaggggatggcccgcggcctcatagcccgcgccgccgaccggcgcttcctcgaacgtcaggtctagctccagcgcctcgagcacgcgccgcgcctcggccgtcacctcggggccgatgccgtcgccggcgaggattgctacgaggggcatggacgctttcctgtcacgcgattgctgtcgtcgcggcttcatggcgagggcgcagcgttcaggcaaccgccctttgcatcaggtcgacgagccgcgcgcgcgccgccattgcgtcgacgcggcggtcgacgagcaggtcgcgcgccaggaaatggccggtgatccgcaggccatcgaacacctcgggccagtccgcgctgccgccgtcgcgcaggaaggcgggcagcggaaacaggcggcgttcgtagcccgatgccgccccggcgcacaccgcgccgccgcttttcgggctgacgaaggccagatcgtcggatgcgccggtaacgatgcacgccgaaaggtctaggccgaaaccgagttcggcgagcagcagcagttcgtaacgcgccagcgccgccgcccagccacgtgcgctgggcgccgcctcgatcgcgtcgagcaggccggagagcgcatcatggacgcgtggatacggctgcgcctcgggcagtgcggcggcagtgaacgcggcgacccaggcgagcgcggcggcgggcagcggctgggaatgcaacgcggcgcggctgtgcagcggctcgacggtgagcgcggcgagctgttccccggtccgtgcgcgccattcgccgcggatggtgttggcgggttgcagaatcggtctcagtgcgcgcgatcgcccgccgcggacgtagccgggctggacgccgtcgtcgcgggtcagcgcgcggacgaccgcgccatgctcgccgtgaacacggacggcaaggaccagggcttcggcgacgcggtgcatcaggacaatataagcggtggtcggcggtgcgccatcgcgtgccggctaggggcgaggtgccggggtgagccgcgcgatgcgtccgtcggcgaaggtgctcgtcagctgcgtcgcggaggcgcgccacgacgcgggccgacgcatcctctgccagaacgacgcgccgtcccgctcggccggagacggccgacattgcaccaacgtccacggcatcccgaccgtggggttaaagcggaagcgtccgcgcgttccggtccggtcgctggaccagcggatcgcatcgccggcgaagctattgcagccggtgccgccgccgacccggtgatcggcgccgaagatgacatgcgtcgcctcgtcagggcgggtcccgaccgcccggccgtcgatttcgctgagaatccacgcgcgcttggcaagactgccggacggtacggcggccagtgcgggatcgccagccaaaagagcggcaaaggcgagaagatggcgggaggaaggcataggggaatcctgctggtttgaggccgatccgtcacgcgcgggaagtcgggtggtggcgctcgttggacgctgccgtcacgccccccggaacgtcatcgcgaataccgcaccgcgtccatccggcccggcggcgatcatcagcgtgccgtgatgcgcctccaccacgcgctggacgatcgacagaccgatgccatgaccctccgtacggggggcgtcgccgcggaagaagcgctcggtgaggcggtccgcctggtcgggggcgatgccctcgccgtcgtcgcgcaccgacaggcgcgcgccggggccgatcgtgacggtgatctgcgtgccgggcggcgtgtggcgtgcggcattgtcgacgaggttttcgagtgccagcgtcagcgggccggcaaagccgtgcagcgggatcgcgccgtgatcctccagcccgatcgtccgaccgccggcgaggacggcgggcgcgcgcgccgagacgacgtcttcggcgatcgcggcaaggtcgatgcgcgtgccggcatcctcgacgcgccgttcgaggtcggcgaggccgagcaactggccgacgacgcgcgaggcgcggtcgaggctgtcgagcagcgcgcggcgctggtcgtcgtccgcaaccttttccgcgcgcaatcgcacgatcgcgagcggggtgcgcagttcgtgggcgatgtcggcggcgaaggcggcctgcgcgcgaaagcccttttcgaggcggtcgagcgcggcattggtggcgatcgccaggggttcgacctccaggggcagggtaccgcgcggcagccgctggtcgatcgcacgcggcccgatccccgccgcgatcgcggacacggtccgcatccgccgcgtcagccgccgggtgagcagcgcgccgatcagcggcagcagcgcggcgaatggcaggagcaggagtgcgaaacgggtgaggaaggcgcggacgatatcgtcggtgacgacctgcggcgcatccgaatcctgcgacacgacgatccagccacggcggaacgggcggctgagcgcgcgcacgctgccgcggtggaagaacaccgtcccgcgggtcagcggcgcggcggcggcgatgccggggcgcggcgggccgtgaacgacgcgcgcgacgtggcgtgcgtcgagcaccgcgatcgacaggccgctgaccgggaggtcggtcgccgcgacgatcgtcgcgtcgggccgacgcgccagcacgcgctccgccgccgccgcctgctgcagcaacaggtcgtgctgataatggttggcagtgcggtgcagcagcaccgaaacgcccagcgacaggacggccgcggcgaccacgcccagcaggacgtggagcgcgatgaactgtccgaacagggaccgcggccagaagcgtcgcagtcgcgcggcgatcggcgggcgcgtcatgccgcctcgccggggcgatccgccacgatcatgtagccgacgccgcgcacggtttcgatccggaccccgccgccggcatcgcccagccgcttgcgcaggcggtggacgtagacttcgatcgcattggagccgagatcgccgccgacgccgaacagctgatcctccgccagccgcttgggaacgacgctgccctgccggcgcagcagcagttcgagcagctccgtctcgcgtgtcgacagcgtcagcaccgcgtcgccgatccgcgcgcgccgcgcggcgatgtcgaacgacagcgcgccgcagccgagcgtttctccgacatacccgccctggcgacgcagcaccgcgaggatgcgcgcatgcagctcatcggtgtcgaacggtttgacgagataatcgtccgcgccggcgttgagcccggcgatccgcgcctccaccgtcccgcgcgcggtgagcagcagcacggggcgcgtcatgccgcgcgcgcgcagcgaccggagcagcgcgagcccgtcgccatcgggcaggccgaggtcgagcagcaaggcatcgtgcgcgccggcatgcaggaacgccgcgccctcctccgtatcgcgtgcgaggtcgaccgtcatcccgcgccgctccagcgcgtcggtcagctcgcgggcgagatcgggatcgtcctcgaccagcaaaatccgcaaaacccggttgtcccttcccgcagcgcagcatccgtaagctacttgtaaggaagcgtccgtatcggggccagtcggatatcgtcaggaccgccgaatgcacgcttcttcccccgccgaaccgttgccccccacccggacgctgtcgcgcgcgcagcaggtgcgctggctgggcatcgtcgtcggcgtgctcgtcgggatcgcgatcctcgtcatgttgatcggcaagctgacgcatcacgagcccgccccgccaccgtcgaccccgccggggacgctgcgcctgacgccgcagcagatggcgtcgctgacgacgatgcgcgtcggcgtcgcggcgacgggcgatcggacgctggcgacgggcgcgatcaccgtcgacggaaaccattcgacgccggtcctcatgccctattccgggcaggtcgtccgcgtgctcgccgatgcggggcagcgcgtgcggcaggggcagccgctgctgctcatcaagaccagcgacttcgtcgatgcgcgcagcgggctgttttcggcgcgcgcggcgttccagaacgcacaggcgcagctcgtcgcggcgcagcggaccgcggatcgccagcagcagatgtaccagaccgcgggcggcgcgctgaaggattatcagcaggcgcgcgccgatctggtcgcggcgcaggcgagcgcgcggaccgcggcggccgcgctcggcgcggcgcgcgacaagctcgccattctcggcaagacgccgggcgagatcgcgcggctggagtcggtgggcgaagtatccggcatccacgacgtgacgacgctgc

SEQ ID NO: 3068 - DNA, 23318 bp, synthetic construct
  misc_feature 1..23318: note = Synthetic
  source 1..23318: mol_type = other DNA
ggcggtgatcccgcatctcggcgacggcggccgcatcgtctcgatcggctcgggactgggcgagcgggtgccgttcccgggcgtgacggcctatgcgatgtccaaggcggcgctgaccgctttcacccgcggcctctcgcgcgaactcggacccgacggcatcaccgtgaacctcgttcagcccggctcgaccgatacggatgcgaacccggccaatggcgatgccgccgatttccagcgcggcatgacctcgctggggcgctatggcgagccgcgcgaagtcgccaacgcggtggtgtttctcgcaagcccggcggcgagcgtgatcacgggggccgtactgacggcggatggcggcgcgctcgcctgaacggatccggccatcgcccgcgcgccagtctcccgtttccggcctcccgtttccggcgcggcgtgggcggggggcagcctgcgcgcgcgcatggaccttcgcgacgcgtccccgagtctagccgaggccggcagatcagtgtagccgggatatgagggccctgggccgagcgttttgcccgggccgttttcccgagtgaaggagcgaccgacataccacgcaaaccgaactatgacttcgagcggcgcgagcgcgaacgcgtcaaggcagccgaatccgcgaagaaggcgctggcgaaagcggagaagcgcgccgccgggcaggaaacgcccgatgcggatccgtcaggcgattgaccggcccgctgacccgatgacggcaacgtccggatccggtctcgcccagctcggctggaaacccttcttcagcgaacaggtttccgccgggccgggccaccattgcgcgcctgcccgcgtcgtgtcggttcatcgcggacgggtgaccgtctcgggcgaagggttcgcggactcgatctcgtccagcctgccggtgcgcggcggcgcggaggaccgaccgaccgtgggcgactggctgttgatcgatcgcgacagccggaccctcgtgcgcatcctcgatcgggcgagcctgctcaagcggcccgcgccgggcgacgaccgccgggtccagctcatcgccgcgaatgtcgacacgctgttcatcgtcacgtcctgcgaccaggatttcaacatttcgcggctcgaacgctatctcgtgctcgcgcgcgaggcgcgcgtccggccggtcatcatcctcacgaaagccgatctctcacccatgccggggagcttcgtcgatgcggcgcgcgcgctccagccggggttgcaggcggaactggtcgacgggcgcgatccggcgagcgccgcgcgcctcgccggatattgcggcttcggagagacggtcgcgctggtgggatcgtccggcgtcggcaagtcgacgctcgtcaacacgctcaagggatcggccagcatcgccacccagcccgtccgcgagggcgacggcaagggccagcacacgacaacggtccgcgagatgcatcgcctgtccgacggcgcggacggcggcggctggctggtggatacgcccggcatgcgcgagctgcagatgtcggatgtggcgtccggcgtaaccgaggtgttcgaggacgtcaccgccgtggcgctcgcgtgccggttcgcgaactgcacccacgccgacgagcccggatgcgccatccaggccgcgatggcggaagggagcctcgacccagcgcgcgtcggacggtggcgcaagctggccgaggaagatgccgtgaacagcggcgccgcagcggttcgccgctcccgcccggcaaaaggtggaaacaggagatgatgcgtggctgatctttaccttcgcgcgctggagtccgagcgcaagcgcctgtgggccgagtgccggctgaagggcctctcccggggcacgccggagcggctccggatcgaagagctcgatacgctgctggcggagcatcgggcgaaacgggctggctaggcggttccggggatgaacgggcgtccgccgctcggacaccgccgcgaactggggcccaagctcatcaccgtgaacctcgtccagcgcggatcgaccgacacggatgccaatccggcgcggacggcgacgccgccgatgtccagcgcgccctgacctcgctcggccgctacggcgaacccagcgaagaggcgagcgcggtggtggtcctcgcgagcccggcggcatgtgtgatcgcggggagcggtgctgacgggggatggcgccgccatcgccttaagaaaacctctacctaagcctgcgcaccgatcacccgcttcaggcggattcggcgcctcgtgggcgatgccgatcggtcgatcgtggccgtcgtcgatgcccgtaccggcgcattttgtatccctactgcgtcataaagatcggatattggattgaggcgcgagacagcagggacatcgagctaggcgcctgacgatggcggcggcgaggtggatgcggatggtggcgatggagtcatggacatggcgctgcggccgaacggggagcgccgcgcgggatataggctttgggaatgggaggtttttggcgggatagcggatggtggagggctgaggggggaatcgtctccatttgggagatgaggaatccgtaggcggcgatgcatagggtgacatggtggtggaagccgcgccatccgcggccttcatagtggccgaggccgcattgctgcttgagatcgagatagtcgcgctcgatgcgccagcgcagctttgtgaggcggacgagttcggtcgtggcgatgtcggctggcagggtggagagccagaagcgggcgggttcggggtcgccttgtggccattcgatcatgagccatagctcgggggaaggattggcgcgcaggccatcgccattggcacagcatagccgcaggaaagcgaagcgtccgccgagcggttcgctcgatccctggcgccaggtcacggtctgccacgcgctgtcgggcaactcgagcgcgagcgccttgacctgaaccggttgatgagcgtgcttgggcagcttctgctcaccaggccgagggccacggcggtgcgttctggagcgtggcggcggcgcctcgccggggcgccagacattggtgatggggcggatcgcgaccgcgtaggctaagcccagatcggtcacgccctggcggaaatcggcggcgccgccatagccggcatcggccagcacgacgcctggcggcaagccttgcgcgatcgccgccgcgagctgatcgagcgcgatcccggtcttggaccggaaggggatatcctcgggcaccctggccttgcgccgccgctcggcgtcgttcgcccaggcctccggcaggaacagccggtgcgcaaccggcaggctcgccgtctcggtcgccaacgacaggctgaccatcacctggcagttctcggtcttgccgagttgtccgcaatattgccgcgccacgccgaccgaatgcttccccttcttgggaaagcccgtgtcgtcgatgatccaggcctcgaccgggccgtcgcgctccaccaccggcagaacctgctcgcggacacacgccatcagcgcctcgtccgaccagcctccctgacccacgaaatgcagcagcgactggtgtttcgccgatacccgatcaggccgaaccaccgccgccagcggctccacgctcttgcgctccacgggaagcagcagtcccgtgcaataatccctcaacggttcggctcggtccgcatgcccgatcactttcacaagacgatcgacataagcgtcaaaacgcgcttcaatctcctccgtccagcgaccctccatcccgaccctccagctcagtttgaatcaccgagcctatcacatctgcgccggtaccgaatccccccttcttctgactcagtaggggtattatgtccccgaaactgtgcgtcgcttcggccggctggcgccacctcgctgatgaccagtttcggggcataatgctaactccagcgacgcgtgcaggcatttaaaaacagggtttgagttttatattgtgtccctgaaattcaccactaatttcggggacataatactaaactccggaccgcgctccaagctcaggactcgtcttgcccgtgatttgtattgcggcgccgacattcagagggaggagatccgcgcccgttggcatatggtcaactgccaagctgtagtggggccggtagccggagtgaccgatgatgggtgatgtggcgcagagatttgcgatgtttgtcgcgctggcggtccgtttgggtcaacgatatgctttgttcatcgcaatcttttccggccttatcgtcgtgaaactcgtgctgccggatgatgcgagcgattggctttcactgtcagtcagtcttcccgttacgctgatcgtgtttcagctgctctacaaatatggcgccaccagcaatcggcccggtcggcacaaatgatgctggcagttggaatggccgggcggagaacttgcgcttcaaggtcataatgcgaaacgttccagcgcagttaagccaccgccgccacgaacccctccgcatccaccccgcatcccgcaagatacgccagcacctccgcccgcgcagcgtgatagcgttcggccgcgtcgtcgcgctcggtggcggggcgggtgcggagatcggtccagctggtggtgagggtttgggcgagggtgatgaattcgggggctggtggcatcatcgcgggctccgtatcgaatggcagcgaatatatgaaaatcatattcaaacgtcaaccgcaacgcgcagtcgcgtccagatcggataggaaaattcctgcgatgttccttgcggaataggaaagcaaccgtcagaacaaaaagagaacaagggagtcgagtcgcccatgcgcgagctggagcgcgtcactttgcccgatccggaatgcgagggcggttgccagccctgctatctggattgcgcgatgtgccgcatcgtcatgatggcaaggcttcgcgaaatcgaagcgctgctgcgcgagcggccatcgcgatctgatccgaagagggctcagtggaaccttcggatggcagaagctgaagcgcatgtcgcaatgctagagccaaggcttcagcagctgacgccgacagcgggccgggcggcgccagcggcacaagtgcctgtaaaaccggggcgagcgcggctgcactgatcggcgcgggggcggggggagggctggtgcgcgcgccggccgcggccccctccgccgccccgtctcccgccgcgtccaggtcgaaggcggcgatcagcgccaccgcctcgtcatagcccagcttgcgccgccggccggttttcgccggattgtagagcgtggccacattgggctgcgccacgcccagcacgcgcgcgatttcggcctgggtcaccccgcgcgccttgagcagcgccaatatctcctgcgcggattgcatggccaagatctaccggcgccggtggcgatcgtccacccacagacgggcttgcatcgtatatacgataatcgtatatttcgactcatgctacagactcaccccccggccggcgccccgccggcgatgaacccgcggatggaggcgcgcgcccgcgcgctgctgttcgcgatgtccggcaccgccacggtgcgccagcttcgcgccgagggcttcggcgtcagtgtcgatgcgatccgccggctgcggcgcgagatggtggccgatggcagcgcccgccgcctcggcgcgcgcgccgacggcccaccggtcgaggacgaggccgatgacgaggaggagcatcccgcgcgctgggcggagcagggatcgcggctgctgctgctgcggatgctggaaaccgggcagcatgcgctggccgatcgcgccgcgttcgaggcggcctgcgcggcggcgggcctcgatccggccggcatcggcgcgggcagcgcgggcggcgcgcggtgagccgcggcggcggcgatgatgcgggcgcgctcgtcgccgcgctggtcgacgccgggctggcgccggcgctgctggcgcgcgtcgcgcggctgctcggccggctggacgcggcggacgccgcgctagccgccgccgcgatcgatccggtggcggagcgtcgccgggcctatgatcgcgaacggaagagcgcaggggcagggggcgggcgctccactggaattccggcggaccgcgccgcgccaccccccgataaagaaacgccccccacaccccccaaagaaattaaccccctcatcgaccccgctggcggtgcgccgcgtgcgcgccgccgcaccaccgcatcgcggctgccgccggactggcagcccgcgccgctcacccccggcaccatcgcccacgccaccgtcaacgcgtgggagccggggcggatcgagcgcgagctggcacgcttccgcgatcattatgccgccgcccccggcgaacgcgggctggcggcggactggcaggcgcgctggcgcacctggatcggcaacgcagaacaatgggaacagcatcgcaatgacaaccgcacgcgccatcggcccccgcgcgaacggccgcttcaccgatcttccgccggatccgccgccgctgccggtgacgatcccgccttcaacaacccgctgctgggcgccgtgcttgccgccgcggctgggcgcagcgctggagggggctgagcgattgttcgacctgccgctgccgacgcccgccgaacgcggcgcgctggcccgcgccatcgccgagatcgaggcggcggggcggggcgcgccggtggccgcgatcgacatcgccatcggcaagctcgcgctcgccttcccgccggtgaagcagagcgaggccgccgccaccgcgcggctggcgctctatcgcgaggcgctggccgacctgccggcggacatattggcggaggcggtcgccgcctgcatccgccgctgccgcttcttccccaccgtcgccgagattcgggagggcgcgcgcggcccgctggcgctgcgcgaatggcagctcgggcggctcaggatgctggcgtggcggcatgaccgggaatttcgaggagagaagcaatgaccagtatcgcaggccatgccgggctgaccgggctgtcgtggaacgaactgaccatctaccgcgcgctggcggaggccgcggcggcgggggcgcaatgccccaatgccgatgcgctcggcgcgctgatccgctgcgcctcgcccagcaccacgcccaccatcgtcggccggctggagcgcaaggggctgatccgcgtcgagcgctaccagcgcagccgccgcgtgcagatcgtcgcgacgggggcgtggacggcggaaccgcccaaccagtccccccactggcgcgagcggcccaaggcgggcgtgccggcgccggcgcgcacggtggtggcgacgcaccagccgacggtggcggccgagatcgcggcgtgggcgcagaagcgcggcgtctcactggcggacgcgctgtgcgacctggtgttcgtgggatggcaggtggaacaggagcgtgggtgagggggcgcttgttggtagcccctccccttcaggggaggggttggggtgggggcgagcgaagcgagcttccgcggcagcggaaaaagcgtcgccgggggcatcgagcccccgccgacgctgctccaccccttccccctcctctgaagaggaggggctgaagaagggcaaggaaggggaggggcagaacaagctcccccgccgctatgaccgcgccgccgtcatcccgcgcatcttcgcggaggtcgccaccggccgctcgctctccgcggtgctgcgcgccggtgccgagcggatgcccgccgagcgcaccttctggggctggtacatggaggacgaggccgtccgcaccggcctcgcccgcgcgcgcgcggcgggggcggaggcgatgctcgaccaggcgctcgacatcgccgacggcgtcaccgagacgggcaaggacgccgcggaagcggtcgcacgctccaagctgcgcatcgacacgcggctgcgctacgcccagctcgtcgccccgcgccgctatgccggccgcgatgacggcggcgccacccccgaagacccgcccgagccgatcgacgaggtgctggcgctcacccgcctcgcagcccttgccgatgcgctgcagcgccggctgggggccaaggaaccatgcgacgcggaggaatgagctgatgatccccagcaccccggccgaatgggagcggctgctcgccatcgcctcgcccgcggaacgcgccgagatcgaggcgatcctcgcggcggacctgcgcgacatgccctggcgcccgcaggtggggcggcaggccgaatgcgcgcagagcgcggcgttcgtcaccggctatggcggcgcggcgggcggcggcaagaccgatctcatcgccggcctcgcgctcacccgccaccgccgcagcgtgatcttccggcgcgagaagatccagaccgagggcgtcatccagcgcctcgccgaactgctcggctccaccgccgggcacaacggccagaagggggtgtggcggctgcccggcggcggcatggtggaattcggcgggctcgacgcgcccgacgatcaccgcaaatggcagggccgcccgcacgacctgaaggcctatgacgaggtgaccgagatgcgcgaggcgcaggtgcgcttcaccatgggctgggcgcgatcggcggacccggcgcagcgctgccgcgtgctgatgacgttcaacccgcccaccaccagcgagggccgctgggtgatcgactatttcgcgccctggctcgatcccaaccacccgcgccccgccgggccgggcgagctgcgctggttcaccacgctgggtgggcgcgacgtggaggcggcgggccccgagccgttcgtgctgttccggggcgaaccgctgaccgatttcgatccggccgaattcccgcccgagaaagtgatcgtgccgctcagccgcaccttcatccccagccgcgtgaccgacaattatttctacgtgaagtcgggctatctcaacacgttgcaggcgctgcccgagccgctgcggacgcagatgctgcagggcgatttcgccgccggcgtggcggacgacccgtgggcggtgatcccggcgagctgggtggatgcggcgatggcgcgctggcgcgccggccctgcggccccgcccggcgcgatggacagcctcggcgccgacatcgccgccggtggccgcgacgacatggtgatcgcgcgccgccacggcgcctggttcgacgtgccgatcatcatccccggccgcgacatcccgcaggaccgcgccggcccggaagccgccgcgcgggtgatcatggcccggcgcgaccgcgcggtggtgcatgcggacgtcgtcggctggggcctttcctgcgtcaatttcctgagcgccaacgacgtgcaggtggtgccggtgaacttcgcccgcgccagccgggaacgcaccgcggacggccgcctggccttcgccaacctgcgcgccgaaaccctctggcgcctgcgcgaaaccctcgatcccaccgccgccacccccgccgcactccccccacacccccagttgcgtgcagacctcaccagctaccgctgggacctgcgcccgaccggcatcttcatcgaacccaaggaagcgcagaagacgcggctgggacgatcgccggacttcggcgacgcctatgcgatggccaacatggcgaccttgaagacggagacctggaaagaactgcgcgcggcggcgaagggcggggaccgctatgcggagctggagtgagctgaaagcagcgattgccgcacgccccgaggggaggggggatggtttggcgcctgtctcaacattccgggcaaacaaaaaaggcggcgccggagcgccgcccttatctggtgcagactggctgcttgttaaccgccagaccacgatctctgaagtgctcaggctagctgttcgaggtcgccggtcaagccctgatgacgaaatctcatcgggtttggagtgaatccaggcttgccccgcccgccgaaccctgatcggttccccgcattgggggaggatggatatggcgtggcggctcgggctcgatcttggcaccaattcgcttggctgggcggcgctgtcgctcgatgcggcgggggcgccggatgccattctggcagccggatcgcgcatcttcggtgatggccgcgatccgcagtcgggcacgtcgctggcggtggatcgccgcgcggcgcgggcggcgcggcggcggcgggaccggttcaagcaaaggcagcgcgcgctgctgaagcatctcgaggcggacgggctgttccccgccgatcccgaggtgcagcaggcgctggccgcgctcgatccctatgcgttgcgcgcgcgggcgctggacgaggcgctgagcctgcatgagatcggccgggcgctgttccacctcaaccagcggcggggcttccagtccaaccgcaaggcggatcgcggcaaggatgaggatgcgggcaagatcgcgatcggcgtcgatcggctgaaggatgccatcgcggcggcgggcgcgcggacgttcggcgaattcctccgccagcgccgtgcgggcgccaccggcgagaatcagatacccagcgtgcggacgcggctgcgcgccgagacgggcgagggggcgaagggcagcggctatgatttctatcccagccgcgcgctgctgaaagacgagttcgacgcgatctggcatgcgcaggcggagcatcatcccaaggtgctgaccgacgaggcctatcaccgcctccacgagatcgtcttccgccagcgcccgttgagggcgccgaaggtgggcgcctgcaccctggtgccgggcgaagcgcggctgcccaaggcgcacccgctgttccagcgccgccggctgcttgaggaactgaacgcgctgatgatcgtccgcgccggcgcggtcgcggaacggctgacgccggagcagcgcgacctgctgctgctcaagctgaaggacaagggtaaggtcacgttcaagagcctgcgcgagaaggtgctgaagctggacggcgatgcgcgttttaacaaggaaagcgagcaccgcaccgagttgaagggcgatgaggtcgccgcggaaatgggcggcaagacgcgcttcggctccttgtggccgcacctttccacggagcagcaatggacggtgatcgagcggcagcaggcgctggagagcgatgccgacgaggcggcgttccgcacctggctggtcgagacgcacaagctgacagccgagcaggcgagggcggtggcgggcgcgcggctgcccgctgggcatggccgcttcgggctcaccgccaccgcggccctgctcgccgcgttgcgcgatggccgcacgcccgaggggcgcggcccgaatgcgcccgcgaccgaagcgggccgggtggtggtctatagcgaggcggcggcgatcgccggctatcatcacagcgatcaccgcagtggcgaggtcttcacggacgccaagggccgcccggccttgccctattatggcgtgccgctggatcggcatatcgtgccgggcaccgcagaccccgacgagccggatgaggcggcgcgcatcggccggctgaccaacccgaccgtgcatatcgcgctcaaccaactccgtcgcgtcgtcaaccggctgatccgcgtctatggcccgcccgccgaggtcgcgctggaactggcgcgcgaactcaagctgtccgaggatgagaagaaggagcgcaaccgggagaacagccgcaaccgcctcgatgccgagaagcggtcctccaagctcgccgaactcggccagcgcgacaatggcggcaaccgcgcgctgctcaagctgtgggaggaactgaaccccgagaatatcctcgatcggcgctgcatctattcggggcggcagatctcgatcggcatgatcttctcgggcgcggcggaggtggaccatatcctgcctttcgacgccacgctggatgattccaacgccaacaagatcctctgcctgcgcgaggccaatcgcgacaagcgcaagcgatccccgttcgaggcgtggggcggcaccccgcaatgggaagagatcgccgagcgcgcttcccgcctgccgcgcaacaagcgctggcggttcgagcccgacgcgatggagcgcttcgccgaggagggcggcttcctcgcccgccatctcgtcgacacgcaatatctcggccggatcgctcatgactatctgcgctgcctctatcccgacaagggagacggcagcagccatgtgtgggtttcgccaggccggctgaccgagatggtgcgccgcaagctggggctgaacggtctgctcggcgaccataatctcggcgccgaacagcccaagaaccgcaaggatcatcgccaccacgcgatcgacgcggtcgtcactgcgatcctcgatcgctcgatgctccagcgtatccagcgggcttcgggcgagggggcgagcgatgccgagctgctgcgcatcatcgtgcccgaaccctggacggggtttcgggacgacctgcaacgcgcggttgaccgcatcgtcgtggcgcaccgtgcggaccatggcacggtggccaaggccgcgacgcggggacgggaccagaccgcggcccggctgcacaacgatactgcctacggcttcaccggcgaggcggatgccaagggcacgccgattgtggtccatcgggcgccgctgggggcgctcaaaaagcccgagcatatcgatcaggtgcgcgatccgctgctgcgcgcggcattgcacgatttcacggcggggctgagcggcaagcctttcgaggatcgcatcgccgccttcccccggcttgggccgctcgactatcgcggcatccgccgggtgcgcgtggtggagccgctgcaggtgatcccgatccgcgacgccgccggccgcgcctacaagggctataaaggcgattccaactatcgctacgatgtgtgggaactgcccgacggtaaatgggagcagcgtgtgctgcaaatgtactacgcgcatcagtccggcgagccaccgcgcccgcatccagcggcgcgcaaggttctgagcctgcaccgggacgatgtgctcgcgatcgagcgaggggagggggggcgagaactcgtccgcgtcgtgaaattctcgaccaatgagttcacgctagcgccgctgaatgagggcggggcgctgaagtcgcgtcatgcggacaagggagatccgttcagatatctttatccctcaccctcgactttgaaagcgtggcgcgcacgggaggtgcgcgtggacgaactcggccgggtgctcgatcccggcttccccgcgcgcaagcggcggcgggtcacgcggcccggccgcgcggacgcggattgagacgcggcggcgatggaacggatcgtcgacatcgccaccgatggccgccacctctcggcgcatcgcggcttcctgatcgtggcggaggatcgcaccgaggtgggccgcgtgccgttggacgatatcgccgcggtgatcgtccatgcgcacggcgtcacctggtcgaccaatctgatcgtcgcgctggcggagcgcggcgcggtgatgctgctatgcggcagcaaccaccacccggccgcgatctgcctgccgatcgacggccatcatgcgcagaacggccggatgcgcgcgcagtgggaggcgaagcggccgctggcgaagcaactctggcgttcggtgatcgtcgccaagatccgctggcagggcgcagtgctggaagccaacggccgcaccgccggcgccttcgatctgctcgcgcgcaaggtgggatcgggtgatcccgacaatgtcgaggcgcaggcggcgcggcgctattggggcctgctgatgggcgatgatttccggcgcgaccgggaagcgggcggaaccaatgcgcagctcaattatggctatgcggtgatgcgggcgatgtgcgcccgcgcggtggtggcggccgggctgcatccttcgatcggcatccaccacgccaatcgcgggaatgccttcgcgctggcggacgacctcatcgaaccgttccggccgctggtcgatgcgctgacggtgcggctgaacgcggcgggcatcgccgaggtgacgccggcggcgaagcgcgcctttgcgggcctgatcgcgctcgatctgccgggagcgggcgggtgaccacgaccgtttcgatcgccgccacgcgtgccgcgcaaacgctcgccaaatccttccagagcggccgcgccgccgatctcgtgctgccgcaaccaccctcggcgcttgaactcgccgggctcgacgcactgatgcgatgagcgctagccaattgagcggatatcggctgatgtggatcttcgtgatgttcgatctgccggtggggaccaaggcgcagatgcgcgccgccaccaagtttcgcgaatatctgctcgacgaggggttcgagaaaagccagttctcggtctatgcccgcttctgcaacggcaaggagcagttcgaagcctatatgcggcggatcgaggcgaacctgcccgacaagggcgacgttcacatcctgagcttcacggacaagcaatatgagaatatcatacgctatgccggccagcgccgccggcggacgcgaaaaaatccggaccagctcgcgctgttctgaggagattcgaggatgttcctgctatgccgaccggcgattatctcttgcgtttgcaaagggataatcgccggtcgaccatagctgttcagagatcgcggtccagcggcaacagcgcggcatcgccaccgtctatttcgccgaccatagctgttcagagatcgcggtccagcggcaacagcgcggcatcgccaccgtctatttggccgaccatagctgttcagagatcgcggtccagcggcaacagcgcggcatcgccaccgtctatttggccgaccatagctgttcagagatcgcggtccagcggcaacagcgcggcatcgccaccgtctatttcgccgaccatagctgttcagagatcgcggtccagcggcaactgctcgcttgcgttggcgttatcacctttaccatagctgttcagagatcgcggtccagcggcaacaggtgggtgaggcgatcatcaagaagcgcgaccatagctgttcagagatcgcggtccagcggcaacaagacgaacccgtgagcatcatggtcctccaccatagctgttcagagatcgcggtccagcggcaacatgtggcataaggtgcgggctgcgggacggaccatagctgttcagagatcgcggtccagcggcaacacagcacgaaccacagtctttgccacccgcaccatagctgttcagagatcgcggtccagcggcaacccggaagcctgcggagcgccgcgcttcggcaccatagctgttcagagatcgcggtccagcggcaacattcggcaccgaggctgatcttgtcgtccaaccatagctgttcagagatcgcggtccagcggcaaccggtgacgagggcgagtgggatggcgtcaagaccatagctgttcagagatcgcggtccagcggcaacttcgatagctgcgcgcattacgacgccaagaccatagctgttcagagatcgcggtccagcggcaacgcagttcgctctcactggtcatgggtggtgtaccatagctgttcagagatcgcggtccagcggcaacgtcaccgcggcacaggcgttgcgcagcccaaccatagctgttcagagatcgcggtccagcggcaacgatcctcgagccgagcatcgcccaggcagaaccatagctgttcagagatcgcggtccagcggcaactcccgctcatgcagcaggacacctcgcagaccatagctgttcagagatcgcggtccagcgcaacgagatgatcctcgtcacgacaatgcggcgcgcccatccgcgcggaccatgggttcggtcggctttcgccatcgccgccacccccgcgaaacccccacctacccaagcccgtcgaaatgtccgatcatgttcttatgatagagggggaaatcgagaaggctgcggccgccttcggctgttcgctggaaaccgcgcgggcggtgatggtgcaggcgcggtgtcaggcgcatgcggcgcggaccatattggtgcggcagggggagcgggcggaggaggtgatcctcatgctgttcgggcgcgcgcgcgcggtgatggtgacgatggacgggcgctcgttccggctgggcgactacaaggccggcgacctgttcggcgcggtcgagcgcggggcgagccagcgcgccgacgtgaccgcgaccgaagcgaccgagaccgcgcggttccacgcgccggtcttcttcgaactggcggagcggcacaattgcgtggcgctcaccctctcgcgctcgctgctgcggcagatcgcgcatctgtcggacctgctcggcgcgcgggtcagcctgtcggcggcggggcgggtctatgcggagctcgcgcggctggcggatgcgggcggggccgccgccgggatcggggcgggcggcgtacagcgcgtcagcccgctgccgtcggtcaccgaactcgcatcgcgcgcgcagaccacgcgcgagaccgcctcgcgggcgctgagcgcgctggagcggcgccagatcgtcacccggcgcggcaccgcgctggatatcgtctcgcggcggcggctggacgagctgatcgtgtgagctgatcgtgtgactggcgcccgtggcgtcaggcgcccggcgccatcacgctgtacagctccatatcctcgcgatcggcgctgccgggaagttcgccgatgaattccatccgcgcgccctcgctgcccacgccgcgggcggcggcggcgaaggtaccgctggcgaggagggtgtcggggccggcgagctcggcgatgcgttcggcgaactcgaaggcggggccggcgaggatcgtgtccgtgcccggcgtggcgccgatgcccgtgctaccgatccccgtgcccccgatttcggtcacgatgccgatgtgcagccccagccgcaccggcccgggcgcggcggcgcgcagcgcgaggccggtgcgcagcgcctcggcgggatcgcgccaggcgagcagcagccggctcgacgaccagcgcggcggtgccgccggcggcgcggcggcaagcaggggggcggccgccgccagcagcgcgtccgcgccggccagcgcggcgaggcgcggcgcatcctgcgcgccaggcaccaccgcgaggatcgcgacgaggtggaggcggtcggcgggcggtgccaccgggctgtcggtgcgcgcgctggcgatgatgtgctggcggcggccggcacggcgccacagcccggcgctgcgcgcgctctggccgggcgacggcggctggcccggcgggcaggcgacggggccgatcaccagctgcaccgcctccgactggagcgccgccgcgttcatcaccgcgcggccggtggcgacgaggtcggtcagccccaccagcagcgcgaagccgccgtcgccggcatccttcgcctcgtcgacgatgatggtctgggccgccgcgtccagcgcgcggtcgaagcggcgcacccactgttcgccatgcgggcgcaccgatcgctcgacgaaaccggcgacgtcgagcggcaatatcaggttgagttcggcgccgcgcgccagcagccgttcggcgacgatgatgtccgcccccgccgcaagcgcgccatagccgaagccgatgccctccgccgcgaggatgcggtcgatccgcggcacgatctcggcctcgggcaggctcagcgcgaggtggccggtataatggaggctgcgcggcgggcgcagcggatcgagccagccggcgtcgccgccgcgttcgcgcaatatcgcggcgaactggcgcaatgtggaggcatgatcctcccacgcttgcggcgccgcggcgatcgcgcgggtcagcgccgccttcgcgccggcctcgtcgcccttcagcagcagcgcttccgcctcggtggcggtgagccaatagggcgtctcgtcgggcaccccctgcgcgatcaggctcagcgcctcgtccgcgcggctcaccgattccgcgcggtcgccggcgatcagcgcgagggtcgcggcgttgatcagcgggtagggggcgggctggcgcgcggcggatgcggcataggcatcccccgcgcgccgcgccttttcccgccgcgcggcgccgcctgccagcagcgcctcgtccttcagcagccgccccttgaggttgaggatggccgggtcgtcgtcgatcccgtcgaaccccgccgcgcggaacatctgccaggcatggtcgagcgcgccgctacgcgccgttgcgatgatgcggaagatggcggggctggacgcggtcatgctctatcctcgcagcgagaggtgcggcttctggcggacgcggacgcggacggggcgcggcgatcagatcggttcggggatcaactgcgcgccgggatatcgcacgcccggatcgaagatcaccggcaggcgccccgtgggcgacgggctccccggcgaaacgtcctggatcaggtcgatattatagtcgaccaagtcatgatactgggtggtgccgatgggcggcttcaccttcaccgcgaagcgcgcatagacgcaatccgggatgggcgtcacgctgccctggcccgccgcgtcgtaatgcatgatgccgccatagcgcagcgccggaaacttcttcaggtcgaatgccggcaccgtgtcgctgaagcgcatgttcaccagttcgtggaagccgatatagacccagctgtcgccgttcagcacgatatccagcggctcttcgcccagcgtgggtttcgccgtcgccggcctggtgagcatgaaggcgtgcgcgtccgcctctgccgcgaagatctgcccggtgaaatattcgaaggcgaggctgaccggggtcgaagccgcgccgatcgtcaggcagatatggtcgggcgtcgcgctgaacccggtgggcagcgcggcggaaatgggaatgtcggtcattcaattgtccccttggtcgtcaaatccgatagcaggcgttcgacatgcttgccgcgattggcccagatcgcgttggcgggatcgaacgcgcgcatctcggtgatgaccgtgcgcgcgcggagcagccgcgcccgcgcctcggccgcgcgacccgtctgcgcctctatcctggcgacgctgaatgccgtcacgaccgcaatctcgcgcaggtccatgttgcgcgggtcgtcggcgagcaagcggtcggtgatctgcgcctgcgcgagatagtgcgcctcggcttccttcggatcgcccgccatcagcagcgcgcccgccagccacgcgtgataattgcccacctgcaccatcaccgggtcgaccttgtcggccggggtgcggcgcgcggcatcctgcatcagttcgagcgcgctgcggcagatggcgacgcgcgcctgcgccgcggccttcttgtcctcatggctcaacgtgcacagattgccgtccgcataggcggcctcctgccgataggtcgggttcgcgggatcgatcgcgacgagccgctgcgcgagccggcgataggcctcgaaataggcgcgcgcggttcgcaggtcactacgctggagcgctgcgaagcccagccagaattcgctctgggcgtggccgaagatgcggtccctgtcgtcgggcgcgcgcgccagcagcgccgcggtggcgcggtgcgcctcgcgccatttgggcaccgcgcggtcgagatgccccgcccggtcctcgtcggcgcccatcaggtggagcagccgcgcgcgccgctcgatcgaatcgacgggcagcgcatccagatcctgcgcggcataataggcatgcgcgcgatcgttgacggtgccgagcacgtcgagccggccgacgccttccagcttgccgcgcagatcggtcagcatgaattccaccaggccctccgcgcggtcgcgctccgcactggcctgacgcttcgcgtcaaacgccaccaccgcgaccgccgcgaaaataagcatgccgagcagcgcaagcagcgtgacggctatcacgcggcgcagccggcgctgcgcatcgcgccgcaccagcgcatccagcggcaccccggcaatgccggcgacgagcttgagcagcccgtagcgcgcgccgtcgccggccgggttgaaatccgccgcgatcggctcgccatcgccgaacaggtcggccaggcaggatggatcggcgcccggcaccagcgccgccaggatcgggcggccgggggcgacctcctggaacatctcgatctcgcgccgcacccagcgtgactgcgccgcggcgggggagcacaggatgatcaggctggcggcctgggtgagcgcgcggccgacctcttcgctgaggtcggccgcggcgggaagctcttcgcggtcgcgaaagatcggcgccagcgtgggcggcagcgggccgagcgcggtgggccggccgacgatcgccctgggaatgcgccaggtttccagccgccggtggagccgcgcggcaaatcgcgcatccctatggctgtagctgagaaacgcgcgatagcgcgtgccgatcacggcccgagatgcgtccatttctgccacccccccgagcgcgttctgcaatgcggtggcacgctctcaggaatcgtaccgcgatgcaatggatatgcgtgcgcgtgacggccgtcacgcgcaaagccggctgcgaatcgccagatggtctgcaccgcatcggggcgaaaggccgtgcccgaccggggagatggggagaatcatgataccgtccgacttgacgcgcgaggaagaagccgggttgcgatcggtgctgcaatcgctgggtttgcgcaccgatggcgacatcgagaccgtggttgcggcggcgctgcccgaattgttcggacgatattggccgatcgcgcgacggatactggaagcgatcatcggcatcccgatgattccgcaaggcgtgcaggactggctgaccggcttgacgcgctttctcgacatgatgtcgaagctgatccgccgcggaccgacgcattgaacgcataaaccgtcggcccttgtccgtggggacgggacggggccgtggttttcgtggggggggcgtgcacggcagcgtgcgatcgccggggtccggagccccgggggagcgccgcgccgtgccgcctcttcaccccgtttcggggtgtgcccggagcgcccgtggcgttgcggtacgtgagaccagaccgtaccgaaacgccgcgtgccaatgggagggtgggtaaggggatctcggtttcccctctccggcgagcagacgccggggaggggaaattgcgtcgttccgatggttgttttcgccgcggtgtcgcaccggatttgcggcgatggccaccagaccatcggtcatcccggctcgagaccgggatgacctggaatggggcatgtccgacgtcaggcccgcggagacgcgatgacgaccctgacgcgatgacgatcctacagcgtgaccttgcgcggttcgctggtttccgcggcgtcggggccgcgcaccttggcggcggtcatcagcgcaggtgcgctcttgaggacgccgccgaggccattcacctgcaggccaagcagcgaccccgcggtcttgagcgagccgacgcgcgagatcgtctccggattggcgctggcgctgccgaccatgccgcgggcctggccggcaagcttcacgtcgcgcgcgaggccgatcaggaggttgccgaccgccaccgagatcagatccttctgcttcttgtccgacgcctggtaggccgccgaaacgtccgccgacagatccttgcgttcgttgaggacggccatgtccttcttgaactcggcggtgtgcgcgttgagttcgccgatcgactgcgcgttctgcagcgcgtcgatctgcgccttgcggctcaccatctgggtgcggtcggtcaccgcctgcgcgagcagcgcggcggagatcatgacgttcttggtggagagcgtggcgttctgcaggaagccgtccggatcggcggcggcgctgctgccggagccgccgatgcccagcttttccttggcggcgcccagcgggttgaagccgccgaactgcgcgaagccctgcgcgggcagcgagagcgccagggtggcggcaagcatcaatatggttttcttcacgaaaataccccttcgttgcagatgatcagttgacgggcttgagggcggcggcggcgctgatcgcaagcggcagcgcgttggccatgagatcctgttcgagcattgcggagcggctgggcgcgggcgtgcccgccggcacctcggtgggcgagagcatcgcctccagcccttgccccgcgaccttggtggcgccgcgcatcagcgtgtagcccacggtcatgccatattgcgcgccgcccttgccgcggccgggatcgaaggcgatcaccgggcggaagcattgatcggtggtgaccggctgcgccggcgcgaagctgtcccaccccgcgaaatcggtgcggtagcgcgcgagcagcccgggcaggccggcgatccgtaccggcgcggcgaactggcccgcgaacgcgctttcggcggcgatcgaccaccagcccgccgccaccgatccgcgatcgtcgacgggggcggcgcactgcaccagcgcgcggcgcgcgagcagcggcttgcccgcctggtcgatcgccacgacatccttcgcgcgcagcgagatcttcgcggcatcggcgttgaccgcgatcagcccgccctccgccagctcaacggtgcggacgaggccgaccggcgcgaacaccggcccctcgatgccgggcttgcgcccctcgttgcgcagcacgacgagctgtgcgccgagcggcagcgcgccgcccttgtcggcgatgaggatgcggtcggcgccggccgtggcgatcggcagctgcagcggctgcggcttgaacctcgccagcttggcggcggcatcgatcagcgcgttgcgcaccaccgtgtcacggcgctggtcgggcgagaagcgggtgtcgccggaaatctggtcggtgatcagcccggtgccatgcgccgaatagacgacgcggcccgagcgatcgacgagatcgacgaacgcatccgcctggtgccgctcgatggtgacgccggggatgttgctggcgaacaccgcggaaggcagcggcaccaccgagacgcgcgcgacataatcgggcagcgcgcgctggcggccggcctcggcacccgcttcgcccaccgccgccgcgcgcagccgcgcaaagccgggggcgacgggcatcggcgcgaagccgccgccggcgcccagcgcatcctgcaggatctcggtgaggtagaggcggccatagccgcgcggcatccgatcgaccgc

SEQ ID NO: 3069 - DNA, 23318 bp, synthetic construct
  source 1..23318: mol_type = other DNA
  misc_feature 1..23318: note = Synthetic
tcggggtcggcgatgatgtggacgcgctgcatcactgcgcgccgttcctcgtccataatccggtcgatatgcaaatcttgcaggaaaaagccgccggtgatcgccgccgtcgcgatcgtatagggggcactgaacatcgcttcaggaacgctgcgcgggttccatttcgccgccgccggctcgaatgtcatgcgcgcgctgttgctgccgatgcaatcgatccggtcgatgtcgcgccagtccagcccttcgccctgcatgatggcgaccgtgctggcgatgaagctgtgggtgaatttgcacgcggaatagggcttcatcgataacccttcggccagttgccagcggatgcccaaatcctcggtcagcaattcggggcgcacatcgtcccaggcgacatgccgcaaaatgccgcttggcacgccctgaaatatgccgcgcggtgccgtcacgccgcgccgcgtcagcagcgccgccttgaccgccgtgtcgcccgcaaagctgtgctgcacgcgggccatctgcgtgccttcggaatatttattatattccgacataccatggaccgtataggccatgcccatcgcattccatatctcgtcggcgttcaggcccaggatgcgcgcaaccgatgcggcggcgcagagcggcccgttccattcgcccggcataccccaggtcgtgtgataacgcaccagattgagcgccgcgctggcgcgcacgcccacttccgcgccggtgacataggcggtcaggaaatcgcggccgctgaccggcctatcggcgatcccaagcacggatagcatggctggcacattccattcggtgacatggccgcccgtctcatgcacgtcgcccatgtcgatggcgcgggccatcacgccgttggcgaaagccgccatgggcgccggcaccctatgcccatggatcagcacggtcgcctgcggcgccccgccccattccgccacctgatcggcgatggcggggctgatctcccagcccgaccctgcgatcgtcaccgccagcgtgtcgaggatcgcccgcttggcgagatcgatcacgccagccggcaggtccgcgtagcgcgtatccgcgaccatgtgcgccagcgcgccggcgggatcatgctcgggcagaacgggattttcgtgcttcatgctgtcatcatcgccgcgatactcggcagttcctgccgatcggggtccagaccggtggccgcaaaccatgtgcgttcgcgcaacgcctgcttctcgccatagtccagcaccgcttcccagacggctggcgccagcgccaccttgccatcttcgcctaggatgatgcggtcgatcaggccgcccaacgcgacgatggcatgttcgaccgctgccaaaccctggccttccaccgccttggccgatgcgatcgcctgcgccagttcttcggcatagcctggatcaaccgagggcagcatctgttccgccagagcgatcatggcgtggaaagagccagcctcgaacgccgccgcccatcgccattgctgggcgatcatctgcaaatgaccgatgcacagattgacctgatccttggcgagccgctcgcgcccggtcagggcgggcaggaccacctgctccagcgccttgacgatattcgcgatgcgcaggtcgatgctcggcagcatgggtcagcccttccgaatgagttggacgatatggctcaggaaaacagcgccggcagagccaagccaggtcagaacgacttcctggtgattgttgctggcgacggacgcacgcatcgcctggcccagatccatgaccgcgcatttataggcgttgagaacctcgtaataatgcagcctcgccgggtcgatcgcattgcccgacgccgcctgatattgcgcgatgaaatcgttgcgcggcaacagcccgctgaccaggaagacgccgtccgcgccccaggccccgaacagcttctgcatggtccaggcgatatcctcatggaaatcgccgatatgggcgagttcccagtcgaggacggcggtaaattgcccgctcgattcctcaaacatgaaattgcccatgcgcaggtcgccatgcaccagcatcggccggtcgcacaccggcgcattctcccgcaaccagcgttcggccaacgtcacgaccggcaccggttccaccaggcagtcccaccacacctgcgaccaccagttgacctgccagatcgccgcctggttgctgttcgcgcgtggcgcgtcgaaaaattccagatgcgcacgcgcccagtcgaagcgatgggtggtggcgagcgcgtcgatatattgcggtgccagctggtcgatcagggcgcccagctgcccgcccatacccgacacgccctgcccgcctccgtcgctcggctgggtaacgccgctgacgaagcccaatatgaccgcgggctggcccagcaagtcgccatcggcatcgaaccaacgcactggcgcgacaggcatatggtcacccatgatcgcctggatctcgccctcccgcccacggcatgtctgggcgatcgcttccagcgggtccatgcgcagcaccagccgctcgcccccgccatccgcccgatggaccagggtgaaggcgaactgctccttcgaagcgccgccggacatgcgctccacatcggttatggctatgtcttccagacccttcgccacgaagaaacgggtcagcatgtccgtcacttgaccgtccgacttgggcctgtaggggccggtatcgcgcaggcgtaccgtgcgttccagaacatggcggatgcgcggctccatctccgagcggtcccacacgtccacatcatcgcaggtcgccagaagcggactatcgtccatcacggaatccttcaccatgcgaagcgccggacatagggtctggcgaattggagatagtcccggttccagcaaaattcgcaccagccggtgccggcttcgccgtcaatggtggcggtcactacggcttcgttcagcagcacgataggatcgaggtcgagggaatatttggcgaaggccttgcaatcgataaataccgatcgcccctgcatatcagtgacggtgacctggaaacggtcctgcatcatgtcttcgtcatattcgatggcatagtcgatggaggcaacatggttcatcacaccgtccttgaacagataaccccgtgtctccacctggccgaaggacatcatttcgaaaaagtgcaccgataccttcttcgtggtggcgtgaaaccatttatagtgctggttaagaccccagacgcgcggtccccaactgtgatcacggatcatgaagtcgttgagtggataatccttaccatccacacgcagattgccgcggatgacgccatgctgttcggtgcgatcgtcgccataataaggcgggttgcccttaggatgcatgctgaaagcatagggcggatggatcgcggtccactgtccttcgaactgaacgcggtcgcccgcccagcccagatcaatggtcttgaacggctcgcgtaccgccatcagcagtgggccaaaacgccagtcgtcaaagtccatgtcgtcggacacgacctgctcgacttcctcctcgatcggcgcgtcgagcgctggcccgaacaggtgcagccggcctttggcatggccgttggcgcgcaccgtgggataatagaagcctgcaatgccatattgcggcaggacgaactggtgtgtcgcggactcccggccatcctccgccatcttgtgtcgaaaggcgttcttcacgggatagtccgcaacctgcttggtcatgtcgggcattcctcagatctcctctttcatgcgtgcgatgcggcatcgatcatttcggcgatatcgggcagttcaccctgatcggggtcaaggctattggctttgaaccatgtccgttcgcgccgggcatgacgcagcgcataatcgaggatcgcgtcgatcgacgactgcggcagcggcgtatgcgcctcccccaccaggatcaccgcatcgacggcatggcccagcgcgatattggcctgctccagcgcggtgacgctctcgcggtcgcatccctgcgccgccgtcagagcctccgccagcctgtggccgagcgcagccggcgcagcagggatcaagtcgagggcaagcccggccagggcatccagagatatctgctcgtagcgcaaggccgccttccactgatcacccagcatgcgcagatggccggccaccagcatggcctggtcgcgcgccagacgctggtcgcgcggcaacgcgggcaggatgacctgttcaagcgccttcaccatgttcgcgatgcgcagatcgatattgggcagcatgattcaggtctcccggatcagcgtgacgagttgttcgaggaacacggcccccgccgaaccaagccatgtcaggatgatgtcctgatgattgttgctctcggtcgcagcgcgcatcgcctggcccaggtcgatcaccgcgcatttataagcgttgagaacctcataatagcgcagcttggccggatcgatccggttacccgatgccgcctcatagccactgaggaatgcgtcgcgcgggatcaggccgcagaccaggaagatgccgtcatcggtccatgtcccgaacaggcgttgggtcgcccaggcgatatcttcgtgaaagtccccaatatgcgcaagttcccagtccagcacggcggtaaatttgccgctaggttcctcaaacatgaaattgcccagccgcaaatcgctgtggcacatgacgggcgcgtcgcagaccggcgcattttcacgtagccaacgttcggcataggtcaccatcgcgacaggttgcaccaccccgtcccaccagacctgcgaccaccagttgacctgccagatcgccgcctgccgcgtacccggatcgggcgccgcgaaataggagagatctgcggtgcgccagtcgaaccgatgcacctttgccagtgcatcaatgaactgcggggccagcttgtccgcccagtcgtcatagcgcgtgccaatccccgatacgccatggccgctgccctggctgggttctgtgacgccctggacgaagcccaggatgatcgctggctggccgatgatgtcgccatctgcatcgatgctgcgcaccgacgccaccggcaatatgtcggcgaaggcacggtgcacctgcgcctcacgcccgcggcaggtttgcgaaatggcttccagcgggtccatgcgcagcaccagccgctcgccccgttgatccgcgccgtgccgcagcagaaaggcgaactgttccttcgacgcgccgccggccatgcgtgacacatcggatatggccacatccgccagtccttcggcggcaaaatagcgggtcagcatggcgatgacctcttcgtcggtcttcgctgcataggggcctttcacccggtcccgcacggtccggtccaatatctcccgaatgcgcggctccatgtcgtcgcgattccagatgtcgatcctgtcaatcggtggcgcgtcgatgatatcgctcatgtcaattgccattgccttcccaggggaagcggaaaccgccttcacccatgccatagccaatcgtcccgtcgctcagacgatattccatcatctgttcgaccatcacgaaactgtcgaaggggaattgccagcggaacaacggcttggcggtaaattcccacaagcgatcatcctcgtcccacaccttccaatggacatggcggaagcccatttcgtcggcttcataatcgatgacttcttcgacccgaccgatatgatgccaacgcttcccgtcgtgcaggattttctgatagccctcgccctgttcggtgatggcgtggaccgccacgcaggacatgccattgtcgaagatcggccatgccagccgataatgctgaacccccgcccagttgcgcggaccgcagctgacgtcgcgaaaacccgcgtccttgatcgcgatggtctgtccagtgcgcaggcgcaccgtgccggtgacgtcgcacgcgccctccagatggatataggccagttcccgcgcgatcgcatcgtcctgattgcccggaacgatgctgtcgcccatcgcaaagcgctgatcccagctgaggtcgacgccaaaatcctcggtatcgatggtaatccggcacgtctgtaacggccgcaccgcctcaaggcgcacacccgcgacggtcaccccaccgtcgggacgatcctgggtgtagggaaggttcatgttgacgcgggtgaacagcggctttccgtccatgaagaagatcgcgaagccattggtttcgccgacattctccatgaaaccgaagcggatgaagccgcccagtttcgcctgccggtcatagaagttgaaatagtagctctggttccatttggggatggccggattgggaatatggcgctcgcaattttcggtcatgtaggctgtggtgagtgccgtcatgcgcatcctttccattgccatcttccctcctcgattcttgtttttattggcctcaatcgtccagcagcgccgtcaccgtcttcgtttcggtatagtgcaacacaccctcttcaccgacttcgcgcccccagccggattccttcacgccgccaaagggcgcggacggatcgttcatgccgtgggtattgatccacaccgtcccggcttgcagcttgcgcgcggtcaggtgagcgcgcgacaggtcgcgggtccagatattggcggccaggccataacgggtatcgttggcttgccggattacatcgtccacatcgtcgaacggggtcgccaccagcaccgggccgaaaatctcctcccgcacgatgctggcgtcggcatcgggattggcgaagatggtcggttcgacgaaatagccgtcccggtcccccgtcccgccgccggtgacaaggtccgcgccgctcgccttgccctgtgcgatgaagtccagcacgcggccctgctgcaccttcgacaccaacggccccagcatcgtgtcgggatcgcggccatggccgagcttgaagctcttggccacctgcgcgacgccatccacgaccttgtcgaataccgagcgttcgacatagaggcgtgaggcggcaaggcatacctgcccgctgttgaagaagatggcgagcgccgcaccgatcgccgccttgtcgagatcggcgtcggcgaagatcagcgagggcgacttgccacccagttccagcgtcacgcgcttcagatcctttgccgcggtctggacgatctgctttccaacacgggtcgatccagtgaaggcgatcttgtcgataccgggatgttcgaccagcgcctgccccgcttcatggccatagccggtgacgatgttcagcacgccttcgggcaaccccgcctccagcgccagttcggcgaggcgcagcgcagtcaacggcgtgacttccgagggtttgaggacgatggtgcagcccgccgccagcgccgacgcgatcttccacgccgccatggccagcggataattccacggcacgatctggccgacgacgccgatcggttcgcgcaccgaatagctgtgatattggcggccatcccccgaaatcgggttcacctgaccatagattttcgacgcccagccggccatgtagcggaaaatatcgacggcagcaggtacatccaccgccagcgcatgatgcactgccttgccattgtcatagctttccagcagcgcgagttcctgggcattatcctcaatcttgcgcgcgatcgcctcaatgatcttgccgcggtcgagcggccgcatccgcgcccatgcggcggactcgaacgcggcgcgcgccttggtcacggcccggtccacatccgctgcgctgcccgccggaacgctggcgaacacctgtcccgtcgccgggtcttccacatcgatggtgcgaccgtctccggccccgtcccacgacccgccgatcagcatcttttgcggcggcagacggacttcgtggccagcctcgccatggagagcggcggcaatggtagcggaagcattcatacaggatctccgaaaggggaaaggcagagccgcagccgccattgcagacgcgacttcaaaggggggctcgatatgggctcatggactgggtccggttggatggggaagaggtgcgcggcatccgcgtcaacaccgcgtgaaacggatcggcagcgtcttgtagccgccgacgaaattggtttcgaccatgcgcggtgtcccggccagttcgactgacttcagatgtggcagcaactcctcgaacagcacccgcatctccagcttggcgagatgctgacccaggcacatatgcggcccgaagccgaaggcgatgtgcgggttgggcgaacgggtgatgtcgaagcggtcgggatcggcgaacacgtcctcgtcccggcaaccggacggatagcacatcatcagccggtccattgcctggatggtctggccgcgcagtaccgtatcggcggtcgcgttgcgcatgaaatgcttgaccggactggtccagcggatcgcttcgtccaccaggccgggaatcagccccggatcggccttcaccttcgcccagttttccgggtacagcatcatgccgtgcaggccgcccgccgtggacgaggatgtcgtgtcgtgcccggcggtcgcgatcgcgacgtaatagccattggcttcgtcgcgcgggatgggcaggccgttgactcgcgaattggcgatcagtgacagcagatcgtctgtcggtacgtccttacgcctcgcgctcagatcgtcgaaatagcgatagaaatcctccaatgcagccgcccacatcttggcgcccgccaccgggtcggcgaccatttcgggccgctgttcctctggatcgtggacgccgaaaaattcctgcgtcagcttcaacatgcgcggttcatcctcggccggcacgccgaacagcgtcatgatgacgcgaagagggtaatgcagcgcgaagtcgcgcacgaaatcgcattcaccgtcgaagctgagcagatgctcgaccgacttcttcgccagcgcccgaatctgttcctccagcttgccgatcttgcccggaaggaaccagttggacgtcaccgatcgataggccgcatgttcaggcgggtccatgaaggtaagcgaggagatgatacgcagtgacccgtcattgatgtcccgcgtgaaagcgtcggacgcctggtcgttcaggatcgggttatggtcggcattatggtatagcttgccgttgcgctcgacttccttgatgtcggcatgtttggtgacgatccagatcggatcgaaaccgggaacttgtgcgacgcccagcggcatattctcgcgcagccacttgaacgcgccataaatgacggcatcgtcggcataggacttgggcgagagcacgatcttcgcgacatcgtcagggatgaacggacgaatgtccgatgccgatgcgatcattcctggtcctctccgttagccgcatcatcatcttcgtatatttttgcgtattatcgatacgtaactacatgctggcagcagcgtcaatcggtaaatacgtcattatctttttgtcgcatttttcgataaaacatcgtgtttttgggaattatggcaatcattttcgtcataactgtcccgaaaactgaatgaatgaccacaactttaataggcgatgggtttcatcggcgtcggcccgctgcatggattagaccagggtgatcgcgccaatcaccggtcacactatcgataccatgtctatcggcaggctatcggcaaaacacgaaggccagaactgcgagattgcccggagacttgtccgattgcgcaaacacaaaaaaggcgacgccggagcgtcgcccttatctggtgcgtactgacacttgttaactgccagaccgcgatctctgagtgacgacgatgaccgattgcaacgacttggtcaaggcctgctgcgaccggtgactcatttcggtcgcgattaaacttgaccaaaatgaaagagcctgccccatttaaactcttgtatcggatgagggaaagcgggtggaaaagaaaagccgaatctggcgcctgggtgccgaccttggcgcaaattcgttaggttgggcagcaatcgaattgcagaagatcgatgatcgatacgagccgatcggcatcctcgccgccggctcccgcattttcagtgacggccgtgatcccaagtccggcgcttcacttgctgtggaccggcgtgacgcacgagcgatgcggcggaggcgggaccggttccagcaacggcaaagggcactaatcaaatatctgatcgccgacgggctgtttccggccgatgaggcggcgcgcaaggcgatggccgcgatcgatccctatgctgtgcgcgcacgcgcgctggacgaggtgttgacgctgccggaactgggccgcgcgctcttccacctcaaccagcggcgcggcttcaagtcgaaccgcaaggccgaccgcaaggcggatgacgatccaggcaagattgtggagggcatcgaccgtacgcgcgaggcgatcgccgaggatgagcaggaggccggtgccgaaccgggcagctggacctatggcaaatggatgcacatgcgccgcatcggagccgtggatgccaataaaatcccgcgcgttcgtacccgcttggacaccgaaaaggatgaagcaggaaaagagcgcggctatgacttctatcccggtcgcgacctgatggaggaagagttcgacgccatctggggagcgcaggcgccgcatcaccctgacgtgctgaccaatgacgcccatgaccggctgcgtgagatcatcttttaccagcggccattgaaggccccgcaaatcggcatgtgcacgctgatcgggggccatccgcgcttgcccaaggcgcatccgttattccagcgccgccgccttttggaggaactcaacgccctgatgatcgtgcggcccggcgaagtcgcgcagcggctgacgcgcgaggaacgcgacacgctgttcctgaagctcaaggacaagggcaaggtaagtttcacaagcttgcgcaagacgctcaaactggatcccgatgctcgcttcaacaaggaaagcgagaaccgcaccgacctgaaaggggatgaggtcgcggcggcaatgggtgccaagacgcgcttcgacaatcgctgggtccatctgtcgatcgaagaccaatgggatatcatcgcgcgactgggagatgtcgaaagcgatgcgcaggatgccgcttttcgcgcatggctgggtgacacctatgcgctgaccccggaacaggcccgcgccgtcgccaatgcgcctttgccgccgggctatggccgtttcggcgaggtcgcgacccggcggctgatcgatgcgctgcgagatggcgaaaaggacgggcgcgtgctcgtctatagcgacgccgtgatcgcggcggaccttggccatcatagcgaccggcgcaccggcgaaattttcgaggataaagaagggtgcccgcaactcccttattatggcgtggcgctggagcgacacatcatgccgggcaccggagatccatcccattcggatgagatgcgggtcggtcgcctgacgaatcccaccgtccatatcggactcaatcagctgcgccgcatcgtcaacacgctgatccgcgcctatggtccgcccgccgaaatcgcgatcgaactggcgcgcgaactcaagctgaccgacgacgacaagaagcggattaacaaggagaataatgacaaccgactggccgccgaaaagcggtcggataaattacttgccatcggcaagtccgataccggcaccaatcgtgcgctactcaaattatgggaagaactcaatcccgccaatgtgctggaccgacggtgcatctatacgggcactcagatttcgatcgacatgctgttttcagtcgcggtcgaggtggatcatatcctgcccttcacggctaccttggacgacagcaacggcaacaagatagtctgcatgcgcgagtccaatcgggagaaatgcaaacggtccccctatgaggcgtggggccataccgcgcgttgggaagagatcgccgctcgcgctgcgcaattgccgcgtaacaagcgctggcgctttgagccggacgcgatggagaagttcaaggatgagagcggctttcaggcgcgccatttggttgatacccaatatctcgcccgattgtcgcgcgaatatttggcgacgttgtaccccggaaagggcgagggcagcggccatatctgggtttcgccggggcggctgaccgagatggtgcggcgcaagctgggcctcaacggcctgcttggagatcataatctcggcgcggatcaggccaaaaaccgcaaagaccatcgccaccatgccatcgatgccgtggtcgtggcgatcgttgatcgcaagatgctcaatgagattgcgcgcgtatcggggcaggaaggtgtggacgggcgcgaacggatcgaaatcccgccgccttgggacaatttccgcgacagtctgcgcaccgccgtcaatgccatcaccgtcagccatcgcaccgaccatggcacggcgtcgaaagccggactggccaaaggcaaggacgcaaccgccggccgcctgcacaatgacaccgcctatggtttcaccggcaaaaccgacgcgaagggtaacagcatcgtcgtgcgccgcgtgccactatccagtttcaagaagctcgccgacctggatcgcattcgggacgccgatctgaaggccgcactttaccagcatctcgacggtttggagggcaaggcgttcgaaaaggcggtggcggctttccccgatctggaatggcacccctttggcggcgtgcggcgggtgcgcgtcgtcgaaccgctgtccgtcattccgattaaggaccgaaatggacgcatctataagggatataagggcgattccaattatcggtacgatgtttgggaattgccgggaggcaaatgggtgaatgaagtcgtctccatgttcgatgcgcatcagcccggctggcaatctgcgatccgggtcgccaatccgaccgcgcgcaagatattgagcctgcacagggacgatgtgctggcggtcgaacgagacgggggggcacgcgaattggttcgggtagtgaaattctccgaaaaacaattcgccgtcgcgccgcccaacgagggcggggcgctcaaggcgcgcgacgcggacaagggtgacccgttcaaatatagctacccctcccctaatacgctcaaggcatggcgcgcgcgtcaggtgcgcattgatgaaataggccgcgtcctcgaccccggcttccccgcccgcacggctcgccgcaaaacgcgcaagaaggcctgaccagagagcggaggcgaggcagatggaccggatcgtcgatatcgccaccgatggccgccacctttccgcccatcgcggtttcatgatcgtgtcggaggatcgcgcggaagtgggccgcgtgccgctcgacgatgtcgcggccgtcgtcgttcacgcccacggcatcacctggtccaccaacctgatcgtcgcactggcccagcgtggcgcggtgatgctgctctgcggcagcaatcacgccccggtcgcggtgtgcctgccgctagacgggcaccacgcccaaaatagccggatgcgcgcccaatgggaggcgggcaagcccctgtccaaacaattgtggcgccggatcgtcatcgccaagatccgctggcaggcggcggtgctcgatgccaacggcatgtcttcctccgccttcgacctgctcgcccggcgtgtaggttcgggcgaccccgacaatgtcgaggcgcaggcggcgcggcggtactggccgttgttgatgggggagggtttccggcgcgatcgggatgcggaagacatcaacgcgctcctcaattacggctatacggtgttgcggtcgctgtgcgcccgcgccgtggtcgcatccggcctgcacccgtcgatcggcgtccatcatgccaaccggaccaatgccttcgccctggccgacgacctgatcgaaccgttccggccgctggttgatgcgctcgccctgcgcctcgtcgcgcgcgggaccgataccgtgacgccggaagccaagcgcgcctttgccggactgatcgcactcgacctgcccggggcggacggcacgacgaccgtcgcgggcgctgcaaaccgggccgcgcaaagcctcgcgcgcgcgttccagagcgggcaggcagccgacatcgtgcttcctacacccccgtccgcgctggaactggccggactcgactcgctcttgtcatgagcgcgagccagttgagtggataccggctgatgtggattttcgtcatgttcgacctgccggtgaccaccaaggaacaggcccgcgcggccacgaaattccgcgaatttctgctggatgaaggctttgagaagagccagttttcggtctatgctcggttctgcaacggcaaggaacagttcgaaacctatatgcggcgagtcgagtcgagcctgcccgatcgcggcgacgtccacatcctcagcttcacggaccggcaatatgaaaatatcgtgcgattctcaggacagcgccgacggcggcagcggaaaaacccggatcagctcgcgctattctaatgattcgcgcgaattttacgatgatggatcaatagatattgcgttgttttcaacgtgatatccattgatccattatagccgctcagagatcgcggtccagcggcaacaatgcggacggcgcgaccaacacggccaatattatagccgctcagagatcgcggtccagcggcaacccagcagatgccggatgatctccgccgcgaattatagccgctcagagatcgcggtccagcggcaacatagcggcgctcgcctcacgggggcggcctattatagccgctcagagatcgcggtccagcggcaacgattgcgcgataggcccatggtgcggcgatattatagccgctcagagatcgcggtccagcggcaacgatgcagattgtagagcgtcgcgcctttgtattatagccgctcagagatcgcggtccagcggcaacaagcggaggccgcttgactgcgttcgattaattatagccgctcagagatcgcggtccagcggcaacggttgggagaggctggacgcggtgaagcgcattatagccgctcagagatcgcggtccagcggcaacatggccgccctatggggccgcaatcggagcattatagccgctcagagatcgcggtccagcggcaacagcaaaccagtcccgcagcgtcattccttcattatagccgctcagagatcgcggtccagcggcaaccccgcgcccaacgccttcgacaaaaactcgattatagccgctcagagatcgcggtccagcggcaactcacagccgcacggcagcggcgtaggctcgattatagccgctcagagatcgcggtccagcggcaacagcactggcgcagatacgtcccagcccgttattatagccgctcagagatcgcggtccagcggcaactggcgacgtaaccggcgagcggcttggtctattatagccgctcagagatcgcggtccagcggcaacccatctcggatgtagcgaacggtgcagtaaattatagccgctcagagatcgcggtccagcggcaacatcctgcgcgcactgaccgacgccggatcgattatagccgctcagagatcgcggtccagcggcaacgagaccgtgcagctatatcaaccgcaccagattatagccgctcagagatcgcggtccagcggcaacgcgattcacagggggatgagatgagaacgaattatagccgctcagagatcgcggtccagcggcaactgtgtgcaagcctccaagggcaagcgctgaattatagccgctcagagatcgcggtccagcggcaacgactctgagcttgaccttaaagcggccgacattatagccgctcagagatcgcggtccagcggcaaccctgccccgtggcgaactggtcagcctgtcattatagccgctcagagatcgcggtccagcggcaacctgaaaggcggcgggtcggagcgccgctatattatagccgctcagagatcgcggtccagcggcaacagcgtcgccagtccgtccgcgctcatggcgattatagccgctcagagatcgcggtccagcggcaaccttcccacgctgcaataacgccagcggcgtattatagccgctcagagatcgcggtccagcggcaacgaccatgaccgacgcgcagatattcgcgcgattatagccgctcagagatcgcggtccagcggcaaccacgcagcgtcgggatcaacttgcgccaggattatagccgctcagagatcgcggtccagcggcaacaccgacaactgcgtcatgcgtgcgcccttcgacgaagtcgtaggcccatacatgacctggatattccgaccgcaggcggatacaggatccgtcgttgagccataggcgtccgcgcttgggctggcgcagcggaaccttcagcccctcacgtcgccagatccgctcgacccgtttatggttcaccgtccatcccgcatggcacagcaatgccgtcacccggcggtagccatagcgaccatattgtttagccaaagcgatgatatcctccgtcagcgcctgctcgtcatccgccccgcgcggcaccttgcgctgcgtcgatcgatgctgtcccagcacccggcagatccgtcgctcggacacccgaagcgctcgtcgcacatcgatggacgcaggccgtaggcctgcagctttttctgatagtcataagaacaatattggctgccgcgatccgaatggaaaaggcagccctggggaggctggcgcaggcgcaccgccatatccaacgccctgatcgccaggtccttcttcatcctgtcactgacagcccaacccacgacacgtcggcgcagtttatcctgagcgcctgccgcaggcgggcagtcgaagggcaggtcgagaatgacggcaagatagagccagccttctgaggtccagatataggtgatgtcgcccgcccccttacggttgggcgcatcggcggcgaagtcgccgtccagccagttcgctgcgacccccaggcgatggtggctatcggtcgtgaccttgtgcttgcgcatgcggactggcttgatcccgttgatcttcatcaggcacccgactcggcgctcgccaacatcgagccccacctctttcaactccatcgtcatgccaggacgaccatagctcccaaggctgaggcagtattgctcccggatatgcgccagcactttcatgtccgtccgctcccgccgactgatcggccgcgagcgccaggaacgatagccgcgctcgctgacaagcatgacacggcagagcagttcaacaggccaacgatgccgccagctatacacgaacgcgaacttcacggcctttggctcgcgaagaactgcttggccttcctaagaaacagtcatgtcaggctcatgtggcaactcttggagggagaagccaaaggtcttggcgcgacgcttgagatttccgatcacccgactgcgatagcgctcctcatattgtgacgcgccgggatcatgatacgccatgccgtagcgcaggctgttatagaacagcaccgcgatcttgcgtgcggtcgcggtcactgccttggcttttccggcgcgtgcagacagtcgacggtagaaagccccaagcgcggtgtcacttcggccaatggtggttgaggctgggcgcaggagtgctgcagcccggcttgaggagcgtcgggttttggacgacagcaatttaccgcccgatatcttgttgcccggcgccaggcacaaccaggacgtaaaatgctttgaactgggccatgcggcaagatcggtcccgcactcgccaaccagcttgagtgcgagcgacgggccgattccgtggatctacgtcaggtccacgcccagcacgcgatagagcgctgaccggacctcgaagtcaggcgtgttcacctgtcgccttttggtccggacttttgggaggtggcgaacatcatatccctcgtctatttcgagcgccttgagcgcggcctcaagctttcgatcacattcgagaactttggtttggtagaagtcgaacagggccagggactggccaagcgcgaagatatgctcgtcgcgccagttccccgataatgccgcacaaatggtctcaatagtcgcgtggcagcggacgtcgcgcatttgagccagcgtgcttggcgtacgttccccgctcacaacggccctgattatccgcattcccgtcacgccggtaatgtcggagacgacatgatggagttgcacattcatttccatcagcgccttctgcatgtgctgaatatgggaggcagcatattcgatcagccgctcgcgctgccgcagataggcacgcatggtcgccacgcccgcctcgggacggaaactcccccgcagcagcccgtagctatgaaggcgttgcaaccatgcagcgtcgctgacgtcggttttgcgacccggtacattcttggcatatcgcgcattgaccaggatcacctcaaagccgtgtccttcaagcacttcataggccggaatccagtaaacaccggtcgattccatcgcgacagtcgtgacgccctatgtcttgaaccagcgggccatatcatggagatcgccggtgaatgtgccaaacgctcgtaccggattatcatcggcgttcggatttatggccgccatatgcatggtcgacccgatgtcgatggcagcggcgcgtggattgaccatagacaacgcgccggatttcgatcgttccattccaagtcctccttcaaaacaggagggtatgggcgatgctaaacgtcatcttcctaaccgggatcgccgcaaaacggcgttaccactttcaagtacgcaaacacccacgggccacgttttttaacggggtatcatgcctccaataagccatcggccgcgaccctcccgaccgcaccatagcacgacccgtttctaccgcgcacaggcggactcagccggcgacggttttttaatatgtcgcgctcctcccgcagcacacggttctcaaggcgaaggcgttcattctcacgcgccagatctgcctgcggcgctgccaccaggtcagatggccgatactgtgacacccatttgcccagcgtcgacttccctatccccaaatccgatgcaacccggtcgcgcggcaacccgctggtcagcgcaatccgcaccgcctcctgcttgaactcttctgtatgcttgatcatctcgtcggtctcctgttgcgaactctaatcgctcaggtgaccggcgcaaatccgttacaagtccacgcgactccttggataattgctgaaaggttggtgggaaggcacccatgctccaatctctgcaaagcgcatgagagcaaaatgacaagaagggccgatccaaagagccgcctgctccgccttcccagcagaacccggccaccgcttgcaagcttgcgcaaatttccgcgaaattgcgcataactgcgattagttgcgcattgactcttttaattgcgcgatttatcttttgcgcaactaaggaagtgatgtggcacgactaatacccgaagccgatctagaagcgatcgaggccgctgtggcgcaattgccggatggtgcgtcagcggctcagatcaccagcgccctcgctactcctggtgcccgtcgtaccctccaataccgtcttcgcgcattggttgacgcgggtcggctacgccttaccggcgacgggcgtgcagcccgctatcatcttgctgatgacatcatcgcccggcctgacccggccgacatcgtcccgatatcacctgaaggcaaagctgtccttgcctatgtccgccagcccgtcgcgatgcgacaaccggtcggctatgaccgcggcttcctggatcgctaccggccaaaagaaaccttctatctgacccagcagcagcgtgatcttctggctacgatcggcaagccacagattgaggctgcagcggcgggaacctacgcgaagcagatattgaacaggctgcttatcgaccttgcatggaattccagccgtctcgaaggcaacacatattcgctgctcgatacacggcggctgctggatttcggggaagccgccgaggggcgcggaccgcgcgaaacgcagatgatcctcaatcataaggatgcgatcgagtttctcgtcgccaacgccaatgatgtcgggttcaatcgctatacgatactcaacctgcatgcgttattggcgaacaatctgttagctgacccgacggcggtggggcgactgcgcaacatcatcgtagggatagacggttcaactttccatccactggaaggtccgggcctcatcgaggagtgcttcgatcaaatccttgctacagccacggccatcgacgatccattcgagcaggcctttttcatgatggtgcagcttccttatcttcagccctttgacgatgtgaacaaacgcgtatcacgcctcgccgccaatattcccatgatccgggggaaccttgcaccattgtcattcaccgaggttccaggcgacctttacacgcgcgccacgcttggcgtctatgaacgcaacgacataacattgctgcgcgacgtattcctttgggcctatcagcgatccgcagcgcgctacgccgccgtccgtcaatcaatgggtgagccagaccccttccgcctgcgctatcgggaacagttgcgcgatgtcgttcgggatgttgtgcgcggcaccttgagccgacaggcaacacgcgcgcatctgatcacgacgtcccatgagttcatcccaacagccgatcaggaccagtttgctgaggtcgcagaaacggagttgctgggcttgcacgagggtaatttcgcgcgatacctggttcgtccgtcggaatttgctgcatggcaacaaatctggaacgcagcctgattgctacgcctacctgaatggcttgcattgggacttaaccgactgaccgcttccgggtctcacgcggacacatcggaccatcaaaccgctcgcctgaggccgctattggccgcgtgaatccaatcaccaattagattgcgctcaatgcgtcggataccggatagccccagtcatgatatttacgcacgatgatgcggatgaagcctataatttccggcgagaagtcgccgatccgatggctcataatgatcggcgatgtggcgaattccaccagatcgacgtagcgcacgtcgtcaggccgcgagcgtcgcaccgactccgggatgaccgcaattccctcctccgccgcgaccaggccgagcgcgatctgcagttcgcgcgcctcgtaagtcgcatgcggctccaggccattgtcgtggaacaacgacagaacatcgtcggcgtagctgggacgcggttggctggggtagatgatcagcttctcctcggccagccggcatagctttaccggcgcgccgtcgcggccgatcgggctgctgagcggcaccgccgcgatgagttgttcgttgcgcaatatggtccgccgaacggcattatcctcgaaccgtacccgcccaaaaccgatgtcgatccgcccgtccttcaacgcggcgatctgttccagggtcacgctttccatcagcgtcagttcgacatccggatactccgcgcgatagtcgcggataagcgcgggcagacgagcgtagatggtcgatgccacgaagccgatacgcagccgacgccgctcggtggcgactgctgaccgcatcatgccgcgcatatcctccatccgctgcaatatctgcatcgcctggatgtggaaaagctggccgatgggcgtcaacgccagcggccggacattgcggtcgatcagttcggcaccgacttcggcctccaactgttgaatcgaccggctgagcggcggctgcgccatgttaagccgctcggccgctttgttgaagttcctctcggccgctaccgccacgaagtaacgcagttgacgcaaatccacgccgataccctgtaagtatgatccctagaccccattgatctttgtggaattgatcggacgagcatagctaaggcttaacgatagggaaagcgaggatgtgttgaaagcgatgactgccatttccgagatcgataccctgatcgtcgatctgccaacgatccggccgcatgtgctggcgatggcgacgatgcatagtcaggcaatcgtactcgtgcgtatccgcgatgccgacggcgtcgaggggctgggcgagggcacgaccatcggtggcatgagttattgcgaggaaagccctgagacgatcaagctggccatcgaccaatatatcgcgccgatcatcaaggcctgcggctcggtgagcgtgcagcaggcgatgcgtaccgtcaatctcagcgtcgcgggctgccacattgccaaatgcgcggtggagaccgccttgctcgacatcgctggcaagcggctaggcgtgccagtgtccgaactgatcggcggcggccgtgtgcgtgatcgcctggcggtggcctggacgctggcgagcggcgagactggtcgcgatatcgaggaggctgagcgcgttctcgacctgcgccgccacaacatcttcaagctcaagatcggcaagcggtccgtgcgcgacgacgtcgcccatgtcgcggcgatcaggcgggccgtgggggatcgcgccagcgtgcgcgtcgatgtcaaccagcactgggacgaagcgcagacggacctgggcatgaaactgctggaggatgtcggctgtgacctagtcgaacagccagtggccaagggcaacctggccgccatggttcggctgtcggccaagcatgtgatcccgttgatggcggacgaggcgttgcatggcccggccgacgccttcgcgatcgccgctgccgggggcgctcgcgtcttcgcggtaaagattgcgcaatccggcgggctgatgcctgcctatcatgtcgccgccatcgccgaagccgccggcgtcggcctctatggcggcacgatgctggaagcaggcgtgggcaccgcggcgtcggcgcatctgtgcgccagcatgccttcgcttgcctggggcaccgagctgttcggctcgctgctggtcaaggaagacatactcgccgagccgctgcgttacagcgatttccagctggaagtgccgaaggggccgggcctgggcattgcgctcgatgaggaccgggtagcgttttaccgccgtgatcgcgtgacaccgcgcctgcatgccgttgctgaaggagtgtgatccatgttgttcatggtggaaatggacgtgaatatcccgc

SEQ ID NO: 3070 - DNA, 23312 bp, synthetic construct
  source 1..23312: mol_type = other DNA
  misc_feature 1..23312: note = Synthetic
ctacgcgctgttcctgatcgccagcggcgtgccgcagaccctggcggcatcggttgatgttaccacgctggaaggcgcgcggcagacgctggcgctgggaccggtcgcttcgcaggaggcgatcaagatgctgggcaccaatggtggcggcttcttcaacgccaacagcgcgcatccgttcgaaaatccaggcgcgctcaccaatttcgtccagatgctgtccatcttcctcattggcgtcggcctgacctataccttcggcaaggcggtcggcaatgtgcggcagggctgggcgatactggcggccatgacgtttttgttcctcctgggcacggccgtcacctactggcaggaggcggcgggcaatccggtgctgcaccatctgggcatcgccgggggcaatatggaggggaaggaagtccgcttcggcatcgccgcctccgcccttttctcggtcgtcacgacggccgcaagctgtggcgccgtcaacgccatgcatgacagttttaccgcgctgggcggcatgatcccgctgattaatatccaactgggcgaagtcgtcgtcggtggcgtgggcgcaggcatctatggcttcctgctgttcgccatcctcgccgtgttcgtcgcgggactgatggttggtcgcacgccggaatatgtcggcaagaagatcgaaagtcgggaagtgaagctggcggttctggccatcgccgtgctgccgctgatgatcctgggcttttcggcgctggcatcggtcttgccggcgggtctggccggaccgctgaacaaggggccgcatggcttctccgaaatcctctacgccttcacatcggccgtgggtaataacgggtccgcctttgccggcctgtccgccaacacgcccttctataatggcctgctgggtgtcgcgatgtggatcggccgtttcttcatcatcgtgccgatgctggcgatcgccggcggtctggccgtgaagaaatatacgccggcaacgacaggcagcttccccaccaccgggccgctctggaccggcctcctggtcggcatcatcctcatcgtgggtggcctcaccttcctgcccggcctcgcccttggcccgatcgccgatcatctcgcgatgatcaacggccagacattctaaagattggagcatataaatggcacgcaccgcgtccaaatcgctcttcaccgccgacctgatcctgcctgcgtgtcgagacgccttccgcaaactcaagccgaaggaactgatccgcaatccggtgatgttcaccaccgccgtcgtcgcggtgctgctgaccgtcctgctcgtcgtcgggcaggacgggctatcgatcggcttcaagctgcaactggtcatctggctgtggctgaccgtgttgttcggcaccttcgccgaagccattgccgaagggcgcggcaaggcgcaggccgcctcactgcgcgcgaccaaggcggaactgaccgccaagcgcctgaaaggcgacggccgagactatgacgatgtcccggccagcgcgctgaagctgggtgatgccgtgctggtcgaaaccggcgacctgatcccgtccgatggcgaagtcgtatccggtgtcgcgtcggtcaacgaagccgccatcaccggcgaatccgcgccggtgatccgcgaggccggcggcgaccgctcggccgtgacggcgggcacccgtgtcatctccgatgaaatccgggtgcgcgtgacggtcaatccggggcagggcttcctggaccgcatgatcgcactggtcgagggtgcggaacggcagaagactcccaacgagattgcgctgacgctgctgctggtgggcctgaccatcatcttcctgatcgcggtcggcacgattcccggtttcgccagctatgcgggcggcgcgatccccgtatcgatcctggccgcgctgctcatcaccctgatccccaccaccatcgcggccctgctgtcggcgatcggcattgccggcatggatcgactggtgcgcttcaacgtgctcgccaagtcgggccgcgcggtcgaggcggcgggcgatatcgacgtgctgctgctcgacaagaccggcacgatcacggtcggcgatcgtcaggcgacggagttccgcaccgtcggggctatgaagcaggccgatcttgccgaagccgcgctgctcgccagcctggcggacgaaaccccggagggccgctcgatcgtcctgctcgcgcgcgaggcatttgcacagaccacgacggttttgccgggcggagcggaggtcattcccttcaccgcccagacccgtatttcgggcgtgcaggccggcggatcgacaatcatcaaaggggcggtggattccgtgctcaaagcgatcgacggccagccggaaggggaggctgaactgcgccgcatcacggacgagattgcgcgcgcaggcggcacgccgcttgcggtggcgaaggatggcgaactgctgggggccatcttcctgaaggacatcgtcaaggccggcatccgcgagcgcttcggggaactgcggcagatgggcatccgcacggtgatgatcaccggcgacaatcctctgaccgccgccagcatcgcggccgaggcgggcgtggacgatttcctggctcaggcgacgccggaggacaagctggccctgatccgcaaggaacaggagggcggctgccttgtcgccatgtgcggcgacggcaccaatgacgcgcccgcactggcgcaggcggatgtcggcgtcgccatgaataccggcacgcaggcggcgcgcgaagcgggcaatatggtcgatctcgacagcgatccgaccaagctgatcgaggttgtggggctcggcaagcaattgctcatgacgcgcggcgcgctcaccaccttctcggtcgccaatgatgtcgccaaatatttcgcgatcatcccggcgatgttcgtggtgctctatccggggctcggcgtgctcaatgtcatgggcctcgccacgccgcaaagcgcgatcctgtccgcgatcatcttcaacgcattgatcattccgctgctggtgccgctggcgctgaagggcgtgacctatcgcccgatcggcgccgggccgctgctggcgcgcaacctggccatctatggtctgggcgggctggtcgcgccctttgtcggcatcaagatcatcgacctggccgtcaacggccttggcctcgcctgaggaatttctccatgaacaaggacatcatcacatcgctccggcccgctctggtcatgacgatcctcttcgccatgctgctgggccttgcctatccgctgaccctgaccggcatcggccagatggtcttcccgtctcaggccaatggcagtctgatcgagcaggatggcaagatcatcgggtcggaacgggtcggacagggctttacgtccgatcgttacttctcctcgcgcccttcggccgcaggcaagggctatgacggccttgcttcttcggggtccaaccttggcccggcaagccaggtgctggttgatcgggtcaaggccgacagcgagaagctgacacaggccaatcccggccagccgatccccgccgatctggtgacggcttcggcgtccggcctcgatcccgacatcacgccgcaagcggcctattatcaggtcgaccggatagcgcgggtgcgcgggcttgcggcgaccgatgtccgcgcgctggtcgatcagcatatcgaacagccgctccttggctttctgggcgaaccgcgcgtcaacgtccttgaaatcaatcgacggctggaccggatcggcgctaccaccgtccgatgaatgatcccgatcgccgcgatcccgaagccttcctgcgcgccgccgcgcaggaaggtcgcggccgtctcaagatattcctgggcgccgcgcccggcgtcggcaagacctatgagatgctgaccgacggcatgcagcggcgcaaggccggcatcgacgtcgtcgtcggcgtggtcgaaacccacggacgcaaggaaacggaagcgctgctcgccggccatgagatcatcgcacggcatgatgtcgaccataggggccatcggctgggcgagatggacctcgacgccattctggagcgccgcccggcgctggtgctggtcgatgaactggcgcacagcaatgcgaccggcagccgccatcccaaacgctatcaggatatcgaggaactgctcgacgcgggcatagacgtctattcgaccgtcaatatccagcatgtggagagcctgaacgacgtcgtcgcctccttcacgcgggttcgcgtgcgcgaaaccgtgccggactcgatcctggaaatggccgagatcgaggtggtggacataccgcccgacgaactgatcgagcggctgaaggacggcaaggtctatatcccgcaggaagcgacccgcgcgctcggccatttcttttccaagtcgaacctcaccgccctgcgcgaaatggcgctgcgtcgcgccgcacaggcggtcgacgcgcagatgctggactatgtccgcgcccatgcgctggcgggcagctttgccgcgggtgagcgcatcctcgtcgcgatcagcgaagtgcccggcgcacaaggcctcgtccgcgccgccaaacggctggccgatgcgctcaaggcgccctggtcggccgtgcatatcgaaacccagcgcagcctgacgttcaccgcgcaggaacgcgagcaactggctgacaccatggcgctcgcctcccggctgggcgcgaccaccgcgaccatcccggcgccgtccgtgttcgaagggctgcgccattatgttcgcgacgcccgcgccacccagattgtgatcggcaagtcggcccggtcctggtggttcgaacggcgccatggatcggtggtcgaccggctggtccgcgagattaatgatgtcgccatccatgtcctgcccggtgatgccaccgcacccggccggaaggcggcgggcaggccgctgcgtcagggctggggcaggccgatcgactatctctggtcgatcctgatgatcgccggcatgaccgcgctggggcggatgctgcttgaagtcatagacctcggcaatatcgccttgctctaccttgtcccggtgatgttcgcggcggccagcttcggcctgcgcgcagggctgttttccggccttctgtccagccttgcctataatttcttcttcctgccgcccaccggcacgctgaccgtcagcaatcccgaaaatatcatcagcatcctcgtcctgctgggcgtcgcgatcgtgaccagccagtttgccgcgcgggtccgcgcgcaggcggacttggcccagtccagcgcgcggcaaaatgccgctctggccggcttttcgcgccatctcactgccgcctccagtcaggaggaattgatgcaggccatctgcgccgaagtcgcgcggctattttcggtccgcaccgtcctgctcctgccgtcccgcgatggcccgcaactgcgcgcagccttcccgcccgaagaccggctggaacagattgaaaaggcggcagcgcaatgggcgatggacaatgaacaacccgccgggcgcggatcatcaacccttaccgcgtcggactggctgttccatccgctgcgcacgacgcgcggggttctgggcgtcctgggcctcgcccgcgaagatgcgggcgaaccgctccggtccgaccagattcccctgctcatgagcctgctcgatcaggcctcgatcgccttcgatcgcatggcgctggaggaggaaatgctcgacgcccgtcagatacgcgagcgggaccggctgcggtctgcgctgctttcctcggtcagccatgatctgcgcacgcccctcaccaccatcatctccgccgtccacgaattgcgccgcgatcagccctccgacctgcttgattccgtggcggccgaagcccagcgcctcaatcgtttcgtcgccaacctgctcgacatggcgcgggtggaggcgggcgccctgccgctcaaactcgaaccgaccgacctgttcgacgcggtggccagcgccgtgcatgacagccgccagtcgctgctggggcatgaggtgcaggtcgatatcccgcccgacatcccactcgttcgcgtcgatccgaccctgctgcaccattgtctgatcaacctgctcgacaatgccggccgctatgccgattccggcacgccggtcctgatccggggcctgcgcctgcccgatgcgatcagcctctccgtcatcgatgaagggccgggcatcccggccggggcggaaatgcgggtgttcgataccttcacccggctggagggatcggaccggggcaggcagggcaccggccttggcctcgccatcgtgaagggctttgcggaggcgatgggcctttccgtctccgccgccaacagggctcagccactgggcgcctgcttcaccctcactatgccgcaggcgctgatcatcaccgaattgccccatgaggatatcccatgaaattgcgccacaaggtgctggtcgtcgatgacgaaccacatatccgcaaactgatccatacggcgctgacgcgggccgactatgccgtgatcgaggcggccaatgcgcgtcaggcgctcgaacggctgaaggaagcccggccggacatcagcctgctcgatctggggctgcccgatcgggacgggctggaactggtgccgatcttcaagcagcagtccgacaccacgctgatcatcgtgtccgcgcgcgaggcgaccgatgataaggtcgccgcgctggatctgggcgcggacgattatctgaccaagccgttcgacactgaagagcttctggcgcgcgtccgggtggcgctgcgcaaccgcatggcgcgggatggcgggatatcgatggtgcgggcgggggatgtggagatcgacctggtcgcccatatcgtccgcaagggcggacgggaggtgcatctgacgcccaaggaatatggggttttggcacaattggccaaattccccggccgggtcatcacccatcagcagatcatggcgcatgtctggccggccgaacaggagcatcatgtcgaatatttgcgggttctggtgcgcaccctgcggcagaagctggaggatgatccgcaacggccccggatcatcggcaatgaattggggatcggttatcggctgcgcttcaccgaagagggcgaaaccgaggaatttgcgccctgaaccgaccggcctggacaggccttcaaatctccacctgcgatcccaattcgacaacgcggttggtgggcagtttgaaaaattccatcggcgtttccgcattgcggatcatccaggcgaagaatttctcgcgccagatcgccatgcccggcttgtccgaggggataagcgtctggcggctcaggaaatagctggtgtcgctgatattgatgggtcgcccgcaacccttcacggtcttcatggcggcggggatatcgacatcttccatgaaaccatggcgccatatcacacgatagaagccttcgccccagtccgtcacctctgcgcgaccggcaagcggcagatgcggcacagcttccgtccgcacggtcaggatgatgatgcgcccatgcaaaatcttgttatgctttacattgtggagcagcgctggcggcaccccttccacccgcgatgacaggaagatcgcggtccccgctacacgcttgagtgaatgggataccgactggatgaacagcggcacctccatcgcgccttcgttcagataatggtgcatgatcctgcgccccttgaaccaggtggtgagcgccatgaaagtcaccgccgccaccagcagcgggaaccagccaccatccggtatcttcgtggcgttcgacgcgaaataggcgccgtcaatcagcaggaacaggccggtggttgcccccgcaagccagggattccagcgccagacgctgaaggtcagcacgcccatcatgcaggcggtgatgaccatcgtgccggtcacggcgatgccataggctgcggccaggttgctggacgatctgaaaccgatgaccagtagcaggacgaggataaggagcgcccagttgaccagcggcacatagatctgcccggctgccgatgcgctggtatgttcgatcctgaggcgcggcaggaagccaagctgaactgcttgctgcgtgactgagaaagcgccggaaatgaccgcttggctggcaatgacggtcgccatggtcgccagaatgacgagcggcagacgcacccattcaggtgccagaagaaagaaggggttggctacggccgccggattggcgagcagaagcgcgccttgccccatatagttgaggagaaggcaggggaaggctgcgtaaagccaggatatgctgatcgccttgcgcccgaaatgccccatgtccgcatagagcgcttccgcgcccgtcactgcgagtacaaccgaacccagcgcaaggaaggcgagtttggggtcgatcaggaagaaatggaccgcccaccagggattgacgatgccgatgatcgaagggtgttgcaccagattgatgatgcccagcgcggccaacaccagaaaatagatgaccatgatcgggccgaagagggcgccgacccttgccgttccatgtttctggatcaggaacaggccgatcaggataatgatagcgatcggcaggacgtaagccgcaaaaccatcattgacgacggtcagaccctcgaccgccgacagcaccgacatggccggggtgatgatcgcgtcgccatagaagagggctgtggccaggacgcccagcatgacaatggccggcgtccatctggtttcgccgagcttgcgggaaatgagcgcgagcagcgccatgctgcccccctcgcccttattgtctgcccgcatgacgatgaacacatatttgagcgtgacgagcagcgtcatcgtccagaatattagcgacaacacgccaaagatatgatcggcatccaccgtcagcggatgatggccgatgaaactttctttcagcgcgtaaaggggagacgtgccgatatcaccgaacaccaccccaagcgcgcccagagcgaggatgggcagtttcccatgcgcgctgtgcccctgctccgcaggcgcgctcggttcttcggtcgtcaacgaatatgctcaccctgttgcgcatcttccatcgcacaaagtcgcattttattgccatatgagctttgcgccattcgcatagaaattccatatgattttgccggaaaagcgatgaatatcgccgatttctatgcaatctcaatggaaaggcgcctttcctcctctcgcgttcctatgcgcgcctgtctatttggacggcctcttttttgagaggtgatcgtcatggttcagtggcacgaaaaactggtcgcaaggattggtatcagggtcatcgggctggcactgctgggcacggcgtggatggagggcctgtggttgcaggacctgatggcagccaaaccgtccgctgatgcgtcgttggcacagatattgctggcggcgctgatgttcgccagcgtgagtctgggtctcatgctcaccattataggcgcggggctgtggaagccggtgcaggtatcggatcgctggacgaccagcgtgccgataccggtcgtgggcgatctggaggcaacgctcttttcggtgtatccaacgcggcatcgcgacaagtccgaaaatatcgaaaatatgatgtgattgctttttcctgctcccgatatcaaatgccggcctgcattagctcccccgcatcgccaaacggttctgaggcgtccggagtgcggcgcaaagatcgctgacctgccaagggagaaacaaaaaaggcgacgccggagcgtcgcccttatctggtgcgtactgacacttgttaactgccagaccgcgatctctgaaacatgaagatgtcacggaggcgaaatgcagtcaagtcacttcgctctacaatatgttcaattcagaagataatcctgcttgacgaacagaaaaggaaacgccccattgaccttcaaaggaatgggggatttttatgtcaaaggcaggaacgagatattggcgttttggcgctgatcttggcgctaactcactcggttgggctgcgatcgaactggacgggccagcgccgaacggcaagccgtttgctatccttgccgccggctcccgcattttcagcgatggccgcgaccccaagtctggcgcatcactcgcggtcgaccggcgtgatgctcgcgcaatgcggcggcggcgggatcgttttcagcagcgacagaaagcgctgatcaaatatctgatcgccgacgggctgctccccaccgacgagactgcgcgaaaagcaatggcggcgatcgacccctatgaagtccgcgcgcgagcactggatgaggcgctgtccctgcccgaactgggccgggcgctgttccacctgaaccagcggcgcggcttcaagtcgaaccgcaaggccgatcgcaaggcggacgatgatatgggcaaaatcgcgatcggcatcgaccgaacgcgcaatgccatcgccgaagacgaagaggcggcaggcgtcgagccaggcagttggacctttggcaaatggctatatgagcgtcgcctggtcggcaagcctgtccgcacccggcttcgcccggaaagtgccgatgatgccaagggcgatggctatgatttctatcccggccgcgcgctgatggaggaggaattcgacgccatctgggctgcgcaggcgccgcatcatcccgatgtgctgacgaacgaagtttatgaacggctgcatgagatcatattctaccagcgccccttgaaggcgccgcaaatcggcatgtgtacgctgcggcctggcgacaagcgactgcccaaagcccatcctctgttccagaagcggcgtttgctggaggagatcaacgcgctgatgatcgtgcgccccggcgaggtcgcacagcgattgacgcgggaagagcgtgacacgctgttcctgaagctgaaggacaagggcaaggttagcttcgctacgctgcgcaagacgctgaagttcgatcccgatgcccgcttcaacaaggagagcgagaaccgacccgacctgaaaggtgacgaagtggccgccaccatgggcgccaagacgcgctttggcacgcgctgggtgcatctgtcggtggacgaacaatgggacgtcatcgcgcggatcgacgagatcgagagtgacgcggaggacgcagcatttcgtgcatggctggtggatagctatgacctgagtgcagagcaggcgcgcgccgtcgccaatgcgccgctgccgccgggctatggccgctttggcgagacggcgacgcgcaagctgatcgacgcgctgcgcgatggcgagaaggatggccgcgtaatcgtgtatagtgaggcggtggcgctggcggaccttggccatcatagcgatttgcgcaaaggcacgaccttcacggatgaaaaaggccgcccgcaactcccttattatggcgtggcgctggaacggcacatcatgcccggtacgggaaatccatccgatccggaggaaatgcgggtcggccgactgaccaatccgaccgtgcatataggcctcaaccagttgcgccggatcgtgaacactttgatccgcgcttatggcccgcccgccgagatcgcgatcgaactggcgcgcgaactcaagctgaccgacgaggacaagaagcggatcaaccgggagaataatgacaaccggatcgccgcggaacggcggtcggaaaagctgctggccattggcaagcccgacactggcggcaaccgggcgttgctgaaattatgggaggaactcaatcccgccaatgtgctggaccggcgctgcatctataccggtacgcagatttccatcgacatgctgttttccgcggcggtggaggtcgatcatatcctgcccttcaccgcgacgctggatgacagcaatggcaacaaaatcgtctgcatgcgggaggccaatcgggaaaagcgcaagcgatccccctatgaggcatggggtcatggcgctcgctgggaagaaattgccgcgcgtgccgcgcagctaccgcgcaacaagcgctggcggttcgagccggacgcgatggaaaagttcaaggacgcgggcgggtttcaggcccgccatctggtcgacacccaatatctcgcccgactgtcgcgcgaatatctggcgacactctatcccgaaaagggggaaggcagcggccatatctgggtttcgccagggcgactgacagagatggtgcggcgcaagctgggcctgaacgacctgttgcccgaccataatttcggtggcggcgcggatcaggccaagaaccggctggaccatcgccatcatgccatcgacgcggtggtcgtggcgatcgtcgatcgaagcatgctcaacgagattgcgcgcgtatcgggacaagaaggcgtagatggccgcgagcgcatcgaaattccaccaccctggaaaggctttcgcgacgacctgcgcgccgccgtcaacgccattaccgtcagccatcgcaccgaccatggcactgcctccaagacaggactgcccaagggcaaggatgcgaccgccggccgactgcacaatgataccgcctatggcctgactggcgaagtcgatgcgaaaggcaacagcatcgtcgtacgccgtgtgcccctgatcagtttcaagaaaatcacagatctggaccgagtccgggacgccgatttgagagccgcgctctatcagcatctggacgggctggagggcaaggccttcgagaaggcgctggccgagttccccagactggaatggcatccctttggcggcgtgcgccgcgtgcgcgtgatcgagcctttgaccgtcatcccgatcaaggaccggaatggacgcatctataagggatataagggcgattccaactatcgttacgacatatgggaattaccggacgggaaatgggaggcagaagtggtttcgacattcgacgcacatcagccaggctggatatcgaaaatccgtgccaataatcccactgccagaaaggctctgagcctgcaccagggagacttgatcgcgatcgagcaggaaagtgggatgcgcagactgatgatcgtcacccaattctggcagaatggacaggttcgcctggtcgaacataatgaagccggcaaattggaagagcgaaacaagtccaaggatgacccatatcgaaactactcgccaacctgtggcggattgaaaaaagcaagggcaaggcgggtccgcatcgacgaactcggccgcgtcatggaccccggcttcccggcacgcactgcccgccgcaaaacgcgcaagccgggctgacgagcaggcggaggcgcagtaaaggtggaccggatcgtcgacatcgccaccgacggccgccatctttctgcctatcgcggtttcctgatcgtatcggaggatcgcgcggaagttggccgcatcccgctggacgacgtcgccgccgtcatcgtccatgcgcatggcgtcacatggtcgaccagcctgatcgtcgcgctagcgcaacgcggggcggtgatggtgctctgcggcagcaatcacgcccccgtcgccgtctgcctgcctctggacggccatcatgcccagaacagccggatgcgcgcccagtgggaggcaggcaagccgctgtccaagcaattgtggcgccggatcatcatcgccaagatccggtggcaagccgcggtgctggacgccaatggcatcccctcctccgctttcgacctgctcgcccgacgcgtgggatcgggcgaccccgacaatgtcgaggcgcaggcggcgcgccgttactggccgttgctgatgggggaaggcttccggcgggatcggaatgcagaagatatcaacgccttgctcaactatggctatacggtgctgcggtcactgtgcgcgcgtgccgtggtcggctctggcctgcacccgtccatcggcgtgcaccatgccaatcggaccaatgcctttgccctggccgacgatctgatcgaaccgttccggccactggtcgatgcgctggccctgcggcttttcgcgcgcggtatcgtcagcgtaacgccggaggccaagcgcgcctttgccagtctgatcgcgctcgacctgcccggcccggacggaacgaccaccgtgtcgggcgccgcgaaccgcgccgcgcaaagcctggcgcgtgctttccagagcggacaggcggccgacatcctgctcccgtcacccccgtccgcgctggaactggccggactcgattcgctgctcccatgagcgcgagccagttgagcggataccggctgatgtggattttcgtgatgttcgacctgcctgtgacgactagggagcaagcccgtgcagccacgaaatttcgcgagtttttactggatgaaggttttgagaagagccagttttcggtctatgctcgcttctgcaacggcaaggaacagtttgaaacctatatgcggcgggtcgagtcgagcttgccggatcgcggtgatgtccacatcctcagtttcacggaccggcaatatgaaaatatcgtgcgattttcaggacagcgacgacgacgacagcagaaaaatccggatcagcttgctttgttctgatgattcgcgcgcattttgcggtgatggatcaacggttattgcaatgtttttcaatgcaataaccgttgatccatcatagccgctcagagatcgcggtccagcggcaacgacccggcgacttggaacacggccttggtatcatagccgctcagagatcgcggtccagcggcaacatcgccttgcccttgcccggctcttccagaatcatagccgctcagagatcgcggtccagcggcaacgtattggcaccgggccttcgcacatcggaatcatagccgctcagagatcgcggtccagcggcaacttccatggcaagcgccagttgacgtggtcgatcatagccgctcagagatcgcggtccagcggcaacggcggcaaggtggtcaacggcctggtcaagatcatagccgctcagagatcgcggtccagcggcaactggaatggtgcacccaagaggattcgaaccatcatagccgctcagagatcgcggtccagcggcaacgaaaggggcaaggtcgaaatcatgtccgacatcatagccgctcagagatcgcggtccagcggcaaccggaggcgcgttaggtgtttgtcgatcgcgatcatagccgctcagagatcgcggtccagcggcaacaggcttgcagagggtccacagattggtgtcatcatagccgctcagagatcgcggtccagcggcaacagaaggctgccgctcaggatcgcgcaaacgatcatagccgctcagagatcgcggtccagcggcaaccggtgtcaccctttgtgaaggccatccgaaatcatagccgctcagagatcgcggtccagcggcaacctggccggattttgtccgacggagcgcagaatcatagccgctcagagatcgcggtccagcggcaacaagcgcgcgttcttcacaacatgcgccgaaatcatagccgctcagagatcgcggtccagcggcaacgtggaagctgaacgcgagaagctgaaccgcatcatagccgctcagagatcgcggtccagcggcaacgcgccgatcgaagtggcggacggccatttcatcatagccgctcagagatcgcggtccagcggcaactgcaaggaggccgagataccctatatcccgatcatagccgctcagagatcgcggtccagcggcaaccggtccaagctcgaagaaaaccgccaggaaatcatagccgctcagagatcgcggtccagcggcaactccacgactgctgcgggcacggcgattgcgatcatagccgctcagagatcgcggtccagcggcaacaaaagtttggtcgtcggcatcgacgccgggatcatagccgctcagagatcgcggtccagcggcaacggttgtcggaccagatcgacggtgaagcgaatcatagccgctcagagatcgcggtccagcggcaacgtcaaggatcgcggcgccgcgcggccgagcatcatagccgctcagagatcgcggtccagcggcaacacgccacgcgcatcatagtcgccgcgcgcaatcatagccgctcagagatcgcggtccagcggcaacgcgtccgaggcagcggaaagcggcgtcgagatcatagccgctcagagatcgcggtccagcggcaaccggccgtagcgcatccgcagcccgtcagcatcatagccgctcagagatcgcggtccagcggcaacgccgaattggcacccgccagcaatatgtagatcatagccgctcagagatcgcggtccagcggcaaccggaagaacacccggggctccaagcgcccgatcatagccgctcagagatcgcggtccagcggcaacaggcgaaacagtcggaactaatccacgattatcatagccgctcagagatcgcggtccagcggcaaccggatgctgatattccccttggcataggcgatcatagccgctcagagatcgcggtccagcggcaacgtcgaacatctgcagttcggcgcgtagagcatcatagccgctcagagatcgcggtccagcggcaacctgcttgcggcggctgaccagattgaggagatcatagccgctcagagatcgcggtccagcggcaaccgtccggtaatcgttgatagcttgcgccagatcatagccgctcagagatcgcggtccagcggcaactgctgacggagccgaccgcagctgcccgagatcatagccgctcagagatcgcggtccagcggcaacacgaaatccgcctcgcgctggatcgcgcgcatcatagccgctcagagatcgcggtccagcggcaacagcgtgctgtcagcatagagcgcctggaacatcatagccgctcagagatcgcggtccagcggcaacatggcgtcatcggcacgatcagcccggtcaatcatagccgctcagagatcgcggtccagcggcaactgaagatcctgcgtatgtcctgtctggccgatcatagccgctcagagatcgcggtccagcggcaacgtgtaggaccgttgaggatgcaaagaggggatcatagccgctcagagatcgcggtccagcggcaaccgttatctccttgtggccgacgccgaagaaatcatagccgctcagagatcgcggtccagcggcaaccagcatctggtccgccagcaaagcggccgcatcatagccgctcagagatcgcggtccagcggcaacgattgatcgaaattcgggcgattatgcaacatcatagccgctcagagatcgcggtccagcggcaacccgcgcaggatcatcgccacgccacccttcatcatagccgctcagagatcgcggtccagcggcaactgtgggccagacggtcaagggcgaagggacatcatagccgctcagagatcgcggtccagcggcaacagcacttccgccatcgaacgaacattttcgatcatagccgctcagagatcgcggtccagcggcaaccgatttatacagccatacacgggcgtaggcatcatagccgctcagagatcgcggtccagcggcaaccgtttcgtaccgcgcgcggatggccgcgctatcatagccgctcagagatcgcggtccagcggcaacggcgtgccagtcggcgcgaaggtaacgcagatcatagccgctcagagatcgcggtccagcggcaacgcgatcacgtcggaggccaacacgcgcgccatcatagccgctcagagatcgcggtccagcggcaacatgcagatcagcgcgatcggcaacagcgtcatcatagccgctcagagatcgcggtccagcggcaacaacgatggcaccggcaccgtgctgggcgatatcatagccgctcagagatcgcggtccagcggcaaccgccgcagccaacgatcgcgccgccaatgaatcatagccgctcagagatcgcggtccagcggcaacgcagaggccaaggccaccccggcaacggaaatcatagccgctcagagatcgcggtccagcggcaacaagcgcgcgttcttcaccacctgcgccgaaatcatagccgctcagagatcgcggtccagcggcaaccctgagaggccggtaaaagccctgtcactgatcatagccgctcagagatcgcggtccagcggcaactcgacctgcttgggcgcagccttgaccttgatcatagccgctcagagatcgcggtccagcggcaacccggcagtcagggggccaaggaagtgcgctatcatagccgctcagagatcgcggtccagcggcaacaagacccggtgttcgcacgcggcaacaagcatcatagccgctcagagatcgcggtccagcggcagaagtcgggcttggtccgcaccgcataggtagacaggaagttgcgcaccgacgtccgcaaggcacccgggtcataatagcccggcgccggtattgcgtcgctggccgggcggacggacggcacgatctgcatcactgtcgacccgtcgcccttcaacagcggccaggccttgcgcgtatgcgccatcaggttgatatcctgcggaaagacgcggttgtagaaaccgaggaaactggcacccggcacggtaaaagcttcgtcgtcgagaaaggccgccttgcccgcatcgatcgcggccacccgcgccagcgctgcgtcgatcaggcgattgttgcttttgatagcgcaccacgaaggctggcgaataatgcgcaccctccttgctccagccattggccgacgcgtaaatatcgagcgacggatcggtgcgctttccatccgcttcatccacaatcgaggcgtcgaggctgagcaggaccatgcccgcgtgcccccagttggaatcgatcagcattacgccatcggcggctggcatgccggccagattgtccgggtatttggacaggcgcgccgcctgctgacaggatgcaacgccattttcggcgatcatctgataggcgctcataatcgtcgcgccgccactatggccgaacaatatcaccttctggatgcctggttgcttgcgcagccagacgacaccttccttcgcttcggcaaggatgcggtccagttgaccttcatccacggcgttgatcttgttggtgctgttgttggcgcacggcacggtatagccgcgctgcgacaattgggtgcggggcgggaagctgagatagtcattattggcatgcatcacgaagatggcgatgcctttcttcgccgcgtcggcagccggctcgtacaggacgcccggcacgcccggcgcgatcttcacatagcgggtctgcacctgagccatttcggcaatagccggtgcagcgagcgtgctgacagcgacagccgccaacagggacagggcgaaaggacggtgcatggatcaggcatgcctcaagtcgattttcttggcaggagcattgcgctccgttgctgaaccgacttgtgaacgaggcgaccaaaccgaaaatgaacaggggtaggcggccgaaactggacccgatggatcgacattctgtacgaagcaaaaaagcagtggcgggtaacgcacctgtggaatggacaggtcggaacgggatcaaagcgcgatcaggcaggtgatacgccttatatatcttcgacagccaatatgatcctgacgtcatggtcggccattcaatcgctgaacccgcctatcgctccaacttggtcgccagcagcaccagggtcgtcgtccgctccatgccgtcaaactgaccgatatcgtcgatgatatcattcagttcggccccatcatcggcctccagcacggcaatgatgtcatattcgccgctgatggcatggaccgcctgaacatggtcgatccgcatcagcgcctgctctatgtcgcggcgatggcgcggcagggtcttgatcatcatgtgcgcccgcacccgactggcggagaagaccgagccgagacggatcgtatagcccgccacgatgccgtcttcctccagacgggcaatgcgcgaatagagatgcccccgcgatacaccgagttccttggcaagctgggcgatgggctggcgtgaatcctgtcgcaacaggctcagcagccgttcgtccaactcatcgaggcgcagaccgccatggggcatcatcgccccatggcgtccatcgcgccatgcggattaccgttgcccgtcatatagtcatcatatcgggccggcagggtcatggcaaaggccgttcgccatccttgctcaaccgcacctgaccagcctgcacgtcatagagccgctggaaggtcggccgatccacgcgcccctgcggcagatgcacgaccgatcccgcgccaatgcccgtgacggatatggcggaagcattgagcggcccctgaactgggagattacgcagcgcggcaccatcgaccagccatgccccaccttgcggatcggtggcgtagatgcgcgccaccccatccggttcaaccgccagagacgcgctttcatcgacgcccagccccagcatggcaggctgatccaccggacgccccacctgcgccttggccacgaaggcgaacaatcgacccaaccgatcccgctccttgaaatgggtgtcggtcacgatccccttgagcagcgtcaggtgcagaaaatccccttcgatcgtgttggcaggaccgaagggctcggccagcgcttctgcgctggtgatgctgccatcgtccatcgcaccgtaaagcttctcacccaacatggcgaggcctgcactggtccccgccaacggcttgcccgcggcgacatgggcatccagcgcttcggcgaccggtgtgccgcgccagaagcggacatagcgggcctgatcccccccggcgatgaagatgccgtcggcatgtttcagactggcgagaatcttcggatcggtcgccgcactgcgatcggcaaagacgaatgtttcggcagactggatgccacccagcttgtgatagaattcctcgccgatctgccctttctgcgacgcccgcaatatgacgatatggccatgcccagccttcgcgaagaaccatttcatggcatcggcattgcgatcgccaccgcccagcaacagcaggccgccggacactggatcgggcgttggcgtcgtcagcttgcccagttgataatgacgataggatgcctccttcgcctgcgccccgctcatggttaggaccatggcggccaatgcgatggcagcccccagcgcgcgtcgcatagcaatctcccgtccgatcagatgcgcattttcatgtcacatattgtccacaggacaaaacaatatgttccacatctccatcacaatgattgaatcatacgcaggtttctgatgtaacaatcggaaatatggggatgcagaggcgcgtggggcgccatccccggaatgggggcaatatgaacttcgcggaacgccgtatctttcgggcgatgctgggcctgggctgttgcctgccggcactgatcggcagcgcgacggcacagactggcgggcagccggagggcgagccggaaatcatcgtcaccggatcgcgcattccccgcgcggcgcaggaaggaccggccccggtgacgaccatcaccgccgatacgatccgcgctaacggctataccagcgttcccgacatcctgcgcgccgtcacccagaatggtggcgaaacgcagagccagcaaagcttcagcggcgccagcttcacccccggcgcgcagcaggtcgacctgcgcgggcttggccccaatcatacactggtgctggtcaacggccgtcgcatcgcggacttccccctgccctttcaggggcgcagcaacttcaccgatatttcgaacattccattgggcctgatcgatcaggtcgaagtgctcagcggcagcgcatcggccatttacgggtcggatgcgattgccggcgtcatcaatttcaagctgaaggacaaggtcgacggcacgacgatcgactatcgtgccgggcggacggaacatggcggcggcgcatcccaccgcatcaccgcgaccacgggctggtcaaacgatcgcttccatatcgtcgcgggtggcgaatatctgctgcaacgcccgatctgggcctatcagcgcaagattcaggacagcacggccgataatcccaccactgcctcgcccctcgcccggcggaccttcctgcgctacaatcccgatgccgacgaatatgtcgatccgggcgcggcgacctgcggcgctttgtccggcctcaatggcgggtcgacctattatgcgtcccggccgcgctacggcgcctacgacgacgagcttgaagattatggtcccggctatttctgcggcagcaacacgtcgatcggctatggcaccgtcatttcacgccgcgaaggcttcaacggcttcgcatcggcgggttacgaactgtccgacaatgcgcaactgttcgtggacgcgcagttcggcatcagcaaggtggcgctgatgtccgatgtgctcaactggggctatcagaatagcgcaggcagcagcgacacgaccttctacaatagtttcgatggccagctggacgattggtatcggcagttcacgccggaggaatccggtggcttctccaaggtgatgacccgcaaccggcaacagacgttcagcatcacgccgggcgtgaagggcgagtttggcggcacatggaattacgaactctccttcaaccacagcgaatataaggcgaaggtcaaattcccgcaggtgatcgcggccaaggccaacgccctgtttctgggcgaacagcagggcgtggatgaagatagcggctatccgatcttcaatgccgatcccgcacgcctctacacgccgctgacccagtcggaatatgagagcatcaccgcctacagcgtctataatcccaaaagctggaccgacaatctgtcggccacgatcagcagcaccgaattgtttcagctccccgctggcccggtcggcttcgctgccgtcgcggaactgggcaagcagggctatgacctcaatcccgatccgctggcgctgaccgactattattacggcctcaaggacagcgacggtcaaggcagccgcaaacattgggcgctgggtggcgaattgcgcgtgcccgtcaccagcttcctgcaactgtcgggcgcggcccgctatgaccggttccgttttggcggtagcagtgtgggcaagttcacctataatggcgggatcgagctgcggccgaccagcacgctgctgctgcgcgccgcctatggcaccagcttccgcgcgcccgacctgcattatgt

SEQ ID NO: 3071 - DNA, 23300 bp, synthetic construct
  misc_feature 1..23300: note = Synthetic
  source 1..23300: mol_type = other DNA
gaccgcctttgccggcaataatggcacggtcagtttccgcgccgacccctatggctgggacaagctgctcgcgcagaagatcgaggcatcgagccgccgcgtcgatcccaccgccgccccctctcccgctatcgcatcgaaggactgacccatgcgcaaaatcgcccttttcgcccttgccggcgccctgaccctggccgcttgcggcaaaaaggaagagccggcgcccgacgccaccaacaatcttgtcgaaccgccggtcgaaaatgtgatcgtcgaggaaccggaagcgccgctgcccgaagtgcagaacaatgccgccgcgactccggccgccgcgccgcccaaagtatcggaacatcagcagattctggatgacgccgaagccagcgggatgaccgcgcgcctgcccgaaggcggcgaacagagccagcctgcggacgaagcgagcaagacgggcgagtgataccccgcgccccggtcttggaccggggcgtcgcctttgctatattgcggtcatggatcgccgcaattttacgaagttcgctttaagcggactcgccttttcgtttctgtcggacagcatgggccgtgccgcgcttcccgtgacaggccctgaacccgtgacaccggcttcggttcccacggtgccggccacgccgcgcgcggttgcgcagcagccatatgccgcgctgctggagcgcgccagggcggcgctggacaatcatgcccatcatttcgaattgcgcgatcggctggcgatcgtcgatttcgacgcgccgtcgaagaatccgcgcatgcatatcgtcgatctgatcggcgggcagaccagcagctatctggtgtcccatggccgcgggtccgacccggcccattcgggctggctgcacagcttttccaacgagttcaactcgctggccagttcgtccggcgcgtttaagacgggcgacatgtatttcggccagcatggccgctccatgcgtctgctcggcctggacgcgcagaacagcaatgccgaatctcgcgcgatcgtggtccatggcgcagattatgtgagcgaggaccatgtcgccgcctggggcaaatgcgggcgatcggaaggctgctttgccgtcgcgccgcatatcgtgccgcaggtactgggcctgctggggccggggcggatgctctatgccgacaagattggcaatggctgaatagctggaccggctggtccatatattgccagtctggaaagcagcctttttttcctgatccgttcgcttcgagcgaagtcgagatgcggctgatgccgtgctttgggtttctcgactacgctcgaaacgaacggaggaatttccgagaaggtctgacttgattccgagtcagccctcggtcgcgggggcgccggtcatcgtttcgatctgcggcttgttggtcgcgtcgatcgatccgtctgcgatcatcgcctggcccatgctgatcgcttcgtctcgaatgccctcttccgtgccggtctggctggcaccgaccaaggcggccagcaggatattcttcgacgccgcgtcgccgggctgatccgtgaccgtctggcgcgccagtttcaacgcttcggcgaagaagggatcggcaccgccacgatcatgatcgcgcagattctggttgcccaactggatgaggatgccggccaggatgttgcgactggcgatatcggtcggcttggcctccacgaccttgcgccaatagggcaccgattcgtcgtagatggggataacccgttccatctggcccagcgcaccataagcggcagcctgcgcatagagggcgttggcgaggaagttgagattgtcgattttcgccggatcggcctgcgccgccacgcggatggccggcaatgccgcgtcatatttggcgaccgcggtggcattgtcgcccttttgctgcgcggtctggccggcggtgaaatcggtcacggccttgttgaaagccgcgatttccgccgatgtcagttcccgcgcgacggggacttccgccgcaggtgcggcctcctccacagggggcgcctctggcgggggagcgtcaggcacctgctgggcaaggaccggggcggaaacggccatcagggccgtcaggatggattttgcgaacgtcgaggccaacgtcgaagtctcctatagcgttgcagcgggatggatgccggacataggctgtccgtgctggcggcagaatgaacgaagcggtgccccggttccagtgcttgttcttatacccggcttaatgcgcaaaaagcgccggcggtggcgaagtcatcggcgcggcggacgctgcgcgcggcggcctccgcatcttccccccattgttcgacctgccaggcttcgtcgatctccgccgcctcccatatggcgccgatctcatggccgccctccaccaccgcaagggcgcagaccagcgatccgctgagcgtcaccagcgtcgacaggccggtgaggatgaaggggtcgagcgcgaccaccgccgcgcccagccggtccagcgtctcgtcgggctggggcacggggatgatcccctgcgtcacggcgaaggtcacgtcatagcgaccccgcgcccagtcgagcaaaggttcccaggccgcggcctgccgcgcgaccagcgtgtcggggccattggcacgatagcagagcaggtcggactgcgcatagcgggccacgccctcggcaaagctggcgcggttgggcgcaacatggtcgatcgccgcattggcaaggccggtcatcggcatggaggcaggatcgacctcttcaccctgcgcgcgccattcctgcgcaatcgcgtcggccagcacggcggtgggcagggtcagcgacgcgcgcgccggggtgcggaccgggcggccatccagccggatggcatggccgccctcttcggccaacacggtcacatcggtgtagaaacgcttcattgcggcggcctcttgcggaacagcgccagcagcaggcgggggacgacgacgaactggaacaggccggtgacgaccatgatcgcgccgaacgccttcgccttgtccccctgaacccaggtgaagcgctgcatgatggcgaggaagccgaacatcacgatgaaggcgcccgacaggcggaacaggccgatcgcaaagtggcgctgacgcgcgacggaatcgggattgggtggaggcggtggcggaagatcggtcatggcgcgccgatatggccgcgcaattgcgcgctgtccatcgccaccgcatgggcgcccgccgcgatcagctcgtcgggcagatgatagccccaggcgacgccgatgctgcgcacgcccgcagcccggcccatgtcgatgtcgaaactggtgtcgccgatcatgaccgtcgtgtccggcgcggcgcccgcttcggccatggcggtcagcagcatcgaaggatgcggcttggacggatggcgatcggcggtctggagcgtcacgaaccggtcgatgatgccatgatgggtaaggcagaggttgagaccccggtccgacttgccggtcgccacgccgagcagccatccggccgcgtccagttccagaaccaggtccacgatgccgggatagagcggttcctgcacgccctgttcgcgccgcatcgcctggaacgccagcttgtagcggtcggcgaggtgatcgtggaagtccgcctctgcgtccggcagcagccgcgccatcgcgaccggtaacgacaggcccaccgccgccaggatcgccagccggtcgggcgggggcagcttcacatcctcgaaggcgcggaccatggcggtgcagaggctgtgctggctatcgaccagcgtaccgtcgcaatcgaagacggcaagtctgttgctcatgcgcgctccctcatacggcatcggctcgcgtcaacgtctcgcgcatcaaagcggccatggcgccatcgcccgccgccgccatgccgtccgccgcgccgctgcgggcggccggaaccttattctggcccaacttgcgtgtgccgcgccagtcggtcacctgcatttcatagccgatgatggcaccggccatcctgtcgaacaggccgggcgtcattttgtcgcgggtccagaccggcttgggcgcgagacgggtttcgctgtccagcgagagggcatcgatcaggtccggcagcgcgtccgccggcaaagcccggacatcgccttccagttcggcggcgacataattccaggtcggcacctgatcggccagcccataccagtcgggactgacataggcatgcgggccgttcaccacgaacaaagcccgcgcgccatcgacatgcttcgcgagacgattgccgcgcgacaggtgaaagccgatccgccgatcatccagccacaccacagggatatgggcgacggccgggccgtccggcgtctgcgcgaacagcatgccgaatcgctgcgcgccgacaaaggcccgcaatgcctgctgatcgcgccagccgaatgtaggatcgggatgcaccctcgcctctcccgtcagcgcgatccgcgcgaccgccgttcgcccttgcgatccttgcggacctgcttggcatgttggcgcgcgaatttcttttcatcttcgcgggtcggggtccggtcgatctcatcgtccagcggcatgtcgcccagcttcagatcgaagcccagttcggtcaggctgttggcgaaatgggtcggcaggtccgccatcacgtccacacgcccgccatcgggatgatccacccggatacggcgcgcatgcagatgcatcttgcggctgatcgtgccggacaggaatgcatccttgccgccatatttgccgtcgcccacgatcgggaagccgatcgccgccagatgcacgcgcaactgatgggtgcggccggtatagggttgcagttcgacccaggcggcgcggttgccggcgcgctcgatcacccgatagcgggtgcgggcgggcaggccctcttcctcatccacatgcatcttttcgccgccagtgcccggctgcttgccgatcggcagctcgatcatgccgtcgttgatcgacggcacgccgatgaccagcgcccaatagactttgcgcgcggtgcggctggaaaaagccttggcgaaatgggcggcggagcggctggagcgggcgagcagcagcgcgcccgacgtatccttgtccagccgatggaccagcttgggccgcgattcggcgtcgaacagcaggccgtcgagcagcttgtcgacatgctcgtcggtcttcgtgccgccctgcgtggcgaggcccggcggtttgttgatgacgatcgcctgttcgtcgcgatggatcaccatgtcctgcacataggcgatctcgtccggagtcaggtcgatgacgcggacgcgcttgggacgctgggccgcttccggcttggcttcggccgggggcacgcggatcatctgaccttcgacgatgcggtcgcccggcgcggcgcgcgcgccatcgacgcgcagctggccggtacgcgaccagcgcgacaccaagttgaagccgacatcgggcaggtgccgctggaaccagcggtcgaggcggatgccgtcatcgtcgggctgcacgcgatattgccgcacgtcgagcgagacacccttggccgggttgggcttggcaggctttgtgggcgcggccactacgagcttggccgcagccgattttgcggcggctggcgccttgggcttgaaggctggcttaccgtccttgaatgcgggtttaccgtccttgcgcgggccggcgggcttgccgcggccggacggagggccggctttgcgatcgccgggcttgcggtccgaaggccggccgcccgaaggccccttggcgaagggcgctttgcccgcaggcttgccgccgcgcggacctgcgccgccggtcttggctggaggacgccccttcatgccgcagcactccgcatgacggtcaggcccagcgccagcgcgccgaccgcgccgatcaccgatgccaccgcatagcccatggccatcgcagcctggccgcgttcgatcatcaacatggtttccaggctgaaggcggagaaagtggtgaagccacccagcacgccgacacccagcaacaggcggatcggttcgcccgatgcggcgctgccgcgcgccagccagccggcgagcagccccatggcgaagccgccgatcaggtttacggcaaaggtaccccagggccaggccgcgccgggcatcatttgccccgccagccgaccggtcagatagcgcgccagcgtgcctagcgcaccgccgcccatcacaagaaacatattggtcatgaaacccgccctatagcgattccgccaaaggggaaaggctgcaatacccctctttccgttcggttcgagcctgtcgagaaccaggcgccccgttctcgacaagctcgaaccgaacggatctgggcttagatggtcgccgtcacatctgtagctgggcgccgatggacggcgatgcagctgatgacgctggccaccaccagcgcgaaggcggcgctttccagcagggtcggcaggcgttgttcccacagaaagccgtagatcagcgcgaagccggtttcgaacaggatcatctgccccaccatggtgagcggcagcaggcggctcatgcggttccagagcatgttgccgacgatcgatgcgaagagtgcgacagcgagtgagacagataaaaatttggtccaggccgccgcatcatggtggccgatgcccatggccagcgcgaccggcagcaacagaaacgcctgcgcaccggtcatcaggccgatcgccagattccagtcctgcgccgatatgccgcccagacggccgagccagcgactgttgccgaccgcaaaggcgctccaggaaataagggcacccaccgcacagagaaagccgatgatccgggggccgagcgatgccgtgcccggcaccgcgatcgcctgccagccgatgcacaatgcgcccgcaccgcagaacagcagggagggcgccagccggcgcagcgataccgcgccgcgctcgcggctgccgatgatcgtgaccgccaccggcaggaagccgatcaccagcgaggtcatggcgatgccgcccatctgcacggcggtcgccagcagcacataataaaagagattgccggccagcgcgagccaaccaagcgcccaccaggcacccgaacgcatctgcgcgaccaggctgcgccagcgcggcgcgatcaacaggccggacatcaaaccataggcaaggtaacggccgatagcgaggtcgagcgggcggaaatcgcgcaccagcgccggggcaaggaagaccagcccccataaggcgcccgcccccatgccgcacaggatgccggtcagatgcccactctctctggatgtcccgtccatgccctgcccttcgatcatgatgacgagaattatcatcattgcagcgggaaaaatgctcttgattgggcatgtgattgcaacaattactcgatcatgcccatcccgacgccccctgcccgctccctcgacccgttcgaccgggcgattttgcgaatcatccagcgtgacaatcgcaccccgcagcgcgccatcgccgaggcggtgaacctgtccaccgccgccgtgcaacgccggatcgccgcgatggaaagacagggcgtgatcgccgccaatgccgcgatcgtcgatcccgatgcggtgggcctgggcgtcacatcgatcgtggaggtcaatctggtcgatgagaaggcggcgaccgtcgatcgggccaagacgctgttccgtaacgatcccgacgtacagcaatgctattatgtcaccggcggccgcagtttcatcatgatcatcgtcgcgcccgacatgcgcagctatgaagcgaccacccgccgcctgttcgcggagaatgaagcggtggcaagctatcacagctatctggcgctcagccgcgtgaaggcagggatggaattggtgatcccctgatcgggcggcatgccatgggcaaaaacaaccccgccggagataactcaacggcggggccaaggttcagggagtcactccaaagggggaagagtgacagggccaacataggacgatagaatgaaggttcaatgactatgccggataaaaatgccgggcaaccactggcagcaaggtgactttacagcttatgcgcgagcctacctccctctccctcaccttcgactgctggaatctcgggctggaggcttgctcggtcatcggcatgcgcctgccccgattgatgaccggcaacgccgccgccatggccgaagcccagctgatggtcagcgaaaagctggacgcggtcgcccggttgcagtggaagatgatgaccggccagctcggcacgtccggccccgccatgctggacgcgtcggtcgcccattatcgcaaggcggtgcgcaggaatcagcgccgcctgggcggcacgcaaaagagccggtaacagccgaggatcaggcccgccgcaattggccgtccgccgccggaacgacggccggcatggccagtgcgcggcgaacacagacccggttgcgccctttttccttcgcttcgtacagggcgctgtcggcgcgggcgatcgcttcatggatcgacggatcgacccgatgcaatgtggtcaggccgaaactggccgtgagcgattgcgccaggcccagccgcgaggccgcctgctcggcgaaatggaggcgcacggcctcggcgatactggccgcggtggcggcatcggtggcgggcaggaacagcagaaactcttcaccaccgaaacgcgcggcgacggcgccgggcggggcaagcgtgcggagcatgtcgcccagcgtgacgatcacccggtcgccggtcgcatggccatgggcatcattgaccgctttgaaatggtcgatgtcgcaggcgatcaggatgccgcccttgcgacgcagccgtgccaccgcttcgtcgaagccccgccggttgagcagccccgacagcggatcgacatgggcgtcgtgacgatagcgggcgataaggtcgagcacgcaggcggccagcgcggatagggcgagaaacaggccgaacatgcaggccagcgcctgcatcaggaaggcatagtcgctgtcgcggaaggacacgccgctgggcaaggtgaaggacacggtgctgccgcgcatcagattgtcgagcgcgacgagaaccgctgcggcatagagcgcccggtccggccagccgcgcatttgcccgcgtgcgaccaccagcggcagggcaatcagaaggaagcaaccgaaatcggacgacaccagttccagcgggacatggccgatcatcatggcaaaaccgcacagcgccacagacccggcccatatgaccaggcgcaggcgcaggatccagttggcgcgccagcggtcgagcagcgcctggctgaacaacaggaagccggtggcgaagaaaaggtccgcgacgatgccccacagatcggtcggcagcgcctgaaacgcgaccggcacggcaaagccgcccgcgacgctgaagaagccgccgctccaccagcccgcaccacgcgcgccccagccccagacgatgaggaaggcgactccgaaactggccatcatgataggcaggaaaaaggcgaaattctcacccacgcggcggtcgaatccttcatgcgatgcggcgacgggcatgcatggcgcgaccgtccgatcggcagcgtcttaggcgcggatgcttaacaaaggctttgatccgcaatggcatgcgacgcgccgtcgcgttcgcgcagcggcggccggaacgagggcaaggagaaatcaaagatgccaagccgaaggccgcccgacacaaaaaaggcgacgccggagcgtcgcccttatctggtgcgtactgacacttgttaactgccagaccgcgatctctgaggtgcctagtctatcgccgcttatgaataggtcaagtaactttctcggatgactaggcattgccttcacattggacttgaccttcccgtcttcattttcaatgtcttggatatcagggggatggcagatttatgacacagcataaaatctggcgcttgggcgccgaccttgggaccaattcgttgggatgggctgcgatcgagttgagcgcgccgatcaatggcgagcctgtctccattcttgccgcaggctcgcggatattcagcgacgggcgcgacccgaaatccggcgcatcgctggcggtggatcggcgcgatgcgcgggcgatgcggcggcggcgggaccggtttcagcagcggcaacgcgccctcatcaaatatctgatcgcggacgggcttttcccggcggacgaggcggcgcgcaaggcgatggcggcgatcgacccctatgccgcacgcgcgcgggcgctggacgaagtgctgaccttgccggaactgggccgtgccctcttccacctcaaccagcggcgcgggttcaagtccaaccgcaaggccgatcgcggcgccgacgacgatgccggcaagatcgcgaccggcatcgaccggacgtgcgacgccatccgcgacgacgaagcggcggctggcgcggagccgggcagctggacctatggcaaatggctgtacgaacggcgcctggccggcaagagtgtccgcacgcgcctgcgccccgaaagcgatgaaggcgccaagggcgacggctatgatttctatcccggccgcaagctgatggaggaggaattcgacgccatctggcaagcacaggcgccgcatcatcccaccgtcctgaccgacgaagtgcatgacaggctccatgaaatcatcttctatcagcggccattgaaggcgccccgcatcggcatgtgcacgctgatcgccggcgacgagcgcctgcccaaggcgcacccgctatttcagcgccgccgcctgctggaagaactcaacgcgctgatgatcgtgcggcccggcgaagtggcgcagaggctgacgcgcgaggagcgcgacatcctgttcctgaaactgaaggacaagggcaaggtcagtttcgcgagcttgcgcaagacgctgaagctcgatcccgatgcgcggttcaacaaggaaagcgagaaccgcaccgacctgaaaggagacgaggtcgcagcggcgatgggcgccaagacgcgctttagcaatcgctgggcgcatctgtcggtcgaagagcaatgggatgtgatcgcgcgcctgagcgaagtcgagagcgaggcggaggatagtgcgtttcgccaatggctcaccgaactatacgacctgacgccgcagcaggcccgcgccgtcctgaatgcgccgctgccgcagggctatggccgtttcggcgagacggcgacgaggcggctgatcgacgcgctgcgcgatggcgagaaggacgggcgggtgatcgtctatagcgaggcggtcgtgctggcggaccttggccatcatagcgatcggcgcaccggagaaatattcacggacgaagaaggtcgccagcaactgccctattatggcgtggcgctggagcggcacatcatgccgggcacgggaaatccgtccgatccggaggaaatgcgggtcgggcgcctgaccaaccccaccgtgcatatcggcctcaaccagttgcgccgcatcgtcaatcgcctgatccgcgcctatggcccgcccgccgagatcgcgatcgaactggcgcgcgaactgaagctgaccgacgaagacaagaagcggatcaaccgggagaataatgataatcgtttgaatgcggagcggcggtcggaaaagctaatcgccatcggccaggctgacacgggcgccaaccgcgcgttgctgaaactctgggaagagctcaatcccgccaatgtgctggaccgtcgttgcatctatagcggccagcagatttcgatcgacatgctgttttccgcagcggtcgaggtcgatcatatcctgccgttcaccgcgacgctggacgacagcaacggcaacaagatcgtctgcctgcgcgaaaccaatcgcgagaagcgcaagcggtccccttatgaagcctggggccatactggtcgctgggacgacatcgccgcccgcgccgcgcaattaccgcgcaacaaacgctggcgcttcgagccggatgcgatggaaaaattccgggacgaaagcggctttcaggcccggcatctggtcgatacgcaatatctggcccggctgtcgcgcgaatatctggcgacgctctatcccgaaaagggcgaaggcagcggccatatctgggtctcgccgggtcggctgaccgaaatggtccgacgcaagcttggcctcaacgacctgctgcccgaccataatttcggcggtggcgcggatcaggcgaagaaccggctggatcatcgccaccatgcgatcgacgccgtcgtggtcgccatcgtcgatcggcggatgctgaacgaaatcgcgagggtgtccggccaggaaggcgccgaggggcgcgagcggatcatcatccccgatccgtgggatgggttccgcgacgacctgcgcaccgccgtcaacgccatcaccgtcagccatcgcaccgatcatggcacggcgtcgaaggccggccttcccaagggtcaggacgcgaccgccgggcggctgcacaacgacaccgcctatggctttaccggcgaaacggacgccaagggcaacagcatcgtcgtgcgccgcgtaccgttaagcagcttcaagaaactggccgacctggagcgcgtgcgcgaccccgatctgaaggccgcgctctaccagcatctcgatgggctggagggcaaggcgttcgagaaggcgatcggggaatttggcgatcgcgaatggcatgcctatcgcaatgtccgccgcgtccgcgtggtcgaaccgctgaccgtgatcccgatacgtgaccggaatggacgtatctataagggatataaaggggattccaattatcgttacgatgtttgggaattaccggatgggaagtgggtgaacgaagtcgtttccatgttcgatgcgcatcagcccggctggctgtccggcatccgtgcggccaatccgacggcgcgcaagatattgagcctgcatcgcgacgatgtgctggcgatcgagcgcaatggcggggaccgcgaattggtgcgcgtcgtcaaattttccgaaaagcagttcgccgttgcgccacccaacgagggcggcgcgctgaagggcagagacgcggataaggaagatccgttcaaatatagctatccttcgcccaacacgttgaaggcctggcacgcgcggcaggtgcgcatcgatgagatcgggcgcgtgctcgatcccggattcccgccgcgcaaggcccgtcgcaagacgcgcaaacccggctgacgacaggtagcgggggcgggcaatggatcggatcgtcgacatcgccacggacggccgccatttgtccgcctatcgcggcttcctgatcgtgtcggaggaacgcgtggaagtcggccgggtgccgctggacgatgtcgccgccgtgatcgtccacgcgcatggcgttacctggtcgaccaacctgatcgtcgcgctggcaaaacggggggcggtgatgctgctatgcggcagcaatcatgcgccggtggcggtgtgcctgccgctggacggccatcatgcgcagaacagccggatgcgagcgcaatgggacgcgggcaagccgctgtccaaacagctttggcggcgtatcatcatcgccaagatacgctggcaggcggcggtgctggaggccaatggcgtatccgcctccgccttcgacctgctggcgcggcgggtgggatcgggcgatcccgacaatgtcgaggcacaggcggcgcggcgctactggccgctgctgatggggaaggatttccggcgcgatcgcgatgcggaagggatcaacgccctgctcaactatggctatacggtattgcggtcgctctgcgcgcgggccgtcgtcgcatccggcctgcatccctcgatcggcgtgcatcatgccaaccgcaccaacgcctttgccctggccgacgatttgatcgagccgttccggccgctggtggacgcgctcgccatccgcatcgtagcgcgcggaacggcagaggtcacgcccgaggccaagcgcgccttcgctggcctgatcgcgctcgacctgccggggacggagggcaccaccaccgtggcgggcgccgccaatcgcgcggcgcaaagcctggcccgcgcgtttcagagcgggcaggccgccgacatcctcctgcccgccccgccatccgccgtggcactggccggtctcgattcgttgctcgcatgagcgccacccaactgagcggataccggctgatgtggatattcgtcatgttcgacttgccggtgaccacccgggaacaggcccgtgcagcgaccaaattccgcgaatttctgctggatgagggttttgaaaaaagccagttttcggtctatgctcgcttctgcaacggcaaggaacagttcgaagcctatatgcggcgggtggaagcaagcctgccggatcgcggcgacatccacatcctcagcttcacggaccgccaatatgaaaatatcgtgcgattttcaggacagaagcgacgccggcagcgaaaaaatccggatcagctggcgctattctgatgattcgcgcgattttatcctggcggatcggcggatattcgcattgcgtttcaatgcaatatccaccgatccatcatagccgctcagagatcgcggtccagcggcaactgccccaacaattaccaagcggcgttttcaatcatagccgctcagagatcgcggtccagcggcaaccggtaaaagccacaagggatcttcgacggcgatcatagccgctcagagatcgcggtccagcggcaacgcgacgcagctgctgagtgccggaaggaccatcatagccgctcagagatcgcggtccagcggcaacggtcggccgccagctatgacgaggtgatggatcatagccgctcagagatcgcggtccagcggcaactggaggccgccgcatgaagcccatgacccaatcatagccgctcagagatcgcggtccagcggcaacggtcagcgggtcagtctcgtagctgtagagatcatagccgctcagagatcgcggtccagcggcaaccctcgctcatgcctgcgcctccaatgcttgatcatagccgctcagagatcgcggtccagcggcaacatcggccgctatccgccggatcagcacttgatcatagccgctcagagatcgcggtccagcggcaaccggcggcgcagacgggggccggtcaaagcgatcatagccgctcagagatcgcggtccagcggcaactgcgagcgcgccttcgacgccagcctgacaatcatagccgctcagagatcgcggtccagcggcaactgctcaccgcgcgccagcggctcgccaagcatcatagccgctcagagatcgcggtccagcggcaaccgccgcgttgtattgccccggcttggctggatcatagccgctcagagatcgcggtccagcggcaacccagctggtgcagcacaccgacgcgccgcaatcatagccgctcagagatcgcggtccagcggcaacaaggtggcggagcgggagggattcgaaccctcgatacgcttttgacgtatactcactttccaggcgagcgccttcgaccactcggccaccgctccgcatttgcactggaggcggctccctatcgcgcggcgcgcggctaggcaaggggggatggcaaggcgctttactttatctttcggccgctgtctgatcgggttatgaaccgccttctcccactcgcgctatccgccatctgctttatggcgccgatggcagccgccgccacgcctgctgccgtggtggcgcaggcccccgccgccgcctggcggcccattgccgccgacgaactgctggtcatgacgctggaaggcggcaagcgcgtcgtcatccagttggcacccggcctgtcgccgcgccatgtcgccaatatcgtgaagctggccaaggcccattggtgggacggaaccagcatcaaccgggtgcaggataattatgtcgcgcaatggggcgacgcgaccgagaagaagccgatgccgcccggcctgtccgccaccagtgcggacgattatggactgccgctggcgaaccggcggctggcgatcacgcccctgccctatgcagacccctatgcgccctcgaccggctatgtcggaggatggccggtggcgatggacggcagcgccgcatggctgccgcactgctatggctatgtcggcgtagggcgcaatctgtcgcccgacgcggggacgggggcagagctttatgcggtgatcgggcaggcgccccgccagctggatcgcaacatcgcagtcgtggggcgcgtgatcgatgggatggcgacgctgtccagcctgccgcgcggatcgggtgaactgggtttctacacgccgcaggagcatcccgtgccgatcctgaccgtacgtttggccagcgagttgccgcaggccgaacagcctcgttttgagatgatggacaccggctcgcaaagcttcgccgactatctgcgcctgcgcgcgaaccgaaaggatgatttctacgagcggccggcgggcggcgtggacctgtgcaatgcaccggtacctgtcagggcagcgccctagccaagggaccgtcgcacggcctccacgaccgggtacaatgttgaatttgaacggatcgtggaaggtaaatggcggagagggtgggattcgaacccacggtacccgctagggcacgccgcatttcgagtgcggtacattcgaccactctgccacctctccgcagaaggttcaacaggccgttcaaggcgccgcattcccggtcgaggggcggccattagcgaatgaattcgcacttgccaagcgctctttcgggtatttttcttgtgtccgcgcaatagcctcctaaattggtcatatgagagacacgattcagattttcggcaccggcatcaccgctccgccgatcgtccatgcccgtttcagcatcggcgatgtggtcaaacaccgcatgttcggctttcgcggggtcgtgttcgatatcgatccggtcttcgccaatagcgaggaatggtatgaggcgatccccgaacaggcccggcccgacaagcagcagcccttctatcacctgctcgccgaaaatggtgaatccagctatgtcgcctatgtcagccagcaaaatctggcggcggacgacagcgacgaaccggtcgatcaccccgccatcaccggcatgttcggcagctatgcggacggcaaatataatctgcgcccgctccaccgccattaaggcgaccgcgcttgacgggcggaaggcgctggctgcgctgctgatcgcctgcgcggcgtcggcgagcgccgttgccgctccgccgcccggtccggccgcttcgctggcgcccaatgccgatccggccttccccttttccagggagatagacgctttcgccagggcgaacagcgccggactaccggtgcgtgacgccacgctgttcctgggcagttccagcatccgcctgtgggacatagccggcagcttccacgatatcggtacggtcaatcgcggctttggcggcgcgaccacggcccatgtgctgcattattacaagcggctgctgccccccgtgccgccccggtcggtggtcgtctatgtcggcgagaatgatctggccgccggtacgtcgcccgaggccgtatcgcgcgacatattgacgctgctcaagaaattgcgggccgactatccgcgtgcttccattgcctggctgtcgctgaagcccagcccgatccgctggacattgcggcccaagatggcgcaggtcaacgccgccgttgccgcacgggccaaggcggaggggttcgactatctggatgtcggcacggtgctgctggcccgcgacggcctgcccgacgcatcgctcttcagaccggacggactgcatatgaacgcgcgcggctatcagcgctggaccggcctggtcgacaattggctggatcatttgccaccggtcgcgtcggcccgaaacgcctcctgattccactttccgattgatccacgcccaagcaagattattaccacccgattgatcaagctgccaagccaagggaaataaggtgatgacggacgtaaagggccagggcgcgcaaacccacgccatggccgaactgacgctgcgcggggtcatactcggcgcgctcatcaccctcgtcttcacggcggccaacgtctatctggggctgaaaatcggcctgaccttcgcgacgtcgatcccggccgcggtcatctccatggcggtgctgcgtctgtttgcgaccggcacgatcctggaaaacaacatagtccagacgatcgcgtccgccgccggcacgctgtcggccatcattttcgtgctgccgggcctggtcatcatcggctggtggcagggtttcccttattggctctccgcctgcaccatcgcgctgggcggcatattgggcgtgatgtattcggtgccgctgcgccgggcgctcgtcaccgggtccgacctcccctatcccgaaggcgttgccgctgccgaagtgttgaaggtcggtgccggttcgcgcgaggggctcgaggaaaataagcggggcctcgccgccatcgtcgccagcgcggtgtccgccgccagcttctcgatcatcgccaagacccgcatcctggccgaagaggccgccactttctttaagttcggcgcgggtgcgacctccgtctccaccagcttctccatggcgctgatcggcgtcggccatctggtcggcctgtcggtgggcgtcgccatgttcatcggcctgctgatcagttgggtcggcctcgtcccctatctcacctcgccgctgcctgctggtgcggaactgtccgacatcgtcggcaccgctttccgcatgaaggcccgcttcatcggtgccggcacgatcggcatcgcggcgatctggaccctgctcaagatccttggccccatcgtcagcggcatccgttccgctttggtcgccaatgccgcgcgcaagtccggcaatgccgccagcctcgacattaccgaacgcgacctgccgatcggtatcgtcggcggcaccatcgtcgccgcgctgctgcccatcggcatcctgctctgggtctttgcgcaaggtggcccgatcgccgccaatcctgtcccggtgatcggcctgacactggcctatgtgctggtcgccggcatcgtcatcgcttcggtctgcggctatatggcgggcctgatcggcgcgtcgaacagcccgatttcgggcgtaggcatccttgccgtgctgggcgcgtcgctgctgctggcggcgatctacggatcgggtaacagcgatccgtcgcagacgcaggcgctgatcgcctatgcgctgttcaccaccgcgatcatcttcggcatcgcgaccatctcgaacgacaatttgcaggatctcaagaccggccagttggtcggcgcgaccccctggaagcagcagatcgccctgatccttggcgtgttgttcggcgcgctggtgatcccgccagtgctggatctgctgaacagcgccttcggttttgccggcgcaccgggtgccggtcccaacgccctgcccgcgccgcaggccgcactgatctccgctctggccaagggtgtgctgggcggcgacctcgactggaagctgatcggcatcggcgccggcatcggcgtggtggtgattgcgatcgacgaactgctgggcaagtccggcaagctgcgcctgcccccgctcgcggtcggcatgggcatctatctgccgatggcgctgaccctgctgataccggtcggcgcactggtcggccatctctataatcgctgggccttgcgtcaggcgaacccggaatttgccgagcgcatgggcgtgctgatggcgaccggcttcatcgtgggcgaaagcctgttcggcgtcgccttcgccggcatcgtcgccagcaccgacagcgatgcgccgctggcgctggtggcggaaaatcactggtcggtaccgctcgccatcctggtcttcgccggcgtgatcgcgggcctctatgcccggctgaagcgctggtcgtccgatcccctgacctaaagggcagggataggttcgaccggcggcgcgttaggcctgttcatcaggaacgggactatcgcatgcctgaggaagaccaggcaccttcgtgcgggcaacgtacagagctgcgctccggcatgacttcgcccgacgcacacccccatgcacctgagagagaggatgaaaagcggggggaccaaatccccctcgcggctccaacccatggcgggccggggcggtcatccatgggtgatgcgccacaggatgtgagccgggtcgtgctgaataaaccgcaggccatgcgatactggacaactcgcttcgacctgtcggtcgaggagttgaccgaagcggtcgacgccgtcggcgacgatgtggctgccgtggcggcttatctcaaccaccctgcctgacggacaggccgcaacgaaaaagggccgcgcaatgcacggcccttttcttttggcgaggacgccggatcagaaattgaagcggaagcccccggtatagcggcgaccaaagcgttcccattccatcgtctggctggtgatgctcttggtcggcgtgccggatgcagtcagcaggctggccgggtctgcgaagcggcggcccggattgttcagcaggttcgacgcgtcgaaataaatctcgaaattcttggtgatcgcatagcgggccgagaaatcgagttcgtcatccgaggcccaataggtgtcgccgccatcgccggtagcgccgaccgtatccagccatttgctgcggttctgatattgcagacgcagcgacaggccatatttttcgtaatagccgccgagattgtagacgaaatcggacgtgccaggcagacgcattttgcgaccggcgatatcgaccttgctgttgttcagcgtgatattggccgaaacgccgaaaccacccaggaagtcgggcaggcccagattttcggtccatggctccagctgcaactgcgccgccgcttccaagccgtagattcgacccgaaccgccattgaccagaccgctgaagatatagttcgaccgatcgacgccattgctgttgagcgcgcccgagttgaaccggcgcgcggaggtgtacagcacgtcctcgatcttcttgtagaaggtgccgatcatcagatagccctgcggacgcatataccattcgaaataggcgtccacgccataggcgcgctcaggacggatcgccgggttgccgccggaaatggcttcgttcgtgtcgttgatgacgacattggggcgaagctgatcatagtcggcccgcgccgcgccgctgttgaacgacaggcgcagcttcttggtatcatcgacattatagttgatgtgcatgctggggaaagccagcgtctggctggcctgcgcaacctgcagcccgttgaccccgccgatggtggcgatggcgcggccttcattcttgatatgttcgacgcgcacgccgcccacgaccgaaccccagtcgtaacggaacgtgcccatcaggaagccggcgaacacttcttcacggacattgtagttgttgccgctcaccgggacgaaggcatagaggtcctgcgcctttgccgatgcggcgcgcatcttgtcgcggtcgaaatagtggaaggtgtagcccatcggcagttcacccatgaacggcgtgttctgcgaaaaatcggcatagttggtcggcaggcccactgccgcaaactgcgcggccgtattcaggacgatgttgttttcattggcgatcttgttgcgacggtcatactgcacgcccgccttgagcgtggcatgttccagttcccgcgacaacacgacgcggccggtataggccttggtcgtatcgactgcgtccagcacggtgaaggacgacagcggcttggtgaaatcgtcagccgacgtcaccgcggccccggccagatagcgggtcgggttgctctgctgaagcgtgcggttgagtatgataagcgactggttggggttggtgaaatcgtagctgacggtcgggcgcagcgtacgcgtgctggggctgtcccaggtcgcttcgccggtgaccgaacggtcatccttcgattcggtgtaattgcccacccacgacaatttccatgcgccgtcgccaaattcatgatcgccagccagtgtgttggtgaagatcgactggcggaacgcgcgcagcgtcgaacgctggcggatgtccacgccatagaccgtgcccttttcgggcgtgttgcccgaacagatgtcggcatagttggacgtggtattgaccgtgttggtggtgcaggcggcgctgctgttcgacaggtcggattcgcgatcgtccaggtcgaaacgataattgtcgcgcgcttcgtcgtcggtgaagatggtgtagaccgaccgcagcgaaatcatgttctgctcgtcgggcttccagtcgagccggccggacaccgaccagttcttgcgggtcaggcggtacagtttgttttcgacttcatgcgcccagaaacgggtggcgttgccggggcgggcatcacgggcgacctgttcacggtcaatttcgaaattgtccgtgatcatgttgcgttcgtaatagctgccggccagcagcacgccaaattcgccgatgccggtgtcgaagcggttcgaaatcaccgccgaaccttcatattccttgcggtcgcccaactcggcaaagcccaggccgcccttgcccgccagatggaagccgctgtaatcgaaggccgaacgggtcacgacattgacgttgccggccacggtttcacccggcatgtcgggcgtcaccgccttcgacacgatgatcttgccggcgatggcggacggaatggaatcgaaccgtgcgtcgcggccttccgggctgaccacgttgatgccgtcgaacgacagggtggtccagctcttgggcgcgccgcgcaggttgatgtaacgcgcctggccctggtcgcgctcgacgctgatgcccggcaggcggctggcggcctgggcgatattctggtcgggcaggcgaccgacggaatcggacgcggcgacagcgaccagcgaatcgctgttcttctgaatatccagcgcggcggcttccgattcggcgatcgggcggctgccggtcacgacgatggattcgctttcctcttcgcccaacggctgctgtgccagcgcttcgaccgacgccattgcgccgaacgcgatgccgcacgtcagcgcaagacgaacaagctttatgccgg

SEQ ID NO: 3072 - DNA, 23294 bp, synthetic construct
  misc_feature 1..23294: note = Synthetic
  source 1..23294: mol_type = other DNA
ggatgccgttggcgtcgatagcgacgcccatcggcttgtggaggccttcggccagcgtctcggccgacccattgctggccgaaagcaggcgtccgctgccctgttcggcgaagacgactgcgccgtccggggcgagcgcgacgcccatgaggcggtcatggccgtgggagaggaagtcgctggccccctcgcccggccgatagcgtgcgacgctgccggtgccggtggtgatgatccattcgcccgattgcgatcccgctgcaacgccgcgcatatagccggggcagccggggtagaagatcatgcccgctagttgcggcgcaccgccggggcggagcgtgtagccgaacgtgccgtccgcgacgaacagcgcgccatccgcacccatggcgaggccgagcggccattgcagcgcgcgcgggacgaccgagcggaccttgccgtcgccgagcaattcggtgatttcgccggggatgctggagacgaagatgcgatcgccgatgaagctgacattgtcgaggccggggccaagatcggcgaggatttcgcgcgtgccgctgatcgggtcgatgcgcagcacctggccgctggcgacctgggtggtgacgatgcggcccttgctgtcgaacttgaccgagtccggcacgccaaggtcgcctgcgacgacgtcatgcgcgccggtttccatgtctacgcgccagatttcattggcgcccatgacggggacatagagtttgccgtccgggccgacctgaaaggcgttggccatggggatattgtcgaggatgaggcggggcgcgccgccgtcgcggtccagttccatgatgcgcgcgcccatgcggcactcgcctgcgatcaggcggccctgatgccaggtgatcgggttggcgacgggcatgtcgccatagatgacgcgcgcttccccgccgggcgtgagcatcgacacgcggccttcggtgatttcggtgaggtagagattgccagcatcatcgaacaccagatcgtcgggcgcgacgatcgcgccgcccatcgggctgatggtcgagatggtgcctgtatcgacgtcgatcgcgctgacctggctgccgccgacctgggcgacatagaggcggccgtccgggccggtggcaaggccgttcgcgccgtagaggcggctggggggtgtgaggcgttcgaggctccacccttccgccgcggtcatgccgctgggcgcgatgcggctatccatatcaggcgtagccgagcatggatttgacttcgagatattcgtggaagccatactcgccccattcgcgcccattgccgctgcgcttgtagccgccgaacggggcgtggaaatcgaagccgccattcatgctgacccagccggtgcgcaggcgacgggccacggcgtggacctgggcggtgtccaaaccgttgacgtatcccgcgaggccgaaggggctgtcattggcgatggcgacggcatggtcgatgtcgtcataggggatgatgaccagcacggggccgaaaatctcttcgcgggcgatgagcatgtcgttggtgccgaggaagacggtggggcgaacgaaccagcccttctcgatgccttcggggcggccggggccgcctgcgacaagggtggcgccttcttcggcgcctttggcgatatagtcctgaatgatattatattgcgccttcgacacgaccggccccatggcgacgtcgcctgccgggtcgccaacggtgacggcttgtgcggccgacttggcggctacaagcgcttcgtctaggcgggatgcggggacaagcaggcgcgatccggcgctgcaggtctggccgctattgcccatcatgcccgcggttgcgccggtgacattgtccgccagcgctgcgtcgtccagcacgatgaaggcgctcttgccgcccagttccaggccgacgcgcttgaccgtggtggcggcgtccttctggatctgcacgccgacgggttcggagccggtgaagctgatcatatcgacatcttcgtgggtcgagagcgcggtgccgatgacgctgccctgcccctggatcatgttgaacacgcccgcaggcacgcccgccgcgtcgatgatttcggcgaggatctgcgcggagaagggcgcgagctgcggcggtttgaggatcatggtgcagccggtggcgagcgcggggaagaccttgacgcaagtctggttcatcggccagttccatggcgtgatgagggcgcagacgccgatgggttcgcggcggatcagggtgggcccgcgcaattcctcgaacgcgaaattctccagcaattcgatcgcggtctggagatgacctgcgccgaggccgacatggaagccgttggcaaggacggatggtgcgcccatctcctcgcggatcgcctcacccaggtcggccatgcggcgttgatattcggactggatggccttgagcagatcgagccgctgttcgcgcgtggtttccgaccaggcggggaaagcgcggcgcgcggcggcgacggctttgtccacgtccgcagcggagccaagcgcgatatggcctgcgacagcttcggttgcggggttgatgacttcggccgtcttgggcgcgaccgggtctacccactggccgtcaatgtagaagtgcagatggtggcgcatgattgttgtcctctccttcgttaaatcctcccccattgggggagggggaccactccgaaggagtggtggaggggtgtcgccctatcgatggcgtgacacccctccgtctggcctgcggccagccacctcccctcacaggggaggaatttctccggcttactgcgtgccttccgcgtaccaggtgcggaattcggcatatttgggcatttcttccgaattggccttggggtcgatgacgacatgaacaacgccgaccttgccgctggcataggcgcgttcgatcgcgggtttgatgtcctcggcgcgggtcacatattcgccgtggcagccaaagccttcgccgatcttgtcgaaacggacgtccttgctccaatgggtgccggtttcttcggtgccctgaccgaaggtgcgcttgtagacgcccacttccagaccccaggcattgtcgacgccgacgacgcagaccagcggcagcttgcagcgcgccgcgacttccagttcgccgatatggaagaggaagctgctgtccgaggtcagcagcatggccgggcgcgaaatgccggttgccgcctggtccgccagcattgcgccggtggcgtaggggatgcccgtgccgatatgcccgaaattctggttccagatcacgtcatgcggtttgcactgcgaataggtccattggaagatgacgcccgcgccgccatcgcggatcatgatgccgtccttggggaaggcctgtgtcgcttcgaccgcgaggcgcgcgggatggatggccacgtcgccagtgccgtcgctcttggtcagcgattccgccgccagttcgtccagttccgcctgaccgtcgcgcatgaaggcttccagcatcggcgccggtgcgcgcggcgtgtccttgagcgcggcgacaagctgcggcacgacgccgcgcagatcgccgaccaagggcacgtcgatcgggcggttgacgccgatggccgaggcatcctgttcgacatagatccatttgcggatcgcttcattcttctgccagtagcgccatttgccgaaatgaaccggttcgccgagttcagtgccgagcgccagcacgaggtcggactcggtgacggcctcgatcgacgccttggagaagacatattggaaggtgcggtcttcgagacccttgatatagctggtgccgcccgatgtctggatgacggggcagttcatcagatcggccagttgcttgaccgctgcgccggtgcgtgacgtgtggacgccatggccgacgagaaggatcgggttcttggcttcgcggatcaatttggcggcttcgtggacccggtcgatgtccgcgccttgattgaccaggcgatagcgctccggcaccagtggtgctggcaggtccagctcttccagaatgatgtggctgggatattcgatatagaccgggccaggggtgccgcccatcgccttgcggatgccttcgcggatcacttcgtcggtctggtcggcatattcgatggatgccgcatatttcaccgaattttcgaacagcggcatttgcttgacgaactggatgcggccacggcgaacgcgctgttcggtgacgcgggcgcgctgacccgacaggaagatgacgggcgaatgttcgaccagcgcgcattggatggcgggcgccatattggcgatgcccggccccagcgtgccgatggcgacggcgggcttgccggtgatgcgcgaggcggcttcggccatgaagcctgcggcggcttcatgatggggcgcaaccacggtccagccgcgccgttcggcctccaagaacatatggacgaagttcgggtcgggaatgccgaacagggtgttgatgccttcggcctcgaacagatcgaggacgcgcttatagactggcgtgcctggcgtgtccgatgcggttgcagcggtggcaggtttgggatcgtcgtagctcatttcaatagcctcggtgcgcccgtacccatgtacgcggcgaggttgcggtggaaattggtgatcttgcgttcctggtgcggattgggcagcggcccgcggaaaccgcgcgacttcatccctttctgcacccatttcatgttcgagaagtcctgcgcgaggacggcgccccacccttccgccgtcggttcggcatgttcccattcagtcgccggttcctggccttcggggaaccgttcgatcgcgtaggattcgaagatgcacatgttcggatcgtcgccgaagggccgcgcgcgatagcagagcgcgaaggtgatcccctgcaacaccgacatgttgggaaagacgtgccaggcgaggccggcctcggccatgacctctggcggaatgtcgggccagaagacgccgcgtgcagcgtcatccgcccgcgccgatttcagccaatgggcgatgacgtcggcggccgccgtgccttcgggcaattcatcgaccagacgactagccgcatcgaccagcgtttgcgtggacgcggcatagttgagcgtctcgtaattttcccggatcagctcgtaggtcgagcggcgcgggtcgtcgcccttgcctgcgcgggtgacgctgctgctctggctcatggcgaaggcaggatcgcgctggtcgaacccgctgacgccgtgcaggccataggccgcgctataggcataatagtcgccataggcgagcagctggctatgcgtgcccgcgacatgatagggttccatgaaggcttcgagcgcagtcttccaattggatggataaaccacccatttgcgccatttgtagcgcatcttgtccatctcgaaataggacaggatgcgcccggcatcgcccaggaactcggtcacgggttcagcatccagatccatgtgaatccagatccagccgccccacagatcgaccttcacttcggaaagatgcgtacagtcgggcgtcagggcgccctgccagtcctgcggatcgaggatatagctgttattgccgtcaatatcgaaggtccagccgtggaagccgcagatgaaattgcgacgcttgttgccgttggccgagtgcgcgccttcgggcacatccactaactgccgcccgcgatgcggacagacattgtgataggccttgagccgatcgggcgcgacgcggatgacgatgatgctgtcgtcgcaaatatcgtaggtcagccagtcgccgacgtccggcaattcctcgacccgcgcggcgacctgccacactttgggccaaagcttttccttttcggccagcgcatagtcgcgcgacaggaaggcctcgaccggataggtcagcggcttggtcagatcatcgacggtgatggtggtcgggctgttcatgccatgctcccgcagcctgttccctgacgttcgattatcgcgaacagccgggccagcccaagcgaaagcgggcagcgcggcgacatcatccccccggcgatcatgaccgcaattccatgcccgctaggtcaccgcgcgcgcgccagtcctgcaacaatgtctggaatgcgccccagccggggccgtagctgcggaacagcgcccagggtgcttttacctggccttcgttggtgaaatagcttggcgtacattcgatctggaaggcggaggtgtcatattccacgtcgtggaaatgctggacataggcgtcctgtgcgtccgccgtagtttcgaccgaggccgcgccctttgccattgtcgcctggatgatatgggcgatatgttccgcctgccgcccgaattgttcggtgacgctggcgttgaggccgccctgaatatagccgatgaagaactggttggggaaaccatgggtcatggtgccgtgcagcgtctttggcccgttcgcccaatgatcgtagatggacaggccattgcgcccctccaccacatcgatgccccagcggcgcttgaggtcgctggtgacttcaaagccgctggcgaagatcatgcagtcaacggcatagtcgacgccgttcgagacgaagccggtctccgtcatccgctccaaccccttggcgtcggacacgtcgaccagtttgacgttgggctggttgaaggcggcgtagaagtcgttgctggagagcgggcgcttgcacaggaagcgataccagggcttgagcgaggcggccgtcgcttcgtccttgaccatttcatcgacgcgggcgcgcagccgctccatgacgcgataatccaccacttcgcggcgggccatgaattcttcgggcgacagttccggccagccttcggcttccagttcggcgtggaggttgcgcgcgatttcggtccagatgtcgcagatcagatcctgctcaccgggcaggaaaaattccatcgcggcgcggtggaaattggcctggcgctcggcctgccagcccggttgcagcgattccgcccagtcgggatcggtcggcggattgggccgttcgtccacggtcgatggcgtgcgctgaatgacgtagagctgcttggcgtagcgggcgagatgcgggacggcctggatcgcggtggccccggtgcccaggatcgcgacacgcttgtcggcaagcttgtccagcacgggattttcgtagctgccgccggtgtagccatagtcccagcgggcggtgtggaagatcttgccctgatagcggtctatcccctcgatccccggcagcttgggcatgttgaggacgccgcagcccatgataacgaagcgggcgcggaaatgatcgccgcggctggtttcgacatgccagcgctggagtgtatcgtcccatctgagcgcggtgacgagggtgtggaactgggcgcgatcgtggaagccgaagcgctgggcgatctgtttgatataggcttgaatctccgcgccgtcggcgaatttcttggacggcatgaagccggtttcttcgagcagcggtagatagcaataagcgtcattgtcgcactggatgccgggatagcggttccagtaccagacgccgccaaagtcgccggcatggtcgatattgcggaaatcggtgacgccttgcttggttagatgatagcccgccaacaccccggcaaagcctccgcccagcaccagcacgtcgagatcctcgaccagcgggtcgcgcggggtgacggccatgtgcggatcgacatcatagctgtgggtcgtgtcgtcggtggtcggctgatactgcgcctgcccgtcaccacgcaggcgcttgtcgcgctcctcgcgatattttgcgcgcagcgtcgggatatcgaatgtatcgggcgctggcgtccgggtgggagtgcagctcatatccgctccatgacagcttgttgtttccggcaactaatcaacaacactgttcatttgcaatgcggtctgcgcggttagcgcgggagcgatgtttcgctttgccctctgtttagggcttggccgcgcgggctaggttgagcgcgtaaaaagtgggatgaggatgtcggacatggcgcagcaattgatggatttcaccggccggacgatcatcgtcacgggcgcggcgggcggcggcatcggcaccgcgacgacgaagatgctggcgcaggcgggcgcgaccgtgattgccgctgggcgcacccaggccaagttcgacgcgcatatcgcgccgctgattgcgcaggggctggcgatcgtgccggtgatcgccgatgtgggaacggacgagggcgtggcgaaggtgatggaggcggcggtggcggcccccggcacgcttcatggcctggccaatgtcgcggggggcgcggctccgcagacctggatgcgggcggagcgggtgacgcgggcggactggcgggcgctgttcgagcagaatctggagacgatgttcttcatgagccaggtggtggcgcgggaattgcgggcacggggcaatccgggtgcgatcgtgggagtttcctcgatcagcgggatgaacagcgcgccctatcacatcgcctatggcacggcgaaagcggcgatcgtcgcggcgacccgcacgctggcgaccgaattggcgctggacaatatccgcgtcaatgcgatcgcgccgggtatgacgatcacaccggggtcgggcgcttacatcgatgaggatgtggcgcgggaccaggcggcgatcgccatgggacggcgtgcccagccggaggaacaggcgggggccatcgccttcttattgtccgacctgtcgagatatatcactgggcagacgatattggtggatggcgggctgaacctcaaatggacgcatctgggcgcggacaatacgtcgctattcctgaagaatgaggatttccgtgcagcgataaaggcgtaacaatggctggcatgagcgcgattgaaagacagacattgcggggggcggacgtagacctggccgccgacgtcaccgggccggtggatggccagcccatcctgttcctgcatggcagcgggcagacgcggcaaagctggggcaaggcgctggtcgaggcggcgcgccatgggtttcgcgcgctatccatggatttgcgcggccatggcgacagcggatggtcgcccgatggacgctatgatctgaccgtctttgccgatgatttgcgcgcggtgctggcgcaattggaccgacccccggtggtggtgggcgcgtcgctgggtgggatcgtcggcatgatcgtggccgccgccgatcctgccgcgatccgcgcgctggtgctggtggacatcaccgcaacggtggacatggagggggcgaacgaggtgatcgccttcatgaacgccgggtcggacggctttgcctcgatcgaggaggcagcagcggcggtatcggcctatctgccgcatcgtgacaagccgcagagcagccgggggctggcgaagaatttgcgacagcggggcgcacgctggtactggcattgggacccggctttcatgacgatgggcgtggatgccaagcaggaggcggaaggaccgaccgtgctggagacggcggcgcgggggctaaccattcccaccttgctgatccggggcggccgcagccggatcgtgaccgaagagggggcgcgcgcctttctggagatggtgccgcatgccgactatgtgcatatcgacggcgcgcatcatatggtggcgggcgacgccaatgatgcgttcaacgatgcggtgttccgatttgccgatcggcaggtggaaggatcatcgcaggctgacgggtgacgcacaaaaaaaaggcgacgccggagcgtcgcccttatctggtgcgtactgacacttgttaactgccagaccgcgatctctgaggttttgagatcgcacaggcgccgaccgtcgtcaatagtgacaatgatcgacagacccatttcggcgcagaatttgccttgaccttagccaagtaacttggcccattggattttctcttctgggggtggattgtcatgacaggcaaaaagcatatatattggcgcttgggcgctgacctgggggccaattcgctgggttgggcggcgatcgaactcgatgcgcgcggattgcctagagctatcctcgcggccggttcgcgtattttcagtgatgggcgcgatcccaagtccggggcgtcgttggccgtggatcggcgcgatgcgcgggcgatgcggcggcggcgggatcgctttcagcagcggcagcgggcgttgctcaaatatctcgtcgctgacgggttgttccctgaggatgaaggtgaacgcaaggcgctggccgcgctcgacccctatgcgctccgcgcacgggcgctggatgaggcgctgtcgctgcatgaattgggccgggcgctctttcatctcaaccagcggcgcggtttcaaatccaaccggaaggccgataggaaagcggatgacgacgcaggcaagatcgcgatcggcgttgatcgtgcgcgtgaggccatggccgagaatggcgcgcgtacctatggcgaatggttgcaccgacgccgtgccagcgcgacggacgccaatgccattcccccggtccggacacgactgcgccctgaaagcggcgaagacgccaagggcgatgggtatgatttttaccctggccgcgacctgctggaggaggaatttgcggccatttgggaggcgcaagcggcgcatcatcccgacgtgctgactgacgacgtgtatgagcgcctgttcgagatcgtcttttaccagcgccccttgaaagcaccgcagatcggcatgtgtacgctgatcgcgggtgaccggcggctgcccaaggcgcatcccttgttccagcgccgccgcttgctggaagaacttaatgcgctgatgatcgtgcggccgggcgaagtcgcgcagcgtctgacgcgcgaggaacgcgatacgctgttcctcaagctcaaggatcgcaacaaggtcagtttcgaaagcctgcgaaagacgctcaagctagaccccgacgcgcgttttaacaaggagagcgaaaaccgcaccgagttgaagggcgatgaagtcgcggcggcgatggggagcaagacgcgcttcggcaatcgctgggtgcatttgtcgatcgaagagcaatgggcagtgatcgagcggctgggcgatgtcgaaagcgacgcggaggatgcggcttttcgcgcctggctggccgagcgttacgagttaacgccggaacagacgcgagccgtcaccaatgcgccgttgccgcagggctatggtcggttcggcgagaccgcgacacgcaagctgatcgacgcgctgcgcgacggcgagaaggatggtcgagtgctggtatatagcgaagcggtcacggcggcgggcctgggccatcatagcgaccggcgcacgggcgaggtcttcgaggacgaagaggggcgaccgcaattgccctattatggcgtggcgctggagcggcacatcatgccggggacgggagatccgtccgattcggatgaaatgcgcgttggtcggctgaccaatcccaccgtccatatcgggctcaatcagttgcggcggatcgtcaaccggctgatccgcgcctatggcccgcccgccgaaatcgcgatcgagctggcgcgcgaactgaagctgacggatgaggacaagaagcggatcaataaggagaataacagcaatcggctggatgcggaacggcggtcggaaaagctgttggcgatcggcaagcccgataccggtgcgaaccgggccttgctgaaattatgggaggaactgaatccggccaatgtactggaccggcggtgcatctatagtggcgtgcagatttccatcgacatgctgttttccgctgcggtcgaggtcgatcatatcctgccattcaccgcgacgctggacgacagcaatggcaacaagatcgtctgcacccgcgaggccaatcgggagaagcgcaaacggtccccctatgaagcgtgggggcatagcgcccgctgggaagagattgccgcgcgcgccgcgcaattgccgcgcaacaagcgctggcggttcgagccggatgcgatggaaaagttcaaggatgacggcgggtttcaggctcggcatctgatcgacacccaatatctcgcccggctgtcgcgcgaatatctggcgacgctctatcccgacaagggcgaagggagcggccatatctgggtttcgcccggccgcctgaccgagatggtgcggcgcaagctgggcctcaacgacctgttgcccgatcataatttcggcggcggcgcggatcaggccaagaaccggctggatcatcgccatcatgcgatcgacgcggtggtggtggcgatcgtggaccggggaatgctgaacaggattgcgcgggcttcgggtcaggaaggcgcggaaggacgcgaacggatcatcattcccgaaccgtgggaaggattccgcgatgatctgcgcacggccgtcaatgccattaccgtcagccaccgtaccgatcatggcacggcgtcgaaagcgggcctgcccaagggcaaggacgcgaccgccgggcggctgcataatgacaccgcctatggctttaccggggaaagcgacgccaagggcaacagcatcgtggtgcgccgggtgccgttgtcgagcttcaagaagctggccgacatcgaccgtgtgcgcgaccctgagttgaaggctgcgctctaccagcatctcgacgggctggagggcaaggcgttcgagaaggcgattggtgagtttggcagtcgcgaatggcatccctatggtggcgtccgtcgcgtgcgcgtgaccgaaccgctgagcgtcattcccattcgtgaccgaaatggacacatctacaagggctataagggcgattccaactacagatatgatgtgtgggaattgccgggaggcaagtgggtgaatgaagtcgtttccatgttcgatgcgcatcagccgggctggcaatccgccatccgcgccgccaaccccaccgcgcgcaaggttttgagtttgcatcgcgacgatgtgctggcgatcgagcgaaatggtgcggagcgggaactggtgcgtgtcgtgaaattttccgagaagcaatttgcggtcgcgccacccaatgaaggcggagcgttgaaggcgcgcgatgccgataaaggtgatccgttcaaatatagctacccctcgcccaacacgctcaaggcattgcgcgcgcgccaggttcggatcgacgagttgggccgggtgctggaccccggctttcccgcgcgtacgaagcagcgcaagacacgcaagccgaactgagcgggcgcggcgacagacatggaccgaatcgtcgatatcgcgaccgacggccgtcatctgtcggcctatcgcggtttcctgatcgtgtcgcaggatcgggaggaggtcggccggataccgctggacgatgtcgccgcggtcatcgtccatgcccatggcataagctggtccaccaatctgatcgtcgcgctggcgcagcggggcgcgatcatgctgttgtgcggcagcaatcatgcgccggtcgccgtctgcctgccgctcgacgggcatcatgcccagaacagccgcatccgcgcgcagtgggaggcgggcaaaccgctgtccaagcagctatggcggcggatcatcatcgccaagatccgctggcaggcggcgattttggaggccaatggcgtgtctgcctccgcgttcgacctgctggccaggcgggtcgggtcgggcgacccggacaatgtcgaggcgcagacggcgcgccgctattggcctttgctgatgggcgagagttttcgtcgcgaccgggatgcggaggatatcaacgccctgctcaactatggctataccgtgctgcgatcgctgtgtgcgcgcgccgtggtagcatccggcctgcatccctcgatcggcgtgcatcatgccaaccgcaccaatgcctttgccctagccgacgacctgatcgagccttttcggccgctggtcgatggactggcggtgcggatggcggcgcgtggcatcgatagggtgacgcccgaagccaagcgcgcttttgccgggctgatcgcgctcgacctgcctggagcggacggcgcgacgacggtggcgggtgccgccaaccgggctgcccaaagcctggcgcgggcgtttcaaagtgggctggcgaccgacatcattcttccggccccgccttctgccctggaactggccgggctcgacgcgctgctcccgtgagcgcgagccaactgagcggatatcgcctgatgtggattttcgtgatgttcgacctgccggtgggcaccaaggaacaggcccgtgccgctaccaaattccgcgagttcctgctggacgaaggttttgagaaaagccagttttccgtctatgctcgtttctgcaacggcaaggaacagtttgaaacctacatgcggcgagtcgaagcgaagctccccgataatggcgacgtccacatcctcagtttcacggaccggcaatatgaaaatatcgtgcgattttcagggcagcggcgcaggcggcagcggaaaaaccccgatcagctggctttgttttagcgattcgggtcgttttgaaggcgggcgatccgtcattatcgctttggttttcaatgcgataatgacggatctattataaccgctcagagatcgcggtccagcggcaacccaggaaaaagtcatagacggttggcaccgattataaccgctcagagatcgcggtccagctgtgtctatggctgctttggttgcatggccaatcctgccagacccgtggccgcgtcggtcatgaatagataggcgtcggtgccgggttgccgatccttgttgatcgactttgccggaaccgcgccgcttttgtcctgatgggtggccaaccatttttgcgcgcgttttagggcggttgcagtcgacggatcgcctgtttctcgtagaatgacggcgaccgatgcggtggcgtagccgtcgctttcctgtggcaaactcgttccatcgatgcgctgccatgtcgacaggctcggcaggttccagccgccatccggtcgctggcttgccatcagttccgcgaggatttcggtacgttgctctggaaccaacacatcgtcaagctggctgtccgcccataggatgagggatcgggaatagagcgatccgccgcggatgccgctgcgcagataggcgcggagcgcttcgatttgtggcgcaatggccgggtttgcggcatagccgtcgggcgcacgggcaacagcgagcgccgccagggttgcaccccaatatgacgcgctggtcgattcaaagggttcgaggcggaaattgagccaggtgaagccgcccttttgatcccccgtcttcatctggacgccccacatgttggcgaaggcctgtcgcgtatccgcgccaaaatgcccgcttgcctgatcgcgggtggcgaggatcagggcgttcaggaccgcttcgacgccgcgggattcggcagatttgggcacgccgcgcgtctgatcagggtagaaaggctggaccgcgtcccacagataaacgcgttttaccacgtcatcgaacatggccatttcatcgatgctttgtcgatgttcgccagattgtgcgcgcaaagcgggcatcgccagaacatgcggcagcgaggtatgacatgatacgcagcgcgtgccatgatcccgttcgaatttgggccattgccgccaccaggtcaggcgactttcaagatagcgggcggccgctgcattatcccaaccaggtgcctgcgcaggcgcggcctgtccgcgcgacatcgctgccatcgcgagaagggcggcagaagaaaaaagcagccagcggatcatgcagcatcctatcaaacatgcgaaaggataggtggaaggccttcgcaggctatgggtcgaatgacgtagaagtccctgcggaatggcggtgcgctgcaatcagggcggttttgcgctcagtctttttcaagaagcgttcggcaagcggcagtggatcgcggcgcgccattgtgcctgtccagttcgtccagggttgccagcgccatcgccttatagggcggcaggagtgtcgggcattgttcgcccagcgctgcgagatgtttggcgatcgtttcgtcgtcgccgcgcagcagcgggccggagaggcctgccatgccgtgatcgagactggcgtccagcgcggcgcgtaccaggggggcgaggagtgccgagggttcggcgacaccggcggcggcgagtgcctggcaggctccggcgatcagcgtgaccaaatggttggcaccgtggcataaagcggcgtgatagagcgcccgctgcgcctcttcgacgggcaccatgatgccgcccagcaaggttacgagcttttgggctgccgcgttggcttgttcagtcgatccagtgacggcgaagcgggcgccgaccatatgtttgacttcacgcgtcgggttgccggtgaaggtcatggcgggatggatagccgccgtcatcgacgtggcgctgcgcagtgggtccaatatggtcgcgccgctgcgcccgctgacgtggaaaatgaatcgtggctggtcggtgggttcagcctgtgccagagcgacgacgatgtgtgcgagggcatcgtccgcgacggcgagcatgatgagatcgcagtcgcgcgcgatctgggccatatcttcggtcgcctgcgcccgtccgatgacggcgacagcctcggcgcatttcttagggctccgaccccagattagaagcgggtcttgggaatggtcggccagcgcgaggccgatggcggacgcgacccggcctgtgccgatgatgccgatgcggcggtagggcgatgtgctgaccatgattgccaccctagcccagggaggatggcccgtcatcgcatggatgacgggccatcgccatttgtcagccgaccgcgcggctcatcagtcggtcgagccggtcagagaaggcgcgcgcgtcggtgggttgttcgccatcggcgatgcgggcctggtcgagcagcaaatgggcgaggtcggacttgagaccatccgcatcgtcgctcgacgccaatttctggatcagggcatgacgcggattaatctccagcacaggcaacgccgccgtcgggagctggcctgcgctggcgagcagcttttccaattgccggtccatgccgctttcgggcgcgaccaggcatacagcgctggtcgtcagccggtccgacgcgcgcacatcggatacggcatcagcgagggtcgtcttggcgaaggcgaggaagtcggcgacggctgcattttccggctcggtgggcttgtccgcgccttcgaccagcggaatgaggcccaggtccgcgccgccctgcgtcaccgacttgaacggcttgccttcataatcgacgcccatggtggtccagaaattatcgacctgatcgggcagcaatagcacctcgatgccgcgcgcgcggaagccttcaagctgtggcgaggtggacagccggtcaaggtcgctgccggtcgcataatagatggcggtctggttttctttaagctgcgcgacatagtccttgagcgagcgccagccttcacccgatgtggtgcttttgaaccgggcgaggccaagcagcgcctcgcgccgttcgaaatcctcatacagtccttccttgaggacggggccgaaattttcccagatgcgctgataggcctccgcatcattgtctgccagcttctgcaagtcgccgagcagacggccggtcacgcctttctggatggcacccagcaccgggctgtcctgaatcatctcacgcgacatgttgagcgggaggtccgatgagtccaccaggccgcgtacgaaccgtagataacggggcaggatcggcgcttcgtcggtgatgaagacgcgacgaacatagagtttgatatgccctttgcgatccgggtcaaacaggtcgaacggcttggtttcggggatgaaggtcaggaccgaatattcatagcggccttcggcccggtaatggaccgtgtgtgcgggcttgtcatattggccggcgacgctgcgatagaagtcggcataatcctcttcgctgatctcggacttgggcttaagccacaatgcggcgccatcggcgatgtcgacgccttccgcatcgggcttttcgaacagcatgatcgggaccgggacatggcccgactgtgccttgatgatgcgctcgaccgtatagcgttcggcataggatttggcgtcttccatcaggtgcaggacgacgcgggtgccacgcgtgggcgcatcggccgggtctacgggggcgatggtgtaagtgccctgcccgtccgaggtccagctggcagcctcgtccgatccggcccggcgcgaaaacacctcgacctggctggccaccatgaaagcggagtagaagccgacgccgaattggccgatcagttgcgagccttccttgcccgcttcggcggcgaggcgctccatgaacgccttggtgcccgaccgggcgatcgtgcccagcgtctcgcccatttcagccgcggtcatgccgatgccattatcttcgatcgtcaggcggttctggtctgcgtccagcagaacgcggatgcgcggttgcgggtcatcgcccagcagagatggcgtggcgataccttcatagcgcagcttctcgcacgcatcggcggcgttggagatgagttcgcgcaggaagacgtcacggtcggaatagaccgaatgcaccatcatgcgcagcagcttcgaaacatccgcctcgaaagcatgggtttcgggcgcggtagcggtttcagtcgtcatggcaggcttaccctttgaatacgtcaacggcgcggcaaatggcggctcgtcgtgcattttgcaagatcggtgcttggcctttcctgacgcgggcggggtggctcggccccttactctatcgattgcacttcatcggtatggacgtcgaaccggaccagattggcggggccgaaagcggtagtcagggcgacgtcggtcgcatcgcgtccccgcgccatgaggatgcggccgatgcgggggcggttgtgacgggcatcataggtgtaccagttgccgtcgatatagacgtcgaaccaggcgctgaaatccatcggcgcatcgaccggcgggatgccgatatcacccaaatagccggtgcagtagcgcgccgggatattcatgcagcggcacaaggtgacagcgagatgggcaaagtcgcgacatacgccgcgccgttcctgatagccgttccaggcggtcttgtccgaccgggcataatgatagccgaactcgatatgattgtggacaaaatcgacgatcgcatcgacccggtcgcgggccgaggcataatgggcgaaattgccccaggcgacatccatcagccgatcggtttcgcaatagcggctgccaagcaggaagggcatcaccgcgtcgggcaaatcctcgaccgggatttgcgggccatcgggggcgcgcacatcgggctcgccactgtcttcgatcacgaaatcgcaggacagggtcacgccgccgggcgggatcgcgaagcgggtggcgacattgccgaacccgtcctcgaactgataaagcggaatatcggggctggccatcaaccgctgaggcgtgcgcagatcctgatgccgcgagggatgcacgctcaacagcgcgaccatcgcggtcttcgcatcggtattgaaggcaatatcatatccgcagcggatcagcatggacgggtactttccttaagcgccgatatgtcggctgttgatggcaccatggttggtcgagggaaacaggctggggtcggcacgcagcacatcgaccgacacatccatgttcaggaagctgccgggcgggccgaaccatatgcccgacaggggcaacgcctgatagggatcgcgcgcgacggcgacgcggatgaggccgcgattgccgataatgccgttggtgggatcaaattcgacccagccggaaccaggcaggaagatgcgaacccaggcatgggtgttgccgccgcccaccacatcttcggatcgcgaaggattatacacataaccagaaacgaaccgcgcggcgaaacccagagcgcgcaccgcctcgatcatcaacacggcaaagtcgcggcaggtgccctggcgcagcttgagcgtttctatgggcgactgggtgcccttttcatggcgggggacataggtgaattcgcgctggatgcccgtggcgatttccgtcaacagcgcgatcgtgctggtattgccatgattgctgacaaagctgcgcgcccaattatcgacgatgcgttcgggatcatgatattcccgttcgatcgaccgaagcaggtcgggcatgtcttccgacgaataagtgaagggaaagaggcgggcatagggttcaacgtccacctgcttctgcgcgagcggggcatgatccaatgtggcttcgctattgacgaccaattgcgcagcccgcgccttgaatgtggcgatggcgacggaattgccgaagacgtcatgcagccagcgcaattcgctgggcgcaggatcgatgtcgaggcgtgcggacagcaagcgctggtcaaatgcctcgcgagggcgcatcatgatgcgatgttcacccagggataccggctgctgatagtgatagatggtgctgtgtcgaatggtgagcaacggcataaggtcatgtcctgatggccgggcgcacggcagaaaatctcttgggtccgggcgatccgttgccgttcgggctgttcaacgcagaaggcggctccccgttcctgctgatcggcgatcatgcgggggcggctattccggggacgctgggggatatggggttgaacgcgatcgatctggtgcgccacatcgccgtcgatatcggagtctatgggcttggccatgcgctggcgcggcggctggatgccccttttctgcatcagagctattcgcgtctggttatcgattgcaatcgtgacccggcgcatgccgaggcgatacccgctttatccgatggcaccgtgattggcggcaatgccgatttggatatggcggagaagacagagcgggtgagagcgatccaccgaccctatcatcaggcgatggcggacctgatcacggcccggacggccgcaggacgcgagacggtcctgttgtcgttgcatagttttaccccggtgctgaacggtgatgtccgtccctgggacatcggcatattgcattggcaagggcggacggatttcgcgctgtcgatgctcgaccagttgcggtcggttgccggtgtcgtcgtcggtgacaatgaaccctatgcgatggatgccaccgactatacggtgccctttcatgcttttcccaacggattgcgctatgcggaaatcgaggtgcggcaagacctgatccaggatgccgaggggcagatgctatgggccgagcatattgccagcgcggcacaggggttcatcgcttaacgttccgcctgaaagacccggccatggaaaaagattccaagggaacgtccgcacttaccgcgcattagcctccccgataggaggcctcatgatttatagtgaccgtatgaccctattcgcgcgcatcggctttgcagcgcgcggactcgtctatatcctgatcggctggttcgctttggatgtcgcatcgacgggcggcgaggtgaaggataatcaaggtgcgctgggcagcatggtcgatgcgccgctgggccatgtgctgctggccatctgcgcgctggggtttgccggttacgccatatggcgactgaccgaagcggcgatggacccggaaaattgcagccggacgctcaaggggaaattcaagcgggtgggctatgccatgagcggcatttcccatgtcatcctggcggtcgccgcagcgcgcttggccttgcgccagacatcggcgcagcagggcagtccgggggacgcgagcgccgaaagctggtccgcctggcttttgtcccagccgggcggcgtgttccttctggtactggttggcctggttctctttgcggttgccgcgactcaggcgatcaaagcctataaggcggagtttcacgaactggatggcgatacccccgcccccgactatgtgcgttggatcggacgctgtggttatgccgcgcgcgcattgatattcgcgctgatcggctggttcgtcatttcggccgcgctgaaccatgatcccgatcaggcgggtgggctgggcgaagcgctcaaacaattgcgggcacaggaggaaggcaccatcattttgagcgtcgtggcctttggcctggggctgttcggggtctttagcctgatcgaagcgcgctatcgccggatgcgtgtcgccaagcccgatttcctgcgatgaaccacgtgattttggctgatgtccggtcatgtgaacagccgttcatggaccaaaatcgcgatcaaatcgtttctgaaacaaccggctccctgtgagcgcaagagtttgaggacgatatgacggatctggccaccgatgaccgcaaggtgacgatttccaccggcattgcggacctggacaatattttgggcggcgggctgacggccaatcgcgcctatctgctggaaggaacgcccggcagcggcaagacgacgatcgcgctgcaattcctgctggaaggcgcgcgccagggagaatgcggcctttacatcaccctgtctgaaacatcggcggaattgaaggaagtcgcgcgcagccataattgggtgctggacgatatcgacctgtttgaactggtcagcggcgaagggctggaccccgacgcggagcaatccattttggagccgtccgaagtggaattgggcgagacgatccagggcgtgatggagtgcgtcgatcgcatccggccggttcgggtggtgttcgatagcctgttagaaatgcggttgctggcgcaaaattcgctgcgttatcgccgccagatcctagcactgaagcaatatttctcgcagcgccattgcacggtgctgatgctcgatgatcgcagttccgatcccaacgacctgcagttgcacagcattgcccatggcgtcatcacgctggaacaagcggcgcaggattatggcaccgaacgccgccgcctgcgcgtcgtgaagatgcgcggcgtgaaatatcgcggtggctatcatgatttcgtgatcgaaaccggtggtgtggccgtcttcccccgtctggtcgcaaatgaacatcatggtcaatatgtccagcagttggtttccaccgggctggagcgcatggaccagatgttgggcggcggcatttcggtgggcaccaattt

SEQ ID NO: 3073 - DNA, 23291 bp, synthetic construct
  source 1..23291: mol_type = other DNA
  misc_feature 1..23291: note = Synthetic
ttcggcggtgttgttctgcttcagttcgatctggtcggcggtggtcgccgtaaccggggtcgaacgcgccagattggggttcttgatcagcgagccggtgacgatgatggtgtcaccaacttcggcgtcggcggcctgcggcgcgtcctgtgcgaatgcggcggtcgcgatcagcgacgcgcccagaatcgccggtgcgacgctggcacgcaaaagtgccctcttggaaaatgtcttcacggtccagtcccttgctctggaggctggcagatggcctgccactataatgtacctacggggggacatggtgcccgacagcgatccccccatatggatggggcgaaactgcgcggggcgcgggctgctgtaaagcgtgcgaaagggcggctcaccgctttttgacgcggcctgtatcataaatgcaacaaggtttgccgagggctgttttacgcctgtttagcaagataatttcactgaattgcaatatgatgcacttatgatgctgccctatctgcaacagtcgaccgattgtggcgtagcgggtgcgcccaaagccgctgcggccccttattgacgttgcttccgtggggtgctgctatctgcgacaaacgcgccacacagccggagagacgccccatgacgatcaagcgcgcaccttttatgacagtttccgcgaccattacgctctgtcttttcctccagccagttcatgccgcgcccaaacggcagcagccccggccggagattttcaccgacctgctgcaatgccgcgcgattgccgacaatgcccagcgcctcgcctgcttcgatcgacaggttggcgcgatggaggcggccgcgcagcgcgatgaagtggtggtgctggacaagggcgagttgagcaagacacgcaagaccctgtttggcttctccttccccaaactcccctttctgggcggagcggacggtgacgatcaaaaggatcggcaggaggatggcttcagccagatcacggcaaagatcgcgtccgtccgcagcctcggctacggcaagtggcagatcgggctggacgatggcgcgcaatggatcacgaccgaagcgatcgtcgcgggcaatccgaaagtgggccaggacatcgaactgaaacgcgccgcgatgggcagtttcatgggcaaggtcgatggcgggcgagccgtgcggatgaaacgggtaggctgaatcaagcgccctgcggcatcggcccgacgagcaggatcgggtcgattcgcgcgtcgttccacttcatcccccaatgcagatgcgggccagtcgcccggcccgtcgcacccaccgcaccgatgcgttgcccttgcgcaacagcctgcccgaccttcacgtcgatccgcgagagatgcaggaatgcgctggacaggccatggccatggtcgatcatcagcaaatgcccctccagcgtgaagggtttgtccgtcgccgccagtatgacgacgccctgcgccggggccaccaccggcacaccggtcgcgcccgccacatccaccccgccatgataggcacccggttgcccctgatagacgcgctgcgacccgaacaggccggaaatccgcccgacgcgcggccatatgaatgcctgccgccacccctgcgcatcggtccgcactgcgcgcgccgccgcgatcgcctccagttcgggcttgcgcaacgccagaaacgcctcgctacttttggtcgggcgcatcggcgcgttgatccgttcaatccgccaggcgcgcggggtgatcgtcaatgcgcgctcgaccctgcgcccgtcggccaatcgcgccaccaaaatggtggtcggccccgcatcgcgatcgaacgcgatcaggaaatggcggtcggcatcgaccggcaccggttgaccgcccagctgcaacgccacggtgccgaaaggcaccacgcccgtcgctacgccgccctgcgtcatcgcacccgacagcgtgagatcgttcgggttagtcggtggcgcggcggacaccagccctgccgacagaaccagcagccccgccgccgcccaacccctcatttgcccttcaattccgcctgcaccgatgcctgcgcgctggcatagggttcctgtcgcgcaatgctccaatagcgcagatcctccagcgcgatccgctgccccgttaccgcgcacaggacatggtcgcccgcctgcaacacgcgaaaactatagggcagatagtggagccgcgcgacgcgatcgctgttggacatgagcatgggccggacctttcatcagctcaggaaaacaaatcctgctgcggcgtttcgtccgccccgcgcggtttgcgcgccgggcggggcgccattgatatagcggcaggatcgggcttctcaagcggcgcgccaccatggccgacggccgcatccacagtcccgtccttgaaatgcagcgtcaccgcgcctgccgcctgcgccgccgcgaccgactggaccagccgtccctgcgccatcacccgcgcatagccccgcgccagcggcaggtcggggtcaagcgacgcgaaatggcgcgatacccggtcgaacgccgtcgcccgatcaaacagcgcccgcgccagataatcgggccgtggccgcaacctgtccagccgctcggttgcccgcgccagttgctgccgcagcaatgaagggcgcagcgccccgcccacctgccccagatgcgcgcgcgcgtcggcaatccggtggcgcagcccgcttgccagcgcgtcggacaattggtccacccgctgccgctgcggggccagcagcatgtcgggcgtcggcatcaaccgcgcctgcatgtcaagccgctcccgcgcctgccctgccccgcgtcgcaccgcccgtccggcacgcaggcccatttccgcgatcgtcgccagcagttcggcccgcaccggcaccgccatttccgccgcagccgtaggtgtcggcgcgcgccggtcggcggcatgatcgcacagggtcgtatccgtttcatgcccgaccgccgatatgatcggaatggtgcaatcggccaccgcccgcaccacgatttcctcgttgaaactccacagatcctcgatcgacccgccgccccgcgccacgatcaccaaatcggggcgtggcaccggcccgctatcgtccatctcgctgaagccgcgcaccgcccgcgcaatctgctccgccgcgccctgtccctgcaccagcaccggccacaccagcacattggtggggcagcggtcggccagacggtggagaatgtcacggatcactgccccggtcggcgacgtcaccacgccgatcgtgcgcggcaggaagggcaacggcttcttccgctccgccgcgaacagtccctcgcccgccagtttcgccttcaatttctccagcagcgccatcagcgcgccttcgcccgccaactccatccgttcgatcacgatctgatatttggaccggccggggtaagtggtcagcttgccggtggcgatcacttccaccccgtcctgcggcgcaaaggccagccgttgcgctccgcccttccacatcaccccgtcgataaccgcactatcgtccttcagcgccagatagagatgccccgacgcggcgcgcttgaacccggaaatttcgccgcgcagccggacatggccgaagcgatcctcgaccgtgcgcttcaacaggcccgacaattcgctgaccgacagcggcggtgcgttgtcgcccgcgcgttcctccgctaacaggcggcccgaactgtcataggcatcgaaatccggggacatgggcgacatgaacatccttttgcttggcggcggtggccgcgaacatgcgctggcgtggaagctggcccaatcgccccggctcgatacgctctacgcggcatctggcaaccccggcatagcccagcacgcgacattggtcgacctcgacgcgaccgatcatcgcatggtgctggatttctgcacccgccactcgatcggcctggtcgtcatcggcccggaagcgccgctggtcgatgggctggccgacaatctgcgcaccatgggcgtgccggtgttcggcccgaacaagaaagccgcgcaactcgaagggtccaagggtttcaccaaggatttgtgccagcgcgccaacatcccgaccgccgcctatgtccgcgtgacgtcgaaggacggggcgatcgccgcgctggacgacttcacgctgccggtcgtcatcaaggccgacgggctggccgcgggcaagggcgtgatcattgccgaaacccgcgacgaagcgctcgatgcgcttgatgtcatgttttccggcgcgttcggtgcggcgggcgaggaagtggtgctggaagaatttatgaccggggaagaagccagtttcttcgcgctgaccgacggtacggcgatcctgtccttcggatcggcgcaggaccacaagcgcgtcggcgatggcgataccggacccaataccggcggcatgggcgcttacagccccgccctggtactgactccggcgcttgaagcccaggtgatcgaaacgatcatcaagcccacggtcgcgacaatggcggccgaagggatgccctattcgggcgtcctctatgccggattgatgctgaccgatcagggaccgaaactgatcgaatataatgcccgcttcggcgacccggaatgtcaggtgctgatgatgcgtttcgacggcgatctggtggaactgctgctcagcgtggcgcaggggacattggcggatcagggtccggtcgaactggccgatcgcacggcgctcaccatcgtcatggccgccaacggctatcccggcacgcccgaaaaaggcggcacgatcggcgggatcgacgcagcgcaggcgcgtggcgcaatcatatttcatgcaggcacagcggaacaggacggcgcgctggtcgccaatggcgggcgcgtccttaacgtgacggcaaccggcgacagcgttggtgcggcgcaggcagcggcctatgccgcggtcgatgcgatcgactttcccaccggcttttgccgccgcgacattggctggcgcgaagtcgcgcgcgaaagcgcctgaacgacggaaaagcactggcatcttgcgacaaaggccagtgcgcccctaaatagcagcgacatattcacggaggcgacgcgcgatgcaggaattcttcatggactatggcctgtggctgctcataggcttgctggtcgtcatcggccttatcttcctgctttcgggccggggcgggaaagcggcggagagcgacacccgcgaaatgccggtcggggccgcacagccggttgcgcccgtcgctgcaatgcctgtggtcgtcgaacctgttgccgtagagccagtcgtgatcgtggaaccagtggtcgtagaagcgctggtcgtcgagccgatcgcgcctgtggccattgcatctgcgcccgaaccgacggccactcccatttcccctgccgctacagccgcaccggacgcaggcgatgacctgcttcgcctcaagggcgtcgggccgaaattgcgcacgctgctgatcgaactgggcatcacccgctacgcccagatcgccgcctggaccgacacggatctcgccacgatcgacaccaaactcggcaccttcaaggggcggcccgtccgcgaccagtggatcgatcaggccaaatatctggccgccggggatattgcgggcttcgaagcgaaatatggcaagctttgaacgcggcggtcgaacagcatagggcatattcgaccggacacaaaaatggcgacgccggagcatctcccttatctgacatggctggttcaaggaccgtttgatgtcctcaatgcaggcctgaaccggactggacccagatgactagaatctggcgatagggcgcagatttcagcgcttattcgctgtgctgggttacggtcgaattgtgtagatgtcgcgaaagcagcgcgctgaacggcattttggctgccggtgtcccgcatcttcagcgatggttataatccctacgccttgcgcgcccgtgcctggacgaggcgctaccccattgcgaaagcccagtagaagcatccgatacggaggatgtgcggttcggtcgccattgcgaaggattgggcagcgaggcgtctgaacgggcaatcccgcaatgtttcgatctggtatcgcggccctatccccatatccgccatgtccgcttgctcgaaccactgaccttcattccgatacgcgaccgaaatggacctgtcttcaggggctgttggggcgattccaactatcgttacgatatgtgggaattgccggacgagaagtgggtaagcgaaattgtgtcaatatatgatgcccatcatccccaatggcagtcggccgttcgcatcgccggcccgaccgcgcgaaagatactgagtgcctgtcttgcaatgcgcctttggcgcatccgcaccggcccacaccctcacccgaccgccaacatgctcaaggcctggagggcgcggcaggtgcgcatcgacgaacgcggccgcgtcctcgcccccggcttccccgcccacaccgcccgcaccgcccgcaccgcccggtgcaagccactcaagcggacctgagccaagcgaagcgcgcggaaaaatggaccggatcgtcgatatcgctaccgatggccgtcatctttccgccctgcgcggcttcctcatcgtctcgcaagatcgcgaagaagtgggccgcgtcccgctggacgatgtcagcgccgtgatcgtccacgcccatggcgttacctggtccaccaacctcatcgtcgcgctggcgcggcggggcgcggtgatgctgttgtgcggcagcaaccacgccccggtcgccatctgcctgccgctggacggccatcatgcccagaacgcccggatgcgcgcgcagtgggaggccggcaagccgctgtccaagcaattgtggcgccgcatcgtcatcgccaagatccgctggcaggccgccgtgctggaagccaatggcgtgtccgccagcgcgtttgaccttctagcgcggcgcgtggggtcgggtgatcccgacaatgtcgaggcacaggcggcccggcgctactggccgttgctgatgggccaggatttccgccgcgatcgcgatgccgacggcgtcaacgccctgctcaactatggctataccgtgttgcgatcgctttgcgcgcgcgcagtcgtggcgtccggcctgcacccgtcgatcggcgtgcatcatgccaaccggaccaatgccatggcgctggccgacgacctgatcgaaccctttcgcccgctggtcgatgcgttgacgctgcgcctggtcgcgcgtggcgcgcaaaccgtcacgcccgaagccaagcgcgcctttgccgggctgatcgcgctcgacctgcccggtgccgatggcacgacgacggtcgcaggcgctgccaaccgcgcagcccagtcgctggcccgtgcttttcagagcggtcagtcggccgatctggtgatgcccacgccgccctctgctctcgaactggccgggctggacgcgctgctggcatgagcgccacccaattgagcggatatcaactgatgtggattttcgtgatgttcgacctgcccgtcaccagcaaggaacaggcccgtgccgccaccaaattccgcgaattcctgctcgacgagggatttgaaaaaagccagttttccgtctatgctcgtttctgcaacggcaaggaacagttcgaaacctatatgcgccgggtcgaagccaatctgcccgaccggggcgacgtccacatcctcagcttcacggaccggcaatatgaaaatatcgtgcgatattcaggccagcgccgaaaacggcaacgcaaaaaccccgatcaactcgccctgttctaacgattcgcgtcattttggtgatgatggatgggccgatatgtcgttgtggttcaacgagataacaacccatccatcatagccgttcagagatcacggtccagcggcaacaagggcttgttcgacccgtcgcctgacagaatcatagccgttcagagatcacggtccagcggcaacatataatcaaccatgatcgtcgcgcgctgaatcatagccgttcagagatcacggtccagcggcaacagcaggcggcagtcgttatctgacgcgcgtatcatagccgttcagagatcacggtccagcggcaactccacgccggtcgcgcagatgtttgcgatgatcatagccgttcagagatcacggtccagcggcaactcgctggtggagggcgcgtacaccaagctatcatagccgttcagagatcacggtccagcggcaacgcgggcaagcgcacagttgggcggggcctcatcatagccgttcagagatcacggtccagcggcaactgctgcgtcccccgcacggtgatcgtgctgatcatagccgttcagagatcacggtccagcgattgctcatgtttgacattgatcgcgccatgctcatctggcgctcatttcaatccactcatcctgtcgtctgctcaactcaactccgcccaccccatgtccgagtaaagccggggaagcagcgtctccagcctgcgcgcggggaaacgcaggccggccgcttcgccctgcccaacgccagcagcccctcacccgtcaggctatgcaacatccgccttccgctggtttatagtgcgcgaagcctcgccccaggccatgcgccgtcctcggcccgatgcgcgatcgcatggctcgtcaaccggctgacccggtcattcccgccggcaaaagagtggatagagttgaaccgatggtgcgcgtttaggcgatgcgcccatcatcgagtgcgtttatgacaggatccggcaaggcaatcgaaggatattctgccgatcattgccatatgtcgttcaagatggcggaggggtggcctgggcctgtttcacataatttcgaacatgaaacgggcgcggatggcatgacgggccgacaaatcctcgtcaaaataaacgactgtccagtcgggcaggcaagccttgatcgcgcgggcaaggctcaagccttcgtcgctataggcgcgcagatagcggtcgtcttcttgcaaggctgcaaaattatccgcgtcgccatcgcgccaactatcgtgggcgccgtgataacgggctgcccaactggccaggcgggccttgatgtcggcagggacgggcagatcgtccgggtccatttcatagccctgccagtgccagatgccggtgctgctataatcgcccatcacgcgcacccattttgccggatcgcggctatcatcataataagccgggcgcggcggcccgccctgatcgggtggcaggcgggcattcgacagatggctcgattgttcggccaggtaggagtggtgataggctccccggcgcttgacgggccgaaagcagagttgtcggctaccggaaatagtcgcgacgatcgcgtgcgctatggccagcccttcgcgattatgccgttggatgtcgaagccacggcaatgctggggcgtccagtcggcatatagcccttcctcaaattggcgataatgggctgaccatgtcgcgatgcgctgtgccagcaggggcgcgatgccgtaatccgccggatcatccgccactatgaagccatgatattgccatccctcgatatggcacaggccgacaccctgagacaggtgcagcgccatgggatcatagccccggcggcgcggccctgatgccgccatgagaaaaagttcgctcgccatcagacgcctgtttcgtgccttatgccccgcgcgatggccatcagtggggctggcgcggcagagccaacaggcacaaaaaaggcgacgccggagcgtcgcccttatctggtgcaaaatagctgcttgttagccgccagaccgcgatctctgagtggcgagtatagcaatggaaaaatagtcgtcaagcgggtcggctgactggttcatttcgatactggattgcgcttgaccttatgctctctctctgccccatttggctcgtcaaaggggtggggtaggcagcatggccaacgatcgtaaaatctggcgcctgggcgctgacctgggtgccaattcgctggggtgggcggccatcgcgttgcataaggatggcgaccgttacgaacccgtcgccatccttgccgccggttcccgcatcttcagtgacggtcgcgatcccaaatccggcgcgtccctcgccgtggatcgacgcgatgcgcgggcgatgcggcggcggcgggaccggtttcagcagcgccagcgcgccctcctgaaatatctgaccgctgatggactgtccccggccgatgcggccgaacgcaaggcgctggagcaactcgatccctacgcattgcgcgctcgtgcgctggatgaggcgctgccactgcatcatctgggtcgcgcgctgttccacatcaatcagcggcgcgggttcaagagcaatcgcaaggcggaccgcaaggccgacgacgatgcgggcaagattgccgtcggggtcggtcggctcgaagagaagatgaaagagaagggcgcgcggaccttcggcgagttcctccacatgcgccgcctggaagccaccgatcccaacgccatccccagcgtccgcacccgcctgcgccccgaaagcggcgaaggggccaagggcgacggctatgatttctatcccggccgggcgcagttggaggcggagttcgaggcgatctgggaagcgcaggcaccgcatcatttcgatatgctgacgcccgacgtctaccaacgcctgttcgagatcgtctttcaccagcgcccgttgcgcgcgccacagatcggcaaatgcaccctcatttccaccgacgcccgcctgcccaaggcgcaccccctgttccagcgccgccgcctgctggaggaaatcaatgcgctgatgctggtgcgcgcgggcgagaaggcgcagcggctgacgcatgagcagcgcgacctgctgctgctgaaactcaaggacaaggcaaaggtccgtttcgagagcctgcgcaagacgctgaagctggacccggacgcgcggttcaacaaggagagcgagaatcggaccgaattgaaaggcgatgaagtcgccgcgctgatgggcggcaaaacccggttcggcaaccgctgggtccacctctcacccgacgaacaatgggctgtcatcgaacggctcgaagcggtcgagagcgagactgaggatgcggatttccgcgcctgggtcggcgcgacctatgatctgacgccggaacaggcaaaggcagtggcgaacgcccatttgcccgcaggctatggccgctttggcgacagcgcgacgcgcaggctgatcgacgcgctgcgcgatggcgagaaggacgggcgagtcatcgtctatagcgaggcggtggagttggccgggcttggccatcatagcgattttcgcgatggcgtggtccatgacgcgctgccctattatggcgtcgcgctggaacggcacatcatgccggggacgggagaaccatccgatgcggaggaaatgcgggtcggtcgcctgaccaaccccaccgtgcatatcggcctcaaccagttgcgccgcgtcgtcaatgcgctgatccgcgcctatggcccgccggctgaaatcgcgatcgaactggcgcgcgaactgaagctgaccgatgatgacaagaagcggcgcaacaaggagaataatgacattcgcatcgccgccgaaaagcgatccgaaaagctgctggcgatcggccagcgcgattcaggggccaaccgcgcgctgctgaaattgtgggaagaactgaacccggccaatgttctcgaccggcgctgcatctatagcgggcaacagatttccatcgacatgctgttttccgctgcggtcgagatcgaccatatcctgcccttcaccgcgacgctggacgacagcaacggcaacaagattgtctgcacccgcgaagccaatcgggtgaagcgaaaacagtccccttatgaagcctggggtcacaccggccaatgggacgccatcgccgcccgcgccgcgcaattgccgcgcaacaagcgctggcggttcgagccggacgcgatggagacgttcaagagtgaagagggtttcctcgcccgccatctggtcgatacccaatatctttcccgtctggcccgcgaatatctgtccatcctttatcccgacaagggcgaaggcagcggtcatgtgtgggtgtcgccggggcggctgaccgaaatggtgcggcgcaaatggggtctcaacgacctgttgcccgaccataatttcggtggcggggcggaccagcccaagaaccgcctcgaccatcgccatcatgcgatcgacgccgccgtggtcgcgctggttgatcgcaagctgttgatgcagatcgccaaagcatcgggcgaagaaggcgcagagggacgcgagcggatcatcattccgccgccttgggagagtttccgcgacgatctgcgccgcgtggtcaacgccatcatcgtcagccaccgtaccgaccatggcaccgcgtccaaggcggggctgcccaagggcaaggacgcaactgccgggcggttgcacaatgacaccgcctatggcctgaccggggaaagcgacgccaagggcaacagcatcgtcgtgcgccgggtgccgatcaccaacatcaaaaagctggccgacatcgacaaggtgcgcgacgcggacctgaaagctgcgctctaccggcatctcgacggactggagggcaaggcgttggaaaaggcggtggccgagtttggcgaccgggaatggcacgcctatcccggcatccgccgcctgcgcatggtcgagccgctgaccgtcatcccgatccgcgacaaggaaggccgcgtctacaagggttataagggcgattccaactatcgttatgatgtgtgggaaatgaaggacggcagttggcaggcggaggttgtttccactttcgacgcgcatcagcccggctgggcatcggccgtccgcgccgccaatcctgttgcacgcaaggtactgagtctgcaccagaatgacctgctggcgatcgagcgcgacggggaagcgcgtaaattgatgcgcgtcgtgaaatttggccagaacgggcaaatcacgctggttgagccgcaggagtccggcgaccttaaacggcgcgatgccacgcccagagatgaagatccgttcaaatattttgcaccgacctgtggcgggctgaaaaaagccaaggcgcgtcaggtgcggatcgacgaaatcggccgcgtccttgaccccggcttccccgcgcgcaccgcgcgccgcaagacccgcaaacggacctgaaccgaaccagggcgggaaacgcaggtgggccggatcgtggatatcgcaatccacgacggtcgccgtctttcggccttgcgcggtttcctgatcgtcctgcggcgcggtccagcggcaatgggttttgccgatcattggccgaatggcccgaaacccgcttcgacgccacagggcaaaatcaaggacagaatggcggatttccgtcattttgtcgatgattttgggataccccaccgaaggggtaaatggtgccagaagagctttcggccgggcgacctaagcgattgatttcgcaatcaaatcatagacttgcgaattcgccgatggcatcattagcacgatctgtattcgtggaaaaggctggatgtgcatggacgctcggctcaggcccggctcgagcgccagccaattctggaccatgcgcgcgcgacgagcttccatgcgtcgagcaatagcctcaattttatgacccaaataggctcatggtatattcatggcataaaatccaagatcattcggacgctggacataaagcgacgaacggatcgtatctgtctgggcattggattgtccgaaatatggctacatatttcggacaactgagggggatcatcgcacccgccaaacctgaaaacctaaaaatcgtgcagcagaaaaacctaatggctgcgcatgacaaggtgaacgtggcgaccattcccaaaggagcttcgtcgacgcgctctttacgcttcgcgcgttccggagagcaaggcgcggtgtgggtgatatcgacagagcaatgctggcgtgatgatcatgcggccggctggttcaacgagcgctggagcgcttcgacggttgcgaggacggcatcgcggtctgacagattgcaaagcttatttgtcagattcataatgtatttttctgacaaattttgggccggacaagatggagatggcaggattctggagaggggaaacctcaaggattctcttgaaaccctggtgatgccctttgaaaccgaacgcatggattgctcggcttgtgtatcgcccaacgacgcgaaacgggatgcatgacccacttgcccgagcgaactgcagcgcgactgacgcgctcaaaactgagcgataaaaagaacttttataaatcaaattttgcgatattttgatcgatagaaaggtgacctatcgatcatgcgttggaactggcagcaacccgactggcccaacttcacttacgacgcgcagcgtgtggatcggcgtgcaaaaaggacccggttagcggggtgatcggcgtccaaaagggaaccaccattccgatggtttagacagcagcctggtttttcaggtggcgagatcgggatgttggtggtggagacagttgtacggatcaggcgcgagcacgcaggtggcaaggcgatcagggagatcgcgcgggatctgcggctgtcacgcaaggtggtgcgcaaggcgatcaatgctctggaaggtgcgtttgactatcatcgcacggttcagccgctgcctcggatcggaccctttcaggagcagctcgatacgctgctgagcgagaacgaagcgcggcatcggcgtgaccggctgcggatgacgcggatctacgatctgctgctgcgagaagggttcgagggttcgtatgatgcagtgcggcgctacgcccggcgctgggcggatggccgacgcaaggatcccggcggcgacgtgcccgcgttcattccgctgctgttcaagccgggcgaggcataccagttcgactggagccacgaggatgtagagatcgcaggcaagccgatgcgcgtgaaggtagcgcacatgcggctatgcgcgtcgcgggccgtgtatgtgcgagcctatccgcgtgagacgcaagagatggtgttcgacgcccatgcccgcggctttgcgttcttcggcggggtgccgttgcgcggcatctacgacaacatgaagaccgcggtgacgacggtctttgttggcaaggagcgcgtgttcaaccgccggtttttggtcatggccgatcattatatggtcgagccgaccgcctgttcgccagcggcaggctgggagaaggggcaagtcgagaaccaggtccagacgatccgcggccgctttttccagcctcggctgaagttcgccagcatcgaggaactgaacgggtggcttgaggcagaatgtctgcgctgggccgcgatgcacgcgcatcccgagcaaaaggacatgactgtcgcgcaggcgctggaggccgaacggcccgtactgcaaccgatgctgtcgccgttcgacggctttcacgagacgagccacgcggtcaccggcacatgcctgatcagctttgaccgcaaccgctattctgtggcggcgcggacggtgcgccgtgcggttcaggtgcgcgcctatgccgaccggatcatagtccgcttgggggacgagatcgtcgccgaacacccgcgctgctttgggcgcgaccgcacgatttacgatccatggcactatctgccggtgctggtgcacaaacccggcgccctgcgcaacggcgcaccattccttgactgggcgctgccaccagcgctggcccggttgcggcgcaagctgggcagtggggacgaagccgatcgccgttttgtccgcgtgcttgctgccatatccaccgatgggctggaggctgtcgaggccgccatcggcgaagcgttcgataccggcgctgccagcgacgaggtgatcctcaatattctggcgcgccgccgcgaaccgccagcagatcagccaatgagcgtggtggtcgacctcaagctcaagcatccgccccgcgccgattgcgcgatctatgatacggtgcgaggccacaatgcagcggcatgagatgatcgacgccatgcgcgcgctgggcctcaagggaatggccagcgcgttcgatgaggcggtaaccactggcgtgcaacgccagcgcaccacgcccgagatcctgaccgatctgctgcgcgccgaagccgcccaccgtcacgccgcctcgatccgctaccgcatgagtgcggccaaactgccggtgatcaaggatcttgatgcgttcgtgttcgacggtacgcctatcaacgaggaactggtccgcgcgctgcacgccggatcattcctgcccggcaggcgcaatatcgtactggttggcggcaccggaaccggcaagactcacttggcaatcgccattgccgccagcgtcgtgcgcgcaggcgcccgtggccgctactttaacaccgttgatctggtcacccggctcgaggatgaggcgcgcatcggcaaggccggcgcactcgctgcccaactcagccgcatcgaactcgtcgtgcttgatgaactgggttatctgccgtttgctcgctccggcggccagttgctgttccacctgatgagcaaactctacgaaaagacctcagtgatcatcaccaccaacctggcattcggcgaatggcccacggtgttcggcgatcccaaaatgaccaccgcgttgctcgatcgcaccacccaccattgcgatatcatcgagaccggcaacgacagctggcgcttcaaacaccgcaactgacccagcctcaaaagcccccataaaaattgcttcgcgctggcgctgcctccggtcgggctacgccctccctacgccagcgccagcgcgaaatccgcgcccggcatcaaccccagcgcaacgccgcaaggtggttcccttttgcacgccgatagtgggtcccgtttggacgccgattgacaccccagttccgtcaattggggagaatgaccgttataaagaggggatttccatgcccgccatgtcgatcatttccatcactttgaagctttgatcgaccgggtgcaaaatcgctcatctatgatggcatgcctaattgcgcggcgacaactacgatggccggttgagcggcgactatgatggccggtaggatcggttgtctggtctgatcgtagggaggggcgcagccccgaccggagagcggaccagacaaccggtggcgatctttttccccttctttcggggggcagatcggggctgtggcgggcggtggtatcggaacactcatcgaacaacgagcgatgggtttgcgatgccgggccaccacatttccgatcagcaggtatttctcttcatgacccatcgtcgccaacacacccaggccgtcgcggctgccaaggccggtatcagcgaacgcagcgcacgccggatcgagaacgatccgcagcttccgtcccagaagaagaaggagcgccactggcgcacccgcgccgatccgctcgagccattctggccacgtatagaggagttgctccagatcgacggtatcattgccgtcacggtcttcgagacgctccaggacgagttcggcgaggatgctgttcccgatgcgatacgacgaacactggaacgccggatcgcccgctggcgggcactgcacggcggcgagaaggagatcttcttcccgcagcatcatgagcccggtcggcagggcctgtcggatttcacggtatgcgacagtctcaaggtcactgttgccggcgagaccctggcctatcgcctctaccacttccgcttggcggcgagtggctgggagcatgcggctgtcgtgctgggcggggagagctttgccgccctttcggagcacctgcaggatgcgttgtggaagctgggcggtgcgccggccgaacaccgcagcgattccctgtcagccgcctacaaaaacctcgacgccgatgcgcagcgggatttcacccgaagctatgacgagctgtgtcgtcattaccgcatgcttgctacccgcaacaaccgcggcgaggcgcacgagaacggatcgatcgaaggtccccatgcccatctcaagcgacggctcgatcaggccttacgccggcggggcagccgcgatttcgtcagcatcgaggcctggcgcgagttcgttgaggcgcaggtcgccagacagaaccggcggcatgctgcgcgcatcgatgcagaacgcagggtactcaaggcgctgcccgcaaggcgaaccaccgatttcgccatggtcaccgtcgatgtcacccgcaacggcaccgtcgccatcgatcgggttacctattcggtgccttcccgcctcgtcggacggcgcctcaacgcgcatctctttgacgatcgcatcgagctcttcctcggcccggacagggtaatgtccacgccgcgtgtgcggatcagtcatccccaccgggggcatagcatcgatttccggcacatgatcggtaacctgcgccgcaagcccggtgcactgcgcaacctcgtctaccgcgaagccctcttccccgatcacgcctaccggcgggcctggcaagccttcgatgcccaactcgatggacggcaggcctgccgcgatgccgtcgcgctgctcgatatcgccgccaggggcgactgtgtcgacgtgctggcccggcggatcgatgaggctctcgacagcgggcgcttgcccgatgtcgagagcctcagggacgagttcctgccaaccgcaagatcgcagcgcgatgtcgctatcccgccacccgatctgcacagctacaacagcctgatcgccagcggggaggtgcactgatgacccgcaccaaggatcaggccgccgccgtactgcctaccctgctgaaggccttgcgcctgccgagcatcaaccgcaactggaagcgcctcaccgacaccgccgatcgcgatggctggccggccgccaacctgctggcctcgcttctcgagatcgagatggctgatcgctcctcccggcgcatccagcgccatcgcgaccagtccggcttgcccgcaggcaagaccttcgccaccttcgatttcgacgccgcccccggcatccgcaaaccgcacctcttgtccctcgccgccggtgacgactggatcgagaacggcggcaacctgctgctgttcggccagagtgggaccggcaagacgcacgcagttgccgccattggccatgccctcatcgacacggggcggcgcgtcctgttctgctccaccaccgacatggtccagaagctccagtccgcgcgccgcgacctcagcctgcccgccatgctcgacaagctcgacaagttcgatctcatcgtgctcgacgatctgtcctacgtccgcaaggaccaggtcgagaccagcgccttgttcgagctcatcgcccaccgctacgaacgccactcgctcgccattaccgccaaccagccattttcggcatgggacaacgtcttccctgatcccgccatgactgtcgccgcgatcgaccgcctcgtgcaccactcgaccatcatcgagatgaacggcgaaagctaccgcaagcgttccgccgtcgcccgcatcaacgccggcgattacgacccgcccaatggcgccccggaccggccatcataattgtcgctggcttcgcgctcgggagcacccttgctgaggcaacgggtaattgtcgccagcggcaattacatgccaaccatcccatgcgcttcaaaccctcgcttccggccagcgccagcgacaattacccagcgtcgtaattgtcgctcgacggttgctcctcgcaacagcaaatggtagccagaattcaccaaccggcgcggccacctatcggccatcaaaattgacgccgaccggacaccgtaatcgtcgcgctacacctaatgctacgctgcgaacctgtcatgcagggcagcagcatttttggacatacgcgctttggtccgctctggaccgacctatggcctattcccgaaaatgccttcttgagcggaactggccgacgcgaccggcgacgggaccagggggaccggccgcgtgacgcatcagcgcagttgactatccttgctgccccggcggttgatcgcgccgaaggctacatacgcgcggtcgcgttcgctctgacaagcaacgcaggtgcgcgcacccggcagcgcctcgcgacgcttcttggggatttcttcaccgcacacttcgcagtcctcgaagctttcgccactcggcaggcgactgcgcgccgcatcaagagcatccttgatgctgtcgtcgatctgctcctgaacggcgccatcgggcgcccagccattggccatgcgtgatctcgtttgtcgctgtggaattgcttccccgatatggggaccggcgcgcgaacttccaagtgcgggagagcggtgccgggacagtggaatgccagcaaaggtgaaggaatagggccggactatcaactcgcctggaccatctcgccgacgctgaccgacgccagccccagccagatggccatccggtcgagttcgatcgtcagccgttccaccgtttcgggcggagcgttgggttcgagcgcgatgcggtgtgcgcgcagcacgccagcctggcggtcggccttgagatcgacgcgcccgaccagtgcctcgtcgagcaggaacggcagtacataatagccatgggtgcgcttgtcctgcggcacatagatctcgatccgataatggaagccgaacagccgctcggcgcggctgcgttcccagatcagcggatcgaatggtgcgagcagcgcagcgccctggcgagggcgtgggagctttgcgtcgcggtgcatccaggctttctggttccagccctggaccttgacaggcacgaagctgccctgttcggcgagcgcggcaatggcgtggtcgccctcgttgggcttgagcagaaattagtcgcgcaggtcagaggcagtcgccacgcccattgcgcgggcgctgcggtcgatcagatgacgctgcgccgtggcggcgtcgggcgtcggaaggtctcggatagcctgcgggatgacccgctcaggcaggtcatagacccgcgcaaagctgccgcgccgcgttgcggtggtgatgaagtcggcccagaacagccattcgagggcatgtttggtatggctccagtcccaccagccgctcctgctcttgccgtcctcgaaggcggcggcggtgagcgggccatcgatcctgattcgatccaggatcgcgtcggcttcggcgcggcgctcggtcgcgaagcgtcgaaggccgacatagcccgcttcgccgcgttcagccttggccatccgccagcgcggattcgggtggagatcgagcggcagcagcgatgcttcgtgcgcccaatattcgaacatgcgacgctgacgcttggggccccaggcatcgcgttcgagcaaggcgggatcgtaattcccaatccgcgaaaaggcgggaagataatgcgcccgggtgaggacattgaagctgtcgatctggaacagcccgagccggtcatgggtgcgtcgaagctgcaaagcgctggcttgcggcagctcgcgctggccgaaccctgcgatgcgagcacgatacgtcggacctgcttttgcgagaggctgagggtcactggggtcggtggccgggtcgtgttcagaagccggagcagcgcgacgcgagcgcggcggcgctcagaatctcgatgccgctgccctggtcctgcaactcttgcgctttgcggaattgcgcgtcgtagcggacatagccgaaaggctcttcagcgcagaccgcgagaaccgtggtcgtcttgatcagcgtctcatattcaaacgcaatctcgcccccgcggaagccgacgattccgatctggcagatgctgctaacgcgtccgcatgcggtctcaacgtcgaccgccacgaaatcgagggcgtctggatcgactgcgggcgcgcaaagggctgtcggatcgctaaggacaggacgggacgacgaaaggaacataacgcgatcatagctgcctgcgatcgcagttccaagcaggaatgacggccactcggcctgctgatggggcggcggcacgacgtggcgaagcgaggctccgccacgtcttagtgtcgacaatgcgatgggctgacgatcaacctattgcgcgtgcggctttgaagtctgggcgcagcaccgttccaccatcccgcagccgatccagatagtccgaccagtgctgcatcatttccacgcgctcatcccaatattcgccacgcgcataagcgcgccggacctgattggtatcgacgtgcgccagttggcgctcgatcgcatcaggattccactgccccatttcgttgagcaacgtggcggccattgcccggaagccgtgcgcggtcatctggtcggtcgtatagccgagcttgcgaaggccctggttgacggcattctctgacatggccttgcgcggcttgccgaggcacgggaacagatatttccaccagtgcgtgtgctcgtggagttctttcagcatcgcgatcacctgccgcgacaacggcacgcggtgcggccgccgcattttcatccgctccgccggaatgaaccagatcgcctcgtcgaaatcgatgtcggtccactctgcctgtctcagttctcccgggcggagcagcacgtgcggggacaggcgcatcgccatgatcgtgaccttgtgcccgcgatatccgtcgatggcacgcaacagctggccgacttccgacggcttggtgattgcagcgaaatgcttcaccttaggcgcggcgatcgcaccgcgcaggtctgctgcgacgtccttgtcacaccgcacggtcgcaacgccgtaacggaacacccggctgagcacactacgcatgcgccgcgcgctctcataggccccggtcgcctcgaccttgcgaaggacggcgagcgcctcatgcggcgtgatctgcgcgatcgggatggtgccgatcaatggataggccttggcaagcaaccagcgaatcttgtcgatagtcacgggcgcgaggccgtcgcgctcgcatttgacgagccattcctccgccaccgcctcgaaagtattggccgcggcatatttggcggcgatcctcgcgcgctttttctccagcgccggatcgatcccctcggcaatcttcttcttggcttcgtcgcgccggacacgcgcctccgcgaggcttatggttggccaccccccg

SEQ ID NO: 3074 - DNA, 23288 bp, synthetic construct
  misc_feature 1..23288: note = Synthetic
  source 1..23288: mol_type = other DNA
gacatgacccagcggctggcccaagccgatctcgacagcctgtcgacgcgggggcgctatctggaaatgaaatatcgcgaggaaaaggcggaatgagcgtgaaggcggcggtatgatgccggaggacaagccgtcgtgcttccaggagccggcaacggccaagtcctgagggttggcccttggccttcgacttcgctcaggctgaacggagtttgggagccaagccatattacccgccgccgttcagcctgagcgaagtcgaaggccacgcccctcccccctcaggtgtcgaacaatccgtcctgcgacccgaccggaggattgaggcccagatgcttccatccgcccgggttcaagattcgcccccgcgccgtccgcgccagcaggccgagctggatgagatagggctcgatcacctcctcgatcgtgtcgcgcggttcggacaggccagcggcgagcgtctccaccccgaccgggccgccgcgatagacatcggcgatcatggtcagatagcgccggtccatcgcatccagccccagcgagtcgacctccagccggttgagcgcctggtcggcggcggcggcatggacgatctcatgccccgccacgctggcgaagtcgcgaacccggcgcagcagccgcccggcgatacgcggcgtgccgcgggaacgccgcgcgacctcgatcgcgccatcctcggcgatcggcaggtcgagcagccgcgcggcacgcgtcaccacgcgggtcaattcctcgaccgtatagaattgcaaccgcaccggaatgccgaaacgatcgcgcagcggcgtggtcagcaacccctgccgcgtcgtcgctccaacaagcgtgaagcgcggcaaatcgatccgcaccgaccgcgccgaggggccttccccgatcatcaggtcgaggacacggtcctccatcgccggatagagcacttcctcgaccgccggttgcaggcggtgaatctcgtcgatgaacaggacgtcgccatcctcaagattggtcagcagcgcggcgaggtctcccgacttggcgatgaccgggcccgaggtcgcgcggaagcccacccccatttcgcgcgcaatgatctgcgccaacgtggtcttgcccagccccggcggcccgaagaacagcacatggtccaacgcatcgccacgccctttcgcggcctgaatgaagacacggaggttgtcgcgcgccgcatgctggccgacaaactcgtccaggctcttcggacgaagcgcagcatcgacatcctcgggacggcggctggcggacaagaggcgatcctgatcggtcatagcgcgcgccctagcggctgcgccgggcgactgtcgagcatcaggatcggggaagcatcagcgaacattgcacgaacatagcagccgatgcaccgcagggacagccatgctccgagcgaagctgatccgggtggcggactcgcgtacagaatcgcgctaaatgggggatatgccgcacgatctcttcctggccacccagataccgcccgcgctcgaactggcgcttgccgaccactacacgctctatcgcgatacaccgcccgccaccacccgtgccatggtcggcggcggcatgatgacggtcgatcgtaacctgctcgaccgactcccggagttggaaatcattgcggtccacggcgtcggccatgacggcatcgaccgggaggccgtggcggcgcgcggcattcgcatcgcgatcaccccggacgtgctgaccgaggatgtcgcggaccaggcgatcgcgctgtggctggcggtcgaccggcggatcgcggcgaacgaccgggcgatgcggatgggcaactggaccgtgccgctgggccggcgcgccagcgggcggcggatcggcctgttcgggctgggccggatcggccaggcgatcgcccggcgcgcggagccctttggcggcgagatcctctacaccgcacgttcggccaagccggtcgcgtggcacttcgtgcccgacctggccacgctggcggaggagagcgacgtgctgatcctcgccgcgccgggcggacctgagacgaagggcgtggtggatgcggcggtgctggaccggctgggtcctgacggggtgctggtcaacatcgcgcgcggcagcctggtcgacgaagaggcgctgatcgccgcgctggacgcccaccggatcgccggcgcggggttggacgtgttcgccgacgagcccgatgtgccctatgcgctgcgccggatgaaccatgtagtgctctccccccatcagggcagcgcgacgcgggaggggcgagcggcgatggcggacatggtggtcgccaatctggaggcgcatttcgccgggcaggaggtaccggggttgctgggttagggtttcctttgggcttcgacttcgctcagcctgaacggagatttgtaagctacccacagccgctcaggctgagcaaagtcgaagcccacgccccaccaccgctatttcgccgccttccggagcgccaaccgcaccagcgcgtccagggaagcactggcccccaattcctcttccgccgaggccaccgccgcgctggcctcggctgggcggaagcccaggttgagcagcgccgataccgcatccgcacccgctccgaccgtcgccgccgcaccgccacccgatccgggggccagcacgatgccgccgaccttgtccttcaactccatgacgatccgctgcgcgagtttcggcccgacgccgttcgcgcgcgcgaccatcgccttgtcgccgctggcgatcgcccgcatcaggtcggcgggttcgagcgccgacaggatcgccagcgccacccgcgaccccacgccctgcacgccggtcaacagccggaaccagtcgcgctcatcggcgctggcaaagccgaccagccggatcgaatcctccgacaccagcatctcggtatgcagcatcgccgcctcgcccaccgaaccgatgacggacaaggtgcgcgccgacgcaccgaccagatagcccacaccgccgacatcgataaccgcatggtcgatgccggtggagtccaaacgtcccttgagatgcgcgatcatgcggccggattagaacaaaacgggggtttcgtcacgtctttcggtggaacggaaaatggatcacgcgacgccgcgaagcgggataattttgttcgcgcggagacgcggaggcgcggagatgttgccttgccggacgacatgcgggctttgccgacggttgagatcagagggccgctgacgcggcgagtggcacacctccgcgtctccgcgcctcctcgtgaaccatgtcttctaaatggccgaagcccgtcgctgcatcgcccgcgcgctggcaagatgatgcgcatgggtgatcgccaccgccagcgcgtcggccgcgtcggggccggtgagcttcacaccggggagcagatgaccgaccatcgcctgcacctgcttcttgtccgcgccgccggtgccgacggtcgccttcttgacgatgctgggatgatattcgccgacgatcagtcccgcttgcgccgcagcgagcaggacgatgccgcgcgcctggcccagtttcagcgttgattgcgcgttgctgttgcccagtacctcttccaccgccgcgccgtccggctgttgctggcggatcacgtcgtagagcgcggcgtgcaggttcgccagccgccggggcagcggcatcgacggctcggtcttgatctggccgttggcgacatggcgcagccggttaccttccgccgcgatcaccccccagccggtggtgccgagaccggggtcgaggccaaggatgatggcggggggtggggtcatcttctgccttgcgaggggtaatctatggttcctacccctcaccaccgggctttgcccggcggtcccctccccaagccatacttggggaggaatgggatcaggccagcttttccatcacttcgtcggagacttcgtaattgccccagacggtctggacgtcatcgtcatcgtccagcgtgtcgatcagcttgaacagcgtcgccgccgccgcctcatcgactgcaaccatggtctgcggccgccaggcgagcttggcgccttccgcctcgcccagcacgggctccagcgccttggcgacttcgtgcagatcggcctgcgccgtccagatctcgtggccgtcctccgacgaagtgacgtcttcggcacccgcttccagcgcggcctcgaacaccttctcggcgtcgcccgcgctggcgggatagttgatcaggcccatccggtcgaagccatggctgaccgaaccggcggtgcccagattgccgccattcttcgacaccgcggtgcgcacgtttgtcgcggtgcggttgcgattgtcggtcagcgcctcgatgatcaggctgacgccgccggggccgaaaccctcgtaacggatttcctcgtaattctccccgtcgccgcgcgaggccttgtcgatcgcgcgcgcgatattgtccttgggcatcgaggccgccttggccgcgttgacggcggcgcgcagacgcgggttcatgtccgggtcgggcgtgcccatcttggccgcgacggtgatttcgcgggaaagcttggaaaatgccgccgagcgcttcttatcctgcgcgcccttgcggtgcatgatgttcttgaatttgctgtggcctgccatcggtgcctcttgagatgatcgggctctttacgaccgcgcaagggcctttgccaacccgtcgatcttcgcctccagcgagtcgagccgttcaataaccgcgatatcgagtttgtgatgcaggcgcaggatgtcgatctcggcgcgcaaattggtgcgatagtcgaggctggcggccaatctatccttcgccgcctgccggttctggctcatcatgatgaccggcgcctggaccgccgccagcgtcgagagcatcaggttgaggaagatgtacggatagggatcgaagaccagcccgaaatggctgagcacatccgaattgagtagcatccatcccagcagcaccaccgaaaatgcgatgatgaaaccccaactgccgccgaccgccgccacccgatcggccagtttttcgcccaacgtcgcggtctcgtccgcgacatcggcggcgtcgcgtgtactgatgctgcccgattcgatatcggtcagaacctggcgttcctcctcgtccagttcggcaaagggcttgcccagcgcgcggcgggcggtttcggcggcggtcgacagggccatgggcaaggggctccgctgggaatcaaatgccttgctccttggggcgttgatcggccaaacgccagagtcatgacggtacgcgtggatatgggaaccgacgagcgaggctcgtcggtgccgatcgatcttgaggagcttctggcgacccgcctgctcgtgcagggcaattcggggtcgggaaagtcgcatctgctgcgccgcctgctggaaaagtcggcgggccaggtgcagcaggtggtgatcgatcccgagggcgatttcgtcaccttgtccaaggcctatggccatgtcgtgatcgaagccggcgactatgccgaacgcgaggtcgggcggttcggcgcgcggattcgtgaacatcgcgcctcggtggtgttgagcctggaaggactggagatcgaggggcagatgcgctgcgccgcgaccttcctcaacgccctgttcgatgcgccgcgtgagcattggtatcccgcgctggtggtcgtggacgaggcacagctcttcgcccccaccaccggcggcgaggtgtcggaggaggtgcgccgcgcctcgctgtccgccatgaccaacctcatgtgtcgcgggcgcaaacgcggcctggcgggcgtgatcgcgacccagcgactcgccaagctcgccaagaacgtcgcggcggaggcctccaatttcctgatgggtcgcaccttcctcgacatcgacatggcgcgcgccgccgatctgctcggcatggagcggcggcaggccgactcgatccgcgatctggcgcgcggtaccttcctggcgctggggcctgccgtctcgcggcggccgatcacggtgaagatcggcgcggtggagacctcggcccggtcgggcagccccaagctgacccccctgcccgacgcgccgccgccggacctgcaggaactgctcttcgcgcccgtcgaggaagcccccaccctgccgatgaccttcgacccgcgcccgcgccgggtccccgccgaggaactgatggccgatctcggccgcccgccgctgcccacgaccgccgcgccggccgcgcccgagatggacgaggccgaggtcgaggcgatctacgaacaggtactgcgcgcgatcgtcgaggaccccgaatcgaccttccgccccgcctcggtgctgttccaggatttccaggtgcgctgccggatggcggggctggcccggccgccgctcgacctgaacggcttcgcccggcggctgtcctgcgcacgggcggggattttcgacgtcaacgatcccgactggcaggaggcgctggcgctggccggaatgctgcccgacgacatgctcggcgcgttcctgctggtggcgagggccgcgcgcgagggcctgccctgcccgccggataccaagatcgccgagacctatggcaccagctctttgggccgggtgaagcggctgatcgcctatatcgagagccgcgacctgttcgtgtgccgcaccgacctgacggggaagcgatcgatcacgattccgcggctgggctggacgacccaggcggcggagatgggttgaggggcttcccttggccttcgacttcgcttgaggggaacggaggttgaagtgaagaaaccgcaaacttacgcttcggcactccgcccgatgatcagggctttggggcagcggctttgatcatcggccgtggtatccagatcgtgcatgacaacccttcgaccaatggtccgccatccggcatccggacgcgcttgaaacagccgccgagcggaaattcccgactcagccagcgtccctccggctgatcttgctcgtaggattgaatcttatgccgttccagaaaggcccatagcttgtcggccgccgcaccggagcagatatatttgtggctgctgtccgtttcggtaacgtaatttgcctcgatcgcttcgttcagacaagcttccatgaggaccggcatctgctccgggaaaggctcgtcggttattgcggcaagcagggcgaggacaaagatcagcatgatggaccgaagtcatgcccggtcagggtgtgaccggcaagcgccaacatggcggcgctattctctccaaagtccaagaacggctcatcgacaaacgcctatgcaagcccccccgttaagcctgagcgaagtcgaaggccaccccccaccgccggctacaaacaaaaagggcgacggagccctcgccccgccgcccttcgcatatccgaacccgaaagcgggatcagatcatgcccagcgccttcatatacacttcgaggatggcttcctcttcctgatattcctcccgcttcttcttgcggatggccatgatcttcttgatcgccttgggatcatacccacgcgccttggcttcggcgaatacatccttgatgtcgtccgaaatgcccttcttctcttcttccagccgctcggcccgctcgatcagcaggcgcagttcgtcggccgtgacattgccgctgctgtcgaaattctcgtccgccatcatcttaaccttttgaaatcctgtatgccccgaagagcccgaccggatcgccgccccgatgcccatcgcctggggcggcgggccgtctggcgcgaatgtcgggatcggcggcgggtctaggcggttccgggccagcgctcaagccggctgttcacgcattcttcttcacgctttcggccatgcgcgccagttgctccgaggtcgcctcggcctggtgctcggccttccactgatcatatggcatgccgtagatcgcttcgcgcgcggtcgccttgtcgacgcccgccgcctcgcccacccagtcggacaggcagttgcggcaaaagcccgccagccccatcaggtcgacattctgcgcatcggtccggtggcgcaggtgcaggaccagtcggcggaacgccgccgccgcggcctgatcatcgattgcattcaacgcatccaccgcatcggccatattcgtcgctcctaggttgatcgtaacgcattaggctttaggacacaggccgaaaagaagcaggatgtgaacatgatcaaggctctcccccctcgttcgcgcaaagtccgcgtcctggccacgctcggccccgcgagcagcgatcccgaaatgatcgccaccctgtttcaggcaggtgccgacgccttccgcatcaatatgagccatggcgaccagcagtcgaagatcccgctgatccaggcgattcgcgcgctggaggaacggttcgaccgcccgaccacgatcctggccgatcttcagggcccgaagctgcgcgtcggcaagttcgccgagggcaaggtcatgctggagaccggcagcaccttcatccttgatcgcgaccccacgccgggcgacgcgacccgtgtagagttgccccacaaggaaatcttcgccgcgatcgagccgggcgcgcgcctgctgctcgacgatggcaagctcgtcctgcgcgtggctttccatgatgaggagaagatcacgacgctggtcgaggtcggcggcgcgctgtcgaacaacaaggggctgaacgtccccgacgtggtgctgcccatggccgcgctgaccgagaaggaccggtcggacctcaatttcgcggtcgagcagggcgtggactggatcgcgctctccttcgtgcagcggcccgaggatttgatggaggcgcgcggcctgatcaaggggcgcgccgcgctcctcgccaagatcgagaagccgcaggcgatcgaccggctagaggagatcgtcgagcagtgcgatggcgtgatggtcgcgcgcggcgacctgggtgtcgaattgccgccccaggcggtgccgccactccagaagcgcatcgtcgaggtctcgcgccgcatgggccgcccggtcgtcgtcgcgacccagatgctcgaatcgatgatccagagcccctcgcccacccgcgccgaagtgtcggacgtggcgaccgccatttacgacggcgccgacgcgatcatgctgtcggccgagtcggcggcaggcgcctggccggtcgaatcggtcgcgatgatgaacgcgatcggcgtgtcggtggaaaacgaccccggtcacggcgagcgtgtccacttcaccgccatgacccccgacccgacgaccgctgacgcgctggccgaggcggcggcgcggatcaccaacacggtctcggccaaggcgatcatctgcttcaccaccagcggctcgaccgcccgccgcgtcgcgcgtgagcgcccctcggtgccgatcctggtcctgaccccgcagctcgaaacggcacgccgcctgggcctgctctggggctgtcacgcggtgcacacccgcgacgtcgaatccttcgaggagatggtcgccaagtccaagcgcatggcgctgcgccacggcatcgccgaggcgggcaaccaggtcgtgctgatggccggcgtccccttccgcacgccgggatcgaccaacgtgctgcacgtcactcggatcatgggcgacgaactggcgaattacggggacggggtcgaggtgtaagcccggccgccttatggcctgaacgataagggggcggcggggcatcattccgtcgcccttttctttgggtcgacgccggatacaccggacaagaaaaaagccagcgccgtagcgctggccttatctggtgcagacatgactgcttgttagccgccagtaccgcaatctctgaggattggaaatttgcccaatcgacgactgcggtcaagcccggtcgcctccaattcggatcgatcttgcgttccgttccaagcccttttttccatagacaaaggggtccatcatcgggggaaacaggatggacgggggagctatggactggcggcttggactggatctcggcgcgaactcattgggttgggcggccttgcggctggatcgcgcgggcgatcccatcggcatcctcgccatggggtcccgcatcttcagcgatgggcgcgatcccaagtccggggcctcgctggcggtcgatcggcgtgctgcgcgggccatgcgacggcggcgtgaccggttcaaacagcgtcaggccgcgctcctcaaatatctgatccgcgatggcctgtttccggcggatcaggccgatcgacagaggctggcggatgaagacccctatgccctgcgcgcccgcgcgctcgacgaggaattgtcgctgttcgaaatcggccgggcgctgttccacctcaatcagcggcgcggctttcagtccaaccgcaaggcggatcgcggccaggatgacgaagcgggcaagatcgcggtcggtgtggaccgactgaatcagcagatggaggagcagggcgcccgcacgctgggcgagttcctgcatcagcgccgccgagccgccaccgatgccaatcacatcccttcggtccgtacacgcctgcgccctgaaaccggcgagggggcgaagggcgatggctatgacttctacccctcgcgcgcgctgatcgccgaggagttcgaggagatttgggccgcgcaggcaccgcattaccccgacacgctgacgcagcaggtccacgaccggctgtacgagatcatcttccaccagcgtccgctccgcgcgccgcaggtcgggcaatgtacgctggtcgccggcgagacgcgcctgcccaaggcgcatccgctgttccagaagcgccgtctgctcgaggagatcaacgcgctgatgatcgtccggcccggcgagatcgcccagcgcctgacgcccgaggagcgcgacacgctctatctgaagctgaaggacaagcgcaccgtcagcttcgccacgctgcgcaagacgctgaagctcgacagcgccgcgcggttcaacaaggaaagcgagaaccgcaccgagttgaagggcgacgaggtggcggccgagctgggtgccaagacgcgtctcggcacccgctggcagcatctgtcgggcgaccagcaatgggaggtcgtccaccgattgatggcgctcgaaagccaggcggacgaagccgcgtttcgcgactggatcagccagacctatgacctgttgcccgaacaggccgcggcggtgctgggcgcgcgattgccacagggccatggccgcttcggaccgaccgccaccacgacgctgatcgactcgctgctccacgaccggaccgaggatggccgggtggtcgtctatagcgaggcggtgcagcgctcgggactgggtcatcacagcgatctgcggcacgaccgcgatgacgaggacgtcaccgagctcccctattatggcgtcgccctggaacgccatatcatgcccggcaccgccgagccgaccgatccggaagagatgcggatcggccgcctgaccaacccgaccgtccatatcgggctgaatcaactgcgccacgtcgtgaaccgactgattcgcgcctatggcccgcccaaggagatcgcgatcgaactcgcccgcgaattgaagctgagcgaggacgagaagaagaagcgcaatagcgagaatcgcgacaaccggctggccgccgaggggcgctcgaagaagctggaggaaatccgccagcgcgataccggcgccaaccgtgcgctgctgaaattgtgggaagaactcaatcccggcaacgtcctcgaccggcgctgcatctataccggcgagcagatttcgatcgacatgctgttttccgaccgggtcgaggtggatcacatcctgcccttcgcccagacgctggacgattcgaacggcaacaagctgctctgcctgcgcgaggccaatcgcgagaagcgccgccggtcgccctatgaggcctggggacataccgaccgctggcccgacatcgccgagcgtgcctctcgcctgcccaagcccaagcgctggcggttcgagcccgatgcgatgcagcgctttgcgacggaagacggcttcctggcgcggcacttggtcgacacgcaatatctcggccgattggcgcgcgaatatctgtcctggctctatcccgggcgtggcgagggatcgggccatgtctgggtttcacccggtcggctcacggaaatggtccggcgcaaactggggctgaacgacctgctgcccgaccataatttcggcggcggcgcggaccagcccaagaaccggctcgaccaccgccatcacgcgatcgacgcgctggtcgtcgcgatcgtcgatcgggggatgctgcaggccatcgcccgcgcttcgggccaggacggtagcgaggggcgcgagcgcatccatattcccgctccctgggacggctttcgcgacgatctgcgcgtggcggtcaacgggatcatcgtgtcgcaccgtcccgaccatggcaccgtggccaaggcgggattggcgcgcggccgcgaccagaccgccggccgccttcacaacgacaccgcctatggcctgaccggcgagaccgacgccaagggcaacagcatcgtcgtgcgccgcataccgctatcggcgatcaagaaacccgccgacatcgcgcgggtccgcgatccgctgctacgcaacgcgctggccgagttcaccaagggattggacggcaaggcgttcgaggcacggatcgggcggtttcacgaattggggccgcttctctatcgcggcatccgccgggtccgcgtggtcgaaacgctgaccgtcatcccgatccgcgatgccgagggccgggcctataagggctataagggtgacagcaattaccgttacgatgtctgggaaatgccggacggcaaatggcgatgtcaggtcgtgtcgatgttcgacgcgcatcagtcgaccgaacaggcacggccgcatcccgccgcccgcaagattctcagtctgcagcgcaacgacatactcgcgatcgaacggaccgaaggggatcgtgaactggttcgcgtcgtcaaattttccgaaaagcaattcgccgtcgcgcccccgcatgaaggcggctcacttaagactcgcgacggcaatgccgatgatccgtttcgctatctttatccctcccccaacacgctgaaaggctggcgcgcacgccaagtccggatcgacgaactgggccgcgtgctcgaccccggcttccccgcccgcaagtccgtacggcgcacccgcccccgcgccgcgccggtcgactgacgagggacgccgccgcgatgggtttggaacggatcgtcgatatcgccaccgacaaccggcatctgtccgcccatcgcggcttcctgatcgtctcggaggagcgggtcgaggtcggccgggtgccgctcgacgatgtcggcgcggtcatcgtccatgcgcacggcgtcacctggtcgaccaatctgatcgtcgcactggccgagcgcggtgcggtgatgctgttgtgcggaagcaaccacagcccggccgccatctgcctgccgatcgacggtcatcatgcgcagaacggccggatgcgcgcacaatgggaggccgggcgtccgctgtccaaacagctctggcgtgcgctggtggtggccaagatccgctggcagggcgcggtgctggccgccaatggccactccgccaccgccttcgatcatctggcgcgcaaggtcggatcgggcgaccccgagaatatcgaggcgcaggcggcgcgccggtactggccgaccctgatgggcgaggctttccggcgcgaccgcgatgcgcaaggcgccaatgcgctcctgaactatggctatgcggtgatgcgcgccgcctgcgcccgtgcggtcgtggcggcggggctgcacccgtcgatcggcgtccatcacgcgcatcgcggcaatcccttcgcgctggccgacgatgtgatcgagccgttccgcgcgctggtcgatgccctgaccatccggctgatcgcgcacgacatcaccggcgtcacgtccgaggccaagcgcgcctatgccggcctaatcgcggtcgacctgatgctggacgacggtatcaccaccgtctggctcgccatccagcggaccgcgcagaccctggcacgcagcttccagagcggtcgcgccaccgacctgatcctgcccgcgcccccctccgcgctggaactggccgccctggacggattgatcgggcgatgagcccgcgtctcgccaccacgcccatccccgcgagcggcgcggcacaactgtcgggatatcggctgatgtggattttcgtgatgttcgacctgcccgtcaccaccaagtccgagtcgcgcgccgccaccaaattccgccaatatctgctcgacgaagggttcgaaaagagccagttctcggtctatgcccgtttctgcagcggcaaggagcagatggaagcttatctacgccggatcgaggcgaacctgcccgacaagggcgagatccacatattgagcttcaccgaccgccaatatgagaatatcatccgcttcgccggccaatcccgccggcaaccgcgcaaaaaccccgaccaactggccctgttctgatgcttcgcgaccgttttgactatgccggatggtggatttcgtcgttgcagatcaacgcgataccccaccatccagcatagccgctcagagattgcggtccagcggcaacggcgcgccccggccatcgcttgcgcgcgctagcatagccgctcagagattgcggtccagcggcaacgcgcgatcgggtcgccatcggggccgcaagagcatagccgctcagagattgcggtccagcggcaactaccgccgcttttgactctgcatctgggatagcatagccgctcagagattgcggtccagcggcaactatgcggattggcttacggacgcgcggaggagcatagccgctcagagattgcggtccagcggcaactacgcgccttatatgaacgcgaacaggaacagcatagccgctcagagattgcggtccagcggcaactgatcgacgaacgcgaacatctggagggccagcatagccgctcagagattgcggtccagcggcaacccagtgctggacgcatccgtcagttcgtgtagcatagccgctcagagattgcggtccagcggcaacgaatgtaccgatcaggtcataatagagcgtagcatagccgctcagagattgcggtccagcggcaacagaaggtctagcattctgaaaccggcttcaagcatagccgctcagagattgcggtccagcggcaacaccccggaggaggccaacgccatcgcggtgagcatagccgctcagagattgcggtccagcggcaacaggccgagctgccgggccgcgacctgggatagcatagccgctcagagattgcggtccagcggcaaccaaggacgaagagcgcacacgctttgcagaagcatagccgctcagagattgcggtccagcggcaacccgcagctactggcggggtgccggtgggtgagcatagccgctcagagattgcggtccagcggcaactgaaagcctgttgccgcccttgatcgcacgagcatagccgctcagagattgcggtccagcggcaacagattgcagcatctgggcttcttcgggagcagcatagccgctcagagattgcggtccagcggcaactggtgtcacgccgatgagcaccagcgaattagcatagccgctcagagattgcggtccagcggcaacccgcgtcctccacgtcccaaccggcagtgtagcatagccgctcagagattgcggtccagcggcaactaatacactcgtcatggacaaggccgatgaagcatagccgctcagagattgcggtccagcggcaacagcgcgtaggcgtggccgtaaagccaaccgagcatagccgctcagagattgcggtccagcggcaacctccccgtgcgagagggcggcgcataatgtgttcttcggattgctcccgcgtaccgccaaacaaaaagggcaggcacttcgcagcgcccgcccctttcgtcatccggcaaaacccgatcagatatggatcggcttgccctgcaccgccatggcggcttccttaagcgcctcggcatgggtcggatgcgcgtggcaggtataggcgatgtcttccgacgtcgcgccgaactccatcgcctgtgccgcctgcgcgatcatcgtgccagccaggctcgagatgatccacacgcccagcacgcggtccgtcttggcgtcggcgatgaccttcacgaagccgtcggtgtcgcggttggtcttggcgcggctgttcgccatgaaggggaacttgccgaccttgacctcgccgcgctctttggcggcctcttccgacaggccgacaccggcgatctcgggcatggtgtaaacgacgctgggaatgacatcgtggttcacgatgccggtctggccagcaatattctccgcgaccgcgacgccctcgtcctcggccttgtgcgcgagcatcaggcccggcgcgacgtcgccgatcgcccagatgccgtcgacattggtcgcgaagtcatggtcgatctcgacctggccacggccgttcagcttcacgcccgccgcttcgaggttgagcccatcggtgttgggcttgcgaccgatcgcgaccagcacggcatcggccgacagcgcttccgtcacgccgcccgccgccggctcgaccgacacggttgcgcggtcgccctcgatggtgacgccggtcactttggtcgaggtcttcagctccatgccctgcttcttgaacagcttggccgattccttgcggacctcgccatcgaagccggggaggatctggtcgagatactcgaccaccgtcaccttggcgcccagacgccgccagaccgagcccagctccagcccgatcacgccgccgccgatgacgaccagatgctccggcaccttgggcagcgccagcgcgccggtcgagtcgaccacgaccttctgatcgatctccacacccggcagcggggtcacgaccgatccggtcgcgatcacgatgtcacgcgcggtgacggtctggtcaccgaccttgaccgtgctcgaatcctggaacgccgccttgcccttcagccaagtgaccttgttcttcttgaagagatattcgatgccgccggtcagctcgccgaccgccttggccttttcggcatgcatctggtcgaggttgagcttggccccctcgatctcgacgccgaacttggcaagcgcgccgtggctcgcttcctcgaacagctcggaggcgtgcagcagcgccttggacgggatgcagccgacattaaggcaggtgccgcccagcgtctcgcgcgcttcggcgcatgcggtcttcaggcccagctgcgccgcgcggatcgccgcgacatagccgccggggccagcgccgatcaccaggacgtcatagtcatactcagccatttgtctctcccgttccccggcgttcggggtccagcctgcgggcgcacccgccttcatacagcaataacggaccctcgccggtgcaagggtccgtataggtcacaaaccgatcagaggtcgatcaggatgcgggtcgggtcctggatcgcgttcttcagcgcgacgaggaaggtcaccgcctcgcggccgtcgatgatgcgatggtcataggacagcgccaggtacatcatcgggcggatgacgatctggccgtcgacgacgaccggacgctcctcgatacggtggaggcccagcactgccgactggggcgggttgatgatcggggtcgacatcagcgagccgaagacgccgccgttggagatggtgaaggtgccgcccttcatctcttccatcttcagcgtgccgtccttggcgcgcttgccgaagtcgccgatcgtcttttcgatgcccgcgaccgtcagatcctgcgcatcgcggatgaccggcacgaccagtccgttcggcgccgagacggcgaccgagatatcggcatagtcgtgatagatgatctcatcgccctcgatcgaggcgttgaccgaaggaatgtccttcagcgccatcgtggcggccttcacgaagaagcccatgaagcccaggcggacgccgtgcttcttctcgaacaggtccttatacttggcgcgcgcctcgatcaccgcggtcatgtcgacgtcgttgaacgtcgtcagcatcgcggcggtgttctgcgcttccttcaggcgcttggcgatcgtctgacgcaggcgcgtcatcttcacgcgctcttccttgcgcgccgaaccggcgggggcagcggccggagcggcggccagagccggtgcgctcgacttgttggcggcggcggcggcgacatcttccttggtgatgcggccgtccttgccggtgcccttgatcgtcgcggggtcgaggccatgctcgagcaccgcacgacgcacagacggcgacagcgcggcaggcgagtcgctcgactcgtcggcggcaggcgcagcagccggggcgggagccgccgccggagcctgggtcacggccggggccgccgcttcggtcttggccggggccgagccaccggcgtcgacggtcgcgagcagcgcacccacctgcaccgtgtcgccgaccttcacggcatgctcacccatgacacccgccaccggcgagggcacttcgaccgagaccttgtcggtctccaggctcgcgatcggctcgtcgaccgcgaccgcgtcacccggctgcttcagccattcgcccagggtcgcttcggtgatcgattcgcccagcgtcggcaccacaacttcagtcgccatttccatttcctccgcccggccttggggccggggctcttacgcgggcgggcaaagcgcccgcgccagatttcatccctccccggctccgcgaagagccggggcattcgtcagtttcagtccgcggcggccgtggtcggcttggcggtggtgttgctgccctcggcgcgcgtccggcggatttcgtcgcggacattgtggcccagcgcatcggcgaccagcgcaccctgctcggcggtgtggcgcttcatcaggccggtggcgggcgatgccgccgccgcacgacccgcatagcgcgcccgcttcaccgacgccccggcttcggccagcgcttcctcgatcagcggctcgacgaagaaccagtaaccgttgttcttcggctcttcctgcgcccagaccacgtcctgcaggttcggcatccgcgcgatccgcttggcgagcgcgtcgctcgggaacggatagagctgctcgacgcgcacgatctgggtcgtggtgtcgcccgccgcgtcgcgtgcctcgatcaggtcataggcgaccttgccggtgcacaggaccagacgcgtcgtcgcctcgtcggcagcgccgttggtgtccgacaacaggcggcggaagtggctctcgccctggaagtcctcggccttcgacaccgccagcttgtgacgcagcagcgacttgggcgtgaagacgatcagcggcttgcggaagttacggtgcatctggcggcgcaacaggtggaaatagttggccggggtggtgcagttcgcaacctggatattatcgttggcgcaggactggaggaagcgctcgggacgtgccgacgagtgctccggcccctgcccttcatagccatgcggcagcagcatcacgaggccgttggcgcggagccacttggattcgcccgacgtgatgaactggtcgatcatgatctgcgcgccgttgacgaagtcgccgaactgcgcctcccacagcaccaaagtcttcggatcggcgagcgcatagccatattcgaagcccagcacgccatactcagacagcgggctgtccagcacctcgaagctgccatgctcgacggtcttgagcggcacgtacttgtgctcgtcggtctggtcgacccagaccgcgtgacgctgcgagaaggtgccgcgacccgaatcctggcccgacaggcgcacgccgtatccttccgacagcagcgagccgaaggccaaggcctcgccggtcgcccagtcgaaattctcggacgtagcgaacatctgccgcttggcatcgagcacgcggttcagcgtcttgtggacctgcaagccttccggaatcgtggtcagcgtgcggccgatcgcgtcgaacagcttcttatcgaggccggtctccacgttgcggcggccctgatcggtctccttcggtgccgacaggcccgaccagcgaccggcgaaccagtcggccttgttgggcttgtagctcgcgcccgcctcgaactcgccttcgcagcgcgtgatatactgcttgatgttctcgtcgacccaggcctgatcgaccacgccctcggcgacgaggcgcttcgcataagtctcggcgacaccggggtgcgagcggatcttgttgtacatcagcggctgggtgaagcccggctcgtcgccctcgttatgaccgaagcggcgatagcaccacatgtcgatcacgatgtcgcggtggaacttctggcggaactcgatcgccatcttggtggcgaaggtcaccgcctcgggatcgtcgccattgacgtggaagaccggcgcctggacgcccttggccacatccgacggatagggcgaggagcgcgcgaactgcgggctggtggtgaagcccacctggttgttgatgatgaagtggacgcagccgcccgtgttgtagccacggatgccggagaagccgaggcactcccacacgatgccctggcccgcgaacgccgcgtcgccatggatcagcaccggcaccgaggccgcgtgatcggtcaggtcgcccgcgatcgtctggatcgcgcgggtcttgcccagcacgaccgggttcaccgcctcgaggtgcgaggggttggcgaccagcgacatatggaccttgtggccgtcgaactcgcggtcggtcgaggtgccgaggtggtacttcacgtcgcccgaaccgccgatgtcatcggggttggccgaaccaccggcgaattcgtggaagatcacgcgcagcggcttggccatgacgttggccagcacgttcagacggccgcgatgcgccatgccgaacacgatctcgcgcactcccatctggccaccgtacttgatgaccgattccagcgcggggatcatcgactcgccgccgtccaggccgaagcgcttggtgccgacgtacttcttgccgaggaacttttcccactgctcggcctcgatgaccttgttcaggatggccttcttgccatcgacggtgaactcgatcgccttgtcctggccttccatccggtcctggaggaagcggcgctcctccacatccgcgatgtgcatatattccaggccgacattgccgcagtaattcttacgcagcgtatcgaccagctcgcgaacggtcgcccattcgaagcccatcgtgccgcccagatagaccttgcggtcgatatcggcgtcggtgaagccgtgatattcggtcttcagatcttccggaagctcacgcaggccagacagaccgagcgggtcgagattggcagcaagatggccgcgcacccggtaggtgcggatcagcatctgcgcgcggatcgcgtcgcccgccgccttgacgatatcggcggtcgagggggctgcggccgcagcggccgccggagcgggcttgccacccttggcgggcttgggggccggttccatctgggtcggatcgaggcccgccgtcagatcgtcggtcgaggtcagcggccagcgcttgttctgccagctcggcgcgcccacgccctgctccaggccgtcgaaaaagctgcgccagccggcatcgaccgacgacgagtcagcctgatacttggcatagagcgcttcgatgaaggcggggctgacgcccgccgcgatgtcgctgaaatcctggccttcgtagcccatgagacgcttcctcgaccgcccgtcttcttcatgatcgccaccccggcacatccgcctagggtccgcagccgcgagcggcccgcctgccgccacggaccccggcgggtgtgccggggtgacgcgatacgccttacttgttcagcaccgacaacagggtcgagccgagctccgacgggctggccgcgaccttgatcccggccgcttccatcgccgcaatcttgtcctcggcgccgccctggccgcccgacacgatcgcaccggcatggcccatgcgacggcccggaggcgcggtgcggcccgcgatgaatccggccatcggcttcgaacggccgcgcttggcctcgtcacgcaggaactgcgcggcttcttcttcggccgagccgccgatctcgccgatcatgatgatcgactgggtttcgtcgtcggccaggaacaactccagcacgtcgatgaagttggtgccgttgacagggtcgccgccgatgccgaccgcggtcgtctgacccaggcccgcattcgaggtctggaacaccgcctcataggtcagggttcccgagcgcgacacgacgccgaccgagcccttcttgaagatcgaacccggcatgatgccgatcttgcactcgcccggcgtcagcacgcccgggcagttcggaccgatcagccgcgacttcgaacccgacagggcgcgcttcaccttgaccatgtcgaggaccggaatgccttccgtgatcgccacgatcagcgggatttcggcgtcgatcgcttccaggatcgagtcggccgcgaagggcggcggcacgtagatgaccgacgcgtcggcgcccgtcttcgacttggcttcggcgacggtgttgaagaccggcaggccgatatgctgggtgccgcccttgcccggcgtcacgccgccgaccatctgcgtgccgtacgccagcgcctgctgggtgtggaacgtgccggtttcacccgtcatgccctgggtgatgaccttggtgttcttgttgacgaggatgctcattttagcttccaactccattgcgtccccgcggaggcggggacccagtactgggctcccgccttcgcgggagcacacgatcgctcaaaacaatgactcgtacaggtcgagccaatccgggttcttctcttcgatcagtcgcagcttccagccccggttccatttcttgagttggcgttcgcgaagtcgcgcgccgtccagttcatcatgggcttcgtaccagaccagaaacctgcaaccgtatttcttggtgaacccgtcgatcagggcgttgcggtgttgataggcccgcttcgcaagatcgctggtgacaccgatatatatcgttccattcagtcggctcgccatgatgtagacgta

SEQ ID NO: 3075 - DNA, 23285 bp, synthetic construct
  source 1..23285: mol_type = other DNA
  misc_feature 1..23285: note = Synthetic
tcagcagcagcagccgcttcgccttcagcgcgccggcgacagcgccggcgaacgtgtcggcgttgacgttgaaggtctcgccgtccgccgaggcggcgagcggcgccagcacggggatcagctcgtagccgatcagctggttcagcagcgtcaggtccaccttctgcggctcgccgacgaagccgaggtcgatgatcttctcgatgttggaatcggggtcgatcatggtgcgggtcgccttctcggcgaccaccatgttgccgtccttgccgcacaggccgacggccttgccgcccgcctcgttgatgtagccgacgatctgcttgttgatcgatccggccagcaccatctcgacgatctcgatggtggcggcgtcggtgatgcgcaggccctgcgcgaattccgacttgatgccgaggcgcttcagcatcgaggcgatctgcggaccgccgccatgcaccaccaccggattgatggcggtctgttccagcagcacgatgtcacgggcgaactgccgcgccaggctctcctcgcccatggcgtggccgccatacttgatgacgatggtttcctcgtcatagcgctgcatgtgcggcagcgcttcggagaggatgcgggcctggtcggcgggagcgatggggtccgtcatggagcggaatctctgctggcggcgatgcggggcggaacggaaaacgtgcaggcgcggttctagccgatccccgcaccggcgcaaagccggtcatcccgccgggccgtgcatgcggtgtcccgcgccggtcatgtccgatgggctgaactagtctgccgcgcgctgcggccaggcggcggcaatggcgagggcgagccagctcgcgatcaagatcgtgccgccggtcggtgccgccatcgggaagaagctatggccggtgaattggcgcagcgcgatggtgccggagaacagggcggcgccgagcacgaaaccagcggccgcgagcaggccgagatggcgctgcgccagcgtctgctcggcgagcagcacggcaccgatcaccgccagcgcgtgcagcagcaacagcgtcgctgccggcgcaaggctctccgcatgggcctgatgggcggcgagggccgagagaacgacgccggctgcgcccatcagggcggcgagcgcggcgagcagtttgcaggcgccacgcatcagcttcgctccgcgacgagttgcatcatcgccgcccgcagttccggcatgccggtgccgttgcgggatgacgtggcgatgacggaagggtaggcggcgggatgcttggtcagcgcggcggtggtctcggcaatccgtgcctgcaggtcgctggccttcacctggtcggccttggtcagcacgatctggtagctgacggcggcgcggtcgaaggtcttgaggatgtcgagatcgacgtccttgaagccgtgccggctgtcgatcagcacgtagacgcggccaagggtagcgcggccctgcaggtagcggtggatcagctcggtccaggcggcgatcttggtcttcggcgcggatgcatagccgtagccaggcatatcgaccaggcgcaggccggacttcggcggcccttcgaagaagatcagctcctgggtgcggccgggcgtatgcgaggtgcgcgccagcgcgttgcggccggtgagcgcattgatgaggctcgacttgccgacgttggagcggcccgcgaaggcgagctcaatgccgcccatcggcggcaggatgtcgatggtggcggccgcggcgatgaactgccagtcgccggcgaagatgcgccgggcgtgctcgatcgcatcgtcagagaagtcttggctcatgcgggcctcttaacaccgatgcggcggcgatgcaccctttcgcgtgcagcaagccaggcgcgaaacgaaaaagccctcgcgtgcggcgagggctttgcgatcttgatgctggctgcagcgtcaactctgtggttttcgcgcgaaggtcgacttgatgttgtcgaacagttcgatcttggcgccgttcttcttcatgatgatgccctgctggatcaccgacagcgtgttgttccaggcccagtagatcacgagaccggctgggaacgaggccagcatgaaggtgaagatcagcggcatccagtcgaagatcatcttctgggtcggatccggcggggccggattgagcttcatctgcacccacatcgtgatgcccatgatgatcggccagatgccgagtaccagataatggccgagcaccggaacctggctcggatcgtaggggatcaggccgaacagggtgaacaggttggtcgggtcgggcgcggacagatccttgatccagccgaagaacggcgcgtgccgcatttcgatggtgacgaacagcaccttgtagagcgcgaagaacaccggaatctggatcaggatcggcagacagccggcgaccggattgatcttctcgcgcttgtacagcgccatcatttcctgctgctgcttcaccttgtcgtcgggatagcgctcgcgcagcgccatcatctccggctgcacattcttcatcttcgccatcgaggcgtaggacttgttggccaacgggaagaagatcagcttgatcagcaccgtcaccagcaggatcgcgataccgaagttgccgaccaggcgatacaggtagtcgatcgcccagaacatcggcttggtgatgaagtagaaccagccccagtcgatcagcagctcgaagcggttgagcttgagctgcttgtcataggcgtcgatcagcggcgtttccttggcgccggcgaacagccgcgcgccggcagtgccggtggcgcccggcgcgatcgtctgcgcatcgagcagatagtccgcctgatagttcttggaggtgccgaccggcgtggaggagaagcgcgcctgcagatttgcggtggtgtcgggcagcagcgtcgccgcccagtatttgtcggtcaggccgagccagccgttggtgaccttgaaggagagcgacttcttctcgtcggcaaccttatacgtcacctcctgcaggccctgatcaccgagcacgccgatcatgccctcgtgcaggatgtagaagccttcgacatgcggggtgccgtgacgcgaaatcagcgcgaacgggtacagcgtcaccggcgccgagccattgttggtgacgtcgtccttgatggtgaacaggtagttgtcgtcgatggtgatggtgcggcggaaggtgaggccctcgccgttgtcgtaggtcagggtcaccggcgtcgtcgcggtcagcgtgccggagccttcctgcttccattcggtgttggcgtcgggaagcttcgcgctggttccgctggcgccgacccagccgaattcggcgtagtagggctgcggcgagccggatggcgagagcagggtgatcggcgccgacttcggatcgacggtgacgcgatattgcgtgagcgagagatcgtcgatgcggccgcccttcagcgacaggctgccggagacgcgcggcgtttcgatcttcacccgcggcgcggcggcaagcgctgcatcacgcgagacgaaggtggtcggcgacggctgctgcgacggctggctcggctgcgccggagtggtgccgggctggggcgcctggcccgcatccggcgccggcgtgttgggcgcttgcgcctgctgttgcacctgctgctgcgccttttgcgcggcctgctgcttctccatctgcggcacgacgaagaaatactgccaggcgatcagcacgatgccggacaagatgacagcgagaatcgtattgcggtgatcgttcatccggtgtctcggttcagcccgcggcttgcggcgttgcggtcgcgcgcttcgttaattgtcgatcgagccgcgtcagcgcggtctcgaaatcttgcagcatggtctcgaagccccggctgagcgccgcccgccggccgatcagcacataatcgcaatggggccgcataaaagagaggccatttcgcctcaccatgtcgcgcagccggcgccgcacgcgattacgctccaccgccgttccaaccttcttggagacggtgaagccaatccggacgggaccaggatcgcggcgggtgcgggcctgaacggtgaaggccggagccgagaagcggactcctgcggcagcggccagaaaatcagcccgctgcctcagtcgatccatcggaaataggccttggttcggctcaggcgctcaggcgcttgcggccgcgggcgcgacgggcggccagaaccttacggccgccggtggtggcgaggcgggcgcggaagccatggcggcgcttgcgcacgagtttgctgggttgataggtccgcttcacgggtcgtactccgctggccggctaaattgcctgagtgtgagattaagtccctgtggtttcagccaaaattcagccgagagggcgaagccggacgatcacgggacagttggcgcggcttatacgggagagggcggttttcgtcaatcgaacagcgttattccggattgccgcgctcgcgcaaaaagcggcaaagtcggaaagccttacttatatttaaggaaaccgccgcgggttcgccgcctttgtccgtgaatgggagggttgggggattcgccgggccggtgcggcacgagcggcgataaggggctcagggtcgacgcgatgtcactcttgcaggacggtaatggggagagggctccccgcagggtgagattcctgtcatggcggcggctcggtctatcgggcaagctgctgttgctgaccattcccctggtgatgatcgccgaagtgctcgtttacgtaccgtcgatcgccaatttctatcagaatcggctgaatgaccggctggcggccgccaacaccgcggcgctggtgctcgatgccgcgccgagcggcatggttcccgattcgctggcgcggcagatcctggacagcatcggcgcgcgcgccgtcgccatcaagcacggccagcagcggcggctgctggcgatcgccgacatgccgatgccggtcgagcgcgacgtcgatatgcggacgatgatgatgggcaccgcgatctacgatgcgttcgagatgatgctgaccaaggcggaaggctcgattcgcatcgtcggccccacctccgccggcgggcagttcatcgaggtggtggtggacgagcagccgctgcgccgctcgatgtatcgcttctcgatcaacctgctgctgtcgtcgctcggcatctcgattctgaccgcggggctgatctatctcgcgctgcattacctgttcgtgcggccgatgcggcgtgtcaccgccaacctcgtcgccttccacgccgaaccggagaacccggcgcgaatcatcacgccgaccgatcgcgccgacgaaatcggccaggccgagcgtgaactcgccgacatgcagcacgacctggtgtcgatgctgcatcagaagagccggctcgcggcgctgggccttgcggtgtccaagatcaaccatgacttgcgcaacctcttggcctcggcgcagctcatctccgaccagctcgccaccgtgcccgatccgcgcgtgcagcggttcgcgccgaagctcgtgcgctcgctggaacgggcgatcgcgttctgccaatccactctttcctatggccgggcgcaggaggccgcacccgaccgccgcatcgtcgcgctcgatccgatcgccgcggaggtgcgcgaatcgctcgggctcgccgccgacaccgcaatcgcctgggtcagccatatcgagcgcggcatgacggtggacgccgacccggatcagctgtttcgcgtgctgctgaatctggcgcgcaacgcggcgcaggcgctcgagcagcgcgcccccgacgaggcgaccgggagccagatccggatgctcgccaagcgggaagggatcgtcagcatcatcgaaatctccgataacggaccgggcgtgccgccaagggcgcgcgaacacctgttcgaggcgtttcagagctcggccaggccgggcggcaccgggctcggcctcaccatcgccgccgagctggtgcgggcccatggcgggcagatccggttggtggacagcaacatcggcgcgaccttccggatcgagattcccgaccggccggtggaactgcatgcgccgcgcggcagcgagcgcgccagcgcctgaggatttgcgggttttgccggcgttttcgccggcttcgcgccggggcgggatggccggggcgagaatccggccggcttgatgacagaatagcgtcagttcgccgtccgaatgccttgccaatccggagtttagccgttagctatggcccgctttcggcgccacgccgtcagcccgctttccggccttggacttcagggccttccaagcgacaacgcgcccgtagctcagctggatagagcatcagactacgaatctgagggtcggacgttcgaatcgttccgggcgcgccaaaccccgccgaatctacgattttctgcgatccgttaagcgggactacgccgaaggaaattcatcgtcgtatgagaagcggtgctcggtggcattcggcgttcgcatcggtgcattgcccttcgacgggtcgccaatgcattgatagtgatcaagcgcctggaacggacgtccagacgtgaccataaagcggaacttgcccctgcggtccgcggcgttccacgtggacttcattcgattccccttagcttaagatcgtaaatgcccaaattgctcgccagtaggctgccgtcacccagtcggttgagtgcgacaaagccagcgcgttcgaagatcgaccagatgttccgctccgcccgcgacagccagagttggatggcgagcaggcgccggctcattaggcggcaactctccacgtcgagatcacccggccacgcgccctcgtgaaaaaggcgatggatgaagtagtcccgcttgtccttaatccacgtcagatagcggatgtcggcctcggcgacatcgtgccgcttgaggattttaatgagcgacccgagggtcgatccttgcaacagagccctcttcgaagcgactgcgcccaacgctccgagtccgcgcccagcactttttcgagcctcacgcggtcgcacatgtgcatcgcactgatcagcatgtcttcgaacttgcccacggccaagtacgtcccggccatctcctggcaatagagaaaccgggccagatgaagttcggacatgccgtcgataaggtcgcgaagctgcgccttcgtaaggtcgggtgtgaacatctacgggcaccgcaatcgttgattgagcatgtcagcttggcattatcctgtgtagattagggccatggcgaagaatcccaacaatcggctcgaacgctgggaggtagcgatcatcaaagcgatgatagcgacaccccctcggaagaacgaccaggatatcctggcgtacttcacgcggccaacccgctccatcaatcacgggcggatcaaggacattcgcgataggaagacccataccggcatcgcgcctgcaagcgccgaggagctggccgcgttcctcgaggcttggcccaacgttgacggcaacggcctgcacctgatcggggacgaactgctgatcaaggcgcgcgaggcgatgctgcatgcggtccaagggttcaataacccgcgggcccactttaagtccgaggtgttcatcgtcacggcggtgatcgcttggacctatctgatgcacgcccacttcaaacgcgtcggcgtcgattaccggcaccgggaccggcgcacgggggacgtcctgaagactcgccatggcgccgacaagcattgggagctggagcattgcctgggcgacgccgcctgcccgcttgacgaggcggccaaggcgaacctcaagttcctgatcgagatccgccacgaaatcgaacaccagatgacgcgccgcattgacgacctgattagtgctaagctccaagcctgctgcttgaacttcaacgcggcgctgaaggcaatgttcggggctgaatacggtctggaccgcgaactcggcctcgccctgcaattcgctggcatcgccaagtcgcagcgcgatctcttgctgaaggaaacagacctgccggcgcatttgatcgcagcgcacaccgcctatgaagatggcctgccggaggctgtgatccgcgacccgaagtacgcttatcgcgtcgcctacgtggagcggtcggtcaattctaagggtaaggccgaccaggtcatcgagttcatccgaccggactcggcggaggggcaggagatcgcccgagtgctggtcaaggagtcagagcgtaagaagtacaaaccgaaggatatcatcgagctcatgcagcgagagggtcatcccgacttcagagggtcatcccgacttcaaccagcacgcgcatcaactcctctggaaagcggccgacgctaagaaccccgcccacaagttcggtgtcgaactccggccgggcgactggtggtggtacgacaagtgggtggaccatgtgcgcacccgactcatggcccgatgattgcgcggtcctgggagagagtgtcttcaagctctatgagctggtgccgccaccaatagacggcttggcgaaacagctggaacgcgtccttaccgtccgcgaactccacgtgatacccatcctcatctggtacaagcttggcgccaaacgagtacgttttcagaaggttattcctctccttctcgatgaactcccagaatatccacgaaccctcgcgatctgagttgaatcgctgccacaggttgccaatcgcttgggaatgctcagtggaggatttcgcgtcgacctttgccaagacatggccgatagtcctcaggagtgcgaccccagctacccagtacaggcgccattccgggagttcctcatctccgtccgcgacgtcagaattctggaaatggaagagaatgccaacgcagtcccagaagggatcccatcccttgagcgtctgcgtcggcgggctgcgagtgaaaatatcgcctgtgacatagtcaatcatcggcacctgcgctgaagttatccacccggccctgcgattgcggagcagtaggcttggccacagagagttccgtccactcgggctcgtgaagatagagccatgaagcggatttttcgaaggtcagccaagaggcatgatcgatcttccctttctccgcacagtcgacgtaactgcgatagagcgatctgcagttggtcgtagtagcttttggcgagcgtcggatgctctcggcgacactcgcgcgttgacggctacaacatcatagtgccccagcggagacgtagttatcagtttcatccacgctggggcgccatttcctgtatgaaaccgcgacctgagcccatctcccgttccgagaaggccttgcgcatggacggcgatcacacgatcgcagttgttgccgggagaggtcagagtggccggcgtgatgatgtcggtccatggccaagtttcagtccatggccgatagccaggtttcaagaaggctacgtcaacccttgctgtcgcgtcgcgaaggagctcgttggcctgtccacttcggagcaggagcgtcttgagggcggcggagttcttgccttgacggatcggccttgcacccgcgacgatgaccgcactgctgtttggcagcgcaaataagcataaggctcacgaatgctgttcgcgatcgacctcaccgtcagtgaggctgcttgtcagtcagcgcgccggcccttcgatgacagcggatgtcgctcgaagatcccatccacgcacgggccaacaaaaaaggcagcgccggagcgccgcccttatctggtgcggacatgaccgcttgttaacagccagaccacgatctctatggagatcatcttagagctctcggtttgcccgtcaagttctgtttgcggaccccaggcgtgccggaaagatatttttcgtcggaaggtaacagaggcgggcggagatcagcgcgacaacatgaacctggactctaaggccgcccgaaataagttcgatgcgggggaatgtctaaggggccataatcatgaagtatcgcgtcggattcgatcttggtaccaactcgctcggctgggcggtggtccggctcaacgccagcggcgaacctgatcgtatcgaggtggcaggctctcgcatcttctcggatggccgcgagccgaaatcgggggcgtctcttgccggagcgcgccgtgatgcacgggccatgcggcggcggcgggatcgtttcaagcagcggcaggcggcgctgatcaagtatctgacacaggccgggttctttccggccgacgaaagcgaacgcaaggcgctttccgcgctcgatccgtacgagctccgggcgcgcgcgctcgatgaggcgctgccgctcgctcatctcgggcgggcgctgttccacctcaatcagcgtcggggcttcaaatccaaccgcaagacggatcgcggcaagaacgacgataccggcaagatcaggatcggcgttgcgcggctatatgagcagatgcgtgacgcggacgcgcggacgctcggagaattcctgcataagcgccgggctgctgcttccgatccgaacgcgatcccgcatgtccgcacgcgcatcgtcacgctcgcggcagaggacggcaaggccagcgatgtctacgacttctatccggaccgccagaccttggaggaggagttcgaggcgatctgggaagcgcagaccagccatcatcccgaggcgttgaccgaggagcggcgtgcgcagttctacgagatcatctttcaccagcggccattgaagcagccgaagatcggcttctgcacgcttctgccgccggagaagaggctgccgaaggcccatccgctgtttcagcggcggcggctgttggaagaggtcaatgcgctgcggatcgtgctgcccggcaaagaaacgcgggcgctcgaaaaagcggagcgcgacgcactgctctccaagctcaaccagcgcaagaaagcggcctacgaatctctgcgcaaggcgctaaaactcgatccggatgcgcgcttcaacaaggaaagcgacaaccgcgaggacatgatcggcgacgagattgccgccgagatggctcacaagagccgcttcggaaaagtctggctcggcatgagcgctgaggcgcaagcgcaggtgatcgagcgtctgcgcgggctcgaaagcgatgcggatgcggatgatttcgaagcgtggctgcgcgacgatcacgggctggcgcaggagcaggcgaaggccgtgacggcggcgaacctgcccgagggctacggccgtttcggcgagaccgcgacgcggaagctgatcgctgcgttggagcaggaggtgatcgtttacagcgaggctgtgcaacgggctgggctcggccatcactccgaccttcgcgacgggcaggtctggacggacaagaaaggcaatccggcgctgccttattatggcgcggtgctggaacgtcatatcgtgccgggcaccgccgacccgaatgagacggacgacgccttgcgcattggccgcttgaccaatccgaccgtgcatatcggcctcaatcagctgcgccgggtcgtcaacgcattgatgcgtcgctacgggcagccacaggagattgcgattgagctcgcccgcgagctcaagctgagtgatgaccgcaaaaaggagatcaacacccgcaatcgcgagaaccgcaaggcggccgagaaacgttcgcaaaagctgcggaacatcggccaggcggataagggcggcaaccgggcattgctgaagctctgggaggagctcaaccccgaaaacgtgctcgaccggcgatgtgtctataccgggcgtgtgatctcgatcgacatgctgttttcaggcgcggccgaggtcgatcacattctgcccttcagcgtttcgctcgacgattccaatggcaaccgcatcctctgcctgcgcgaggtgaatcgcatcaagcgccagcgtacgccttgggaggctcgggatgatctgcgcgcccatttcggacctgacgcggggtgggaggcgatcgctgcccgcgctgcacgcctgcccagagaaaagcgctggcgtttcgagccggacgcggccaatcgttttgatgcgcaaggcggtttccttgcccgccatctcaccgatacccaacatctgtcgcggctggctcggtcctatctttcggcgctttatccagagaccggcgagggctcaggccatgtctgggtctcgcctggccggttgacggagatgctgcggcgggcgtggagcctcaaccaccatctgccggaccacaacatcgcaggcgctgccaatcagccgaagaaccgcaaggaccatcgtcatcacgcgatcgatgccatcgtcgtcgcgctggcggatcgcgccatgctcaaccgcatcgcgcgtgagtccggcaaggaaggtcatgaggctgccggccgtcttgtcgcgagcattcccgaaccctgggaaggcttctccgacgaggttggacgtgcggtgcgcgccatcaccgtcagtcatcggcccgaccacggcaccgcgagcaaggctggacgggcgaaggacaaggacgcgaccgctggccgtctgcacaatgagacggcctatgggctcaccggtgagaaggatgcgcgcggcctcgatatcgttgtgacccgcaagccgctatccgcattcaagaagtccgccgatctcgatgcgatccgcgacgacgacctgaagcagaagctgaaagcctgggcggccggcaaggaaggcggcgcgttcgagcaggcgatgcgcagcttcggtgaccccgagcgcgggccacgttcgcaccccggactgcgccgcattcgtgtgaccgagccgctctcggtaatccccattcgggatcgcgatggtcgcccctacaaggcctacaaaggtgattccaactaccgtttcgatatttgggagttgaagaccggcaagtggaaggacgaagtcgtctcgatgttcgaagcgcaccggccgaactggacgtcgccgatccgcgcgggaaacccgaccgcgcgcaaggtgctgtcggtgcggcagaacgatgtgattgcgatcgaacgcgaaaacggacccgaactgatgcgcgtcgtcaaattctctgcgggctccttggcgctggcgccgccgcaggaagccggcagtctgaaggcccgtgatgccgacaagaacgacccgttcaaatatgtctatggttcgcccagttcactacagcgctggaaggcgcggcaggtgcgcatcgacgagctcggccgggtcttcgatcctggcttcgcggtccgcagccgacggtcaagcgagtagcagaccatggagcgggtcgttgatatcgcaagtgacggccggcacctttctgcgcatcgcggttttctcatcgttagcgaggacaagcaggaggttggtcgcgtcccgctcgacgatgtgatggcagtgatcgtccacgcccatggcgtgacttggagcaccaatcttgccgtggcgttggctgaacgcggcgcgccattggtgttatgcggggccaatcacgcgccggtcggtgtctttctgccgctcgatgggcatcacggccagaatgcgcggatgcgcgcgcagtgggaggcgggacgtccgctcgccaagcagctgtggagccgcgtcgtcatcgccaagctgcgctggcaggctgccgtgttggaggcgcacggcaaggaacgtgcggcgctcgacctgttgctccgcaaggtgcgctcgggcgatcctgacaacatcgaagcacaggccgcgcgccgctattggccattgctgatgggaccggaattccggcgcgaccgcaccgccgccgatatcaatgggccgctaaattacggctatacgattctgcgttcgttgatcgcgcgctcggtggtggcggctgggctgcatccttcgatcggcattcatcatgcaaaccgtggcaacgcttttgcccttgccgatgatctcgtcgagccgttccgtccgctggtcgatgcgctggcgctgcggttggcgtcgaagggtttccacactgtcgagcccataagcaagcgggcgtttgccgggctgattgcggttgatcttaacggcgccgagggggttaccacggtgaccgtcgcggcgcagcgtctggcgttatcgctggcgcgggccttcgagacgggcgatgcggcagcgcttgtgctgccgcatccgccgacgccgatcgagattgcagggctcgaccgattagtccccggaccgacggaggatgctcgtcctgtctccgcgccggagccggcgccatgaccatcacccagctcagcggttacaggctcatgtggatcttcgtgatgttcgacctgccggtgtccagcaaagcggagaaccgtgctgcgacgaagtttcgccagtatctcctcgatgagggcttcgagaagagccagttttcggtctatgctcgcttctgcaacggcaaggagcagtttgaggcctatatgcgccgtatcgaggcgcatctcccggcgcgcggcgatgtccatgtcctgacctttacggaccgacagtatgaaaacatcgtccgcttctccggccaacgacgcaggcgccaaaggaaaaatccggatcagctcgcgttgttctgagcgaaatcgggatttcagagcttgctcgggcacccgaatcgcctttgattacaaagggatccgagcacaccgagaatagctagttagagatcgtggtctagcggcaacgacaagcgcagaagaggccttccaggaggcagaatagctagttagagatcgtggtctagcggcaactcaccgcaatcgcgggctggcctccggcaaagaatagctagttagagatcgtggtctagcggcaacacagtctcgcagttcgatcccatctttatcagaatagctagttagagatcgtggtctagcggcaaccgttttgcaagaggcgagggtccgagcggcagaatagctagttagagatcgtggtctagcggcaacggcagaagacttcaagcatatcagcgcgaaagaatagctagttagagatcgtggtctagcggcaaccgcggtgtcgagcacatcgagcgccggcttagaatagctagttagagatcgtggtctagcggcaacgcgcaggctgttcgtaaaaccagatatcgagaatagctagttagagatcgtggtctagcggcaacgatgcgagcacctgctcaatctcggatggaagaatagctagttagagatcgtggtctagcggcaacaaagacacgcttgctgagcgctccaggtcgagaatagctagttagagatcgtggtctagcggcaacaattttcacgttggatgtgatcatcgcattagaatagctagttagagatcgtggtctagcggcaacttgttggcaccgcgccgcttgttgctgcggagaatagctagttagagatcgtggtctagcggcaacatggaacacgacgagggtcttcttatctgcagaatagctagttagagatcgtggtctagcggcaacccgagatacgcgatgaggacaccaggcttcagaatagctagttagagatcgtggtctagcggcaactttgcgtcgaagttgttcaacagtgcgatcagaatagctagttagagattgtgaccggagagggtgtccgccggacctacttcgccatacgtaacgacctggcatctgtcttaatgcgattatctggacgtgcctaactcaggctgcagctaggtgaaaggaaggtcgtgcgggcaatggttcagttctcagacgcgcgactcatgtgctccaagtgttcgtgcccgcgcatcgcttcctgaagacgttctcgtgatggcgcggttagcctctcgacttgcagaagacgggcatatttcaacggtggatcatcttcgtccaagacgatggggttggagagcacgaagtcggtgagctcggccacagcaatccccccgtggttccgtcgatgccgcaaaccttgcggctttcgaaatggcacacgtgaactgacggtgccaggcttccaaaggaatgttccggatgcttcctcggtgcgatccagttccttccagttcctttagatgatgggtaatttgatcgcggatgcgtgcgccggtgtgaagccagccatgggctctcgcgactcgctgagcaagcgcgtcctctcgaaccggcgcttccgctgccatcacaatatcgaccattgcctgaagggtcggtcggtaggagaggtcaaaaaagcaatccggatcggctttgatggttgataggtccgctacaacgaaaaccttcagcgggtgctccgcgttcgacagcaaggcaatttccttgcatcgatttccgcagagccattcggcagctcttcgcgttcaaacgcggttgacctatccagcgatcagctggccaatggttcaaccagcctttagcaagagggcggtgcaacgctacggatgcgcccttgaaccaagaacagcgcagatcgccaccacggcccctccatcgcgtcactgcgtgagatagacctgattgcgtcagatcggatctggcgtgatcgcgacgatgcgttggggaagcgacgataagcgtgcgtgccgaagcccggctagccgtgtcgattcgatagctgcaatcgatccagccgatcgatctcccgcacgccatggcggcgacgtggagaggcagcggtcggcttgcgattgacaatccaacggggcggcgaggcgggtcgggctggccccgcccgagacacttcgcggtcgaacccgaagcagctccggcgggaccggccgttgcgatcattgcaccgtgtaatcagagcgccgacattttccgatcgctcttccacgccttcggagcatggttgaactgcatcaccttgctggtcctgatcgtcttcgtcggcagcatccgggtctgggcgacatgcacagtgcggttgcggacggcggtgcggtcatgaatgcgcgtcacgatgttgacgcgcttcacgggctgcacccgcgtcacgttgacgacacggttgatgtgcttcacgtaacgcgtccggttgacgtccttgtattgcgtgacgttacggaccttgttgaccgtgtggtagcgatacaccgtgctggtgctcggtcgtgccgtgttatgcgcgatgtgccgggtctggccggtcgtgatcgtgcgtgtcggcatcatgcgcgtctgcgccatgtgctggttttcacgcaggacggcagtccggttatggacgcgggttacgacattcagccgggtaatcggctgaacgcgcgtgacgttgacgatgcgcttggtgtgcgtcacgtacctcgttcggttgatgtcacggtagcgcgtgacgttttgaacccgttgcttgttgtggtatttgtaggatgtatgtaccttcgtcgaggagatgggtcgtttttcggcggttgcgggcagcaccgcaaacgaggtgctgagcagagcggccgcggacaatccgacgagatacttgatcgtcaacgtcatggtatgagctccttaagggccggtgaccacgttgcctccgccggtcccatcggaggcacgtagaaaaagctcaagggccgcaacgggtttcgcatcggaaacccgcggaacgaactgttaggcccgaaaaagagtgtcgttcttagcgtccggttcatgccggaactttgttttgaaattcgattcaacaaatatttagcctcaatcgcgccgttctatcggcaaattgtctcggcatgccttacgctccgtgggaaggggcgcccgggggcagggaattttcatgcgaatattcttctatgcagcggtcagcgctctcatcgcgacgagcgctatccagactgcgtcggccgcgcctcagtcagggcgaaccgattgccatgcagccgcgctcgccaatctgcagcgcctcgctccgcggggttacgcgatctacgaggcggtcagcgacaagaagcaattcttgcattggctgacctgtgatgacgtccagctcgggctcgcgaccggtgtccatgagacggtgcatctgttgaccgaggagcgcgacggctatccgctcatcgatggcagcgtcgttcgccgtccgcacgaggtctcgaaattcttcgcgccgaaggagatcgccgggaaattcaaacctcaggatatctacgtgcagacctatctgcggccgggcggagcatcgtccaaggatgacctgctgtatctgctcgacgagctgaacgcctacagccacgatctcaatgcggcggtcagcctcgtctccctgcgtcggcgcgaccgcgacgtcgatcatcgcgacggccttgcggcgatgatgaccttcgtcatgagctacgccgagacggcgcagaagagtcaggcgtcgacctggcagcgcctgttgcgcccggggccgaagcatgtggttcagaccctgtggaagcaggcggagggcgtgctggcgtcgtcgtgcggcattcccgccttcggcaagaacgaccgcgactatatccgcttcctgtgcgagcctaagaacggtgccgcgctgtccgaggtgcttggccgcgcgccggcttgcgccagcgaatgtctcgcggcgccgacggcgtccgccgtgccgcccggttaagcgcggcgtcgtttcgaggtttactttcgcagcgggacgcctttggtggtgaagcgctgggtccggccgctgccgcgcaccggccgccgcgtgccggcggccttgccggtgccgggcggttgatgtgccggcacgagctgatcagggcgtgagccgatcagatcggcgcggcccatctgtttcagcgcctcgcgcaagatcggccagttgtcggggtcgtgataacgcaggaatgccttgtgcagtcggcgttgccgcaatcccctgatcgcctcgaccttgtcgctcgcgccgcgccgcacgccgcgcagcggattgacgccggtgtggtacatggcggtggcggtcgccatcggcgagggcaggaaggtctggacctgatcggcgcggtagcggttcttcttcagccagagcgcgaggttcatcatgtcctcgtcggtggtgccgggatgcgccgcgatgaaatacgggatcaggtagtatttcttaccggcctgccgcgcggcggcttcgaacatcgtcttgaagcgatcgtaagcgccaatgcccggcttcatcattttgtcgagcggcccgcgctcggtgtgctcgggcgcgatcttcagataaccgccgacatggtgtgtgacgagctcctgcacatattccgggctcttcaccgcgagatcgtagcgcacgccggaggcgaccatcaccttcttgacacccttcacctcgcgcaccttgcggtagaggcggatcaggtcgtcgtgcgaggtgttcaggttcgggcagatatcgggaaacacacaggatggccgccggcacagcgcctcgaccttcggatcgttgcaggccatccggtacatgttggcggtcggtccgccgatgtcggagatcacgccggtaaagcctggcgtcttgtcgcggatccgctcgatctcgcgcaggatcgagccttccgaacggttctggatgatgcggccttcgtgttcggtgatcgagcagaacgtgcagccgccgaagcagccacgcatgatcgtcaccgagaacttgatcatgtcccaggccgggatcttggcatctccgtaagagggatgcggcgcgcgggcatagggcaggtcgtagacggcgtccatctcgtcggatgtcagcgggatcggcggcggattgagccacaggtcgcgatcgccatggcgctggaccagcgcccgcgcattgccgggattgctctcccgatgcagcacgcgcgaggcgcgggcataggcctcgcggtccgtttcgacctgctcgcaggccggcagccggatcacggcgtcgccggcgtgacggccggcgccctcgtcggcggagtcgaggtcatcggcatgcagctcggtgaagtgatcgggaacgctgcggaacagcgcgacgccgcgaatggagtcgagatcgtgcggcgcttcgccggccgcgagccggtgcgccacctcgaccaccgcacgctcggcattgccgtagagcagcaggtcggccttggcatccgcgagcaccgaacggcgcactttctccgaccagtagtcgtagtgggcgatgcggcgcagcgacgcctcgatgccgccgagcacgatcggaacatccttgaacgcctcgcggcagcgctgggcgtagacgatggtgcagcggtccggccggccgccgcccgcgccgcctggcgtgtaggcatcatcgtggcgcagccgccggtccgccgtgtagcggttcaccatcgagtccatgttgccgccggtgacgccgaagaacacccgtggcttgcccagcgccttgaacggctcggccgaatgccagtccggctgcgcgatgataccgacgcggaagccctgtgcctcgagcagtcggccgatgatcgccatgccgaagctcgggtggtcgacataggcgtcgccggtcaccagcacgatgtcgcaggcgtcccagccgagcgcctccatctcggcgcggctcatcggcaggaacggagccggattggcggaaggcgtccggtggcgcggccaggacatcaagggcttttcagcagtaagggtcatggcgccacgcataagactccagcggcgcaaattcaaccgatcgacgctgcgggctgacgatcggtccgcgccaggagcgacgccgtgcggccaaggttgccgccggaggcgcattccatgactggactacaggcaaaataacccaagccgaacaggaagatggcgcgtttggtggatcgatatcgctcgcgccggtcagtctcgggcggcggcctcggcgcgtgcagccgtggtcggttccgccgcacattctttcaaggcggcaaagattccgtcggtcatgtgtctgttgcgcagagcggcgtcacggccgcacagagccgtgttcgctccgaggtcagcctcggcccttcacttggtccttcacctgatctttcccttggatacgcggccggtagcccatggtgcgggagatttcgcggccggcgtcataaatggtgctgctgagtttgttcgcgttggccctggcgcgttcggtgggggcggcgatgccgatcgccgcgacgatggttccggagctgtcgaagatgggagctgcgaagccggcgaccccgaacgtgccttgatcgaaggtcgcggcgacgtggttcttgcgcacctcttccaggatcgcgcgcaggcgggcgcggttgatctcggtatgcggcgtatggcgcaccatcttcaccgttcgcatgtactcattcaaccagtgatcgacctggaacgcgagcaggacgcgcccaaccgccgaccatagcagcggccgcgagtcgccgaccgtcgccgaaaaccggatcgcggtcgggctttcgaacttttcgacatacaccgccgagcgtttgtcggtggacatcaccgccaggacggaggtctcgtgcgtctgatcgacgatccgccgcatcacgggccgggcgagctcggcgaacccgagaaagcgccgcgtcgcagtgatcgcactggccaggccataggcttccgggccgagctgatacagtccatcgacaaacgacaggtgctggctcgcggtcagcccgcgcagcaggttcagcaggctgctcttcggcgtgccgatgctgtcgctcaatgtcgccagcgacgcgccggtcgggcgcgagcacaggtcatcgaggattcgcatgattcgatggaccgagcgcggggcggccgagtcggagacggcgtttccgcccgcggctttgctggtttttcgccgtctgggcgttgcggacgtcgcgcgcggtgccatcagcccccctgatacagcgcgccgatggcgacgagctcggcgatatccgcctcggaaaagccggcttcgcgcagcacttcgccgctgtgttcgccgaggcacggcggatggcgccggatcgagggcggcgtcttgctccaggtcgcggccggtccggtcacccgcaacgtcccctcggtcggatgctggatctcttgaaacaggccgacggcggcgaggtgcggatcgtcgatcaggctgtcgagatcgtgcatggtgccgtaggggatatcggcctgctcgaacagcgccatccagtccgcggtgctgcgcgtttgcatgacctcggagaaccatttgtagacgaagtcgtaattcagggtccgtgcggccatgtccttcaggcgcggatcgcgctgcgtctcgtcggcgaggccgacggcgctgaagaacgctgtccactgcttgtcggtgtagaccagggcgcagagatagccgtcgctggtgcgataggggcggcggtcgggagccagcaggcgcggatagcccggtgcgccgatcggcggatcgaagctgcggccgcccatgtggtcgccgagcacgaactgcgccatcgtctcgaacatcgggatttcgatcgcctggccctcgccggtgcggtcgcgatgcaaaagcgcggcgaggatcgcatgcgttgcgttcaggccgacgatgcggtccgccatcgtcgccggtgagtagcgtggctcgccggtgatctgtcccgacagcgccggcagcgcggtcaatccctggatcaggtcgtcataggcgggccggccggcatacgggccggtctcgccgaatccgtgcaggctcgcatagacgaggcgcggattgagcgcgagcaggtcgtcggcaccgagccgtagccgctgcatcgctgccgggcgcacgttgtgcacgaacacatcggccgttgccgacagccgcagcagggcctcgcggccgcgctcgtgcttcaggtcgagaacgatggaacgcttgttgcggttgccctggagatacatcgcgcccatgcgtggatggcgcatgggcgcggcgtgacgcatcacgtcgccgtccggactttccaccttgatgacgtcggcgccgtagtcgccgaggatcatcgtggcgaagggccccatcatcacactggtcaggtcgatgatcctgacgccggtgagcggacccttgcgtgcgggggcttcagtcggtcgggcggtcacggataggcctcagcggttggcgttgacggcgtcggtgaaggccttgaagacctcggtgccgggcttgccgcgcttgtcgaggtccttcacccagtcctcggcgacgaccttgaaggcatccgcgaacgacttcttgtcctcggggcctaactcgatcaccttcatgccctgcgacttgatctt

SEQ ID NO: 3076 - DNA, 23282 bp, synthetic construct
  source 1..23282: mol_type = other DNA
  misc_feature 1..23282: note = Synthetic
ttgccgacacagcgcgtgtcggccagccccagccggcgcaggcgctcggcctccaccgccgtctgcgccagggccagggtgaagcccgacagcaggtggcgcaccgtcttcggcacccgccgccagcgggcgaagctgccggcactgagccgggcattgaccagggcgcaggggatgcggcggcggcgcacgccgcccagcaggttgggccagaactccgattcgacccacagcgccagatcgggccgccaatggtccaggaagcgctccaccgccgccggcaggtccaccggcacatattgatggaaggcgcgcggcggcagccgccgggccataaggtcggcggaggtgacggtgcccgtggtcaccaggatcgacagggccgggtcgcgggccagcagccgcccgatcagcggcagcaccgccaggctctcgcccacgctggccgcatgcagccagatcagcggtccggccgggcgcggacaggcggtccggcccagccgctcgccccgccgcagcgggtcctccttgccgcgggcggtgcggcggcgcagcagcaggtggacggcgggggcggccagacaggtgaggccgcgatagagcaggtcgaggatcaaggcggggacaagggtcagggcgggagggggacaggatcgggccgggtcggcggcgatggcggcgggcaccctagcacggccattgtggcgggagtaagggccgcacatcctgccgtcgcccgcacggcggggacggcggcgggaaaaaccgcgccgcgcgcgtcctttggggtcttgacgcacggcccggcagggccgacctttggggatgcggggatatggctgtcccctctggtttgacgggagcgttggtatgacatcggccaaattcctcacgaccctgcgcctggcggccctgcccctggcggtgatggtcgccgtggccgccgtttccgcgccggctgcggcccagcagccgggttcagcgcaagcgggcatggcgcagacggtgaacgggttcgagcgcctgccgccgcgggcgccgctgccgggtgagcgcgccgccggtctggcccaggcggccccggccctgcccggcaccgacaccgccctggcgctgcagcagagccgggacgcggcggaggatgaccagccggtccgcttctccatgaccggcacccgcatgatgggcggcaggaccaccggcgcccgcgccgaccattatctgggcgacggcgtcgccgtctatgacagccgcggcatcgagaccggtccctattacggcttcggctacggccagacgccgcacatggcctacaacgaatcgtatctgcgctaccgctacaatggcaacatcgcgggcgtgccgtcggtcagcgccccgtccacgctctggcgggactgatgcgccgggacgcatggggctccgctgtcctgtgtgtcctgctgactacacccggcgccctggccgaacaggccgtgccgggcgctccggccatggcccaggcccaatccggcttggcccagtccggcttggcccagatcagcccggcccagtccggcccggccacagcccgcctcggcggcgtgaccaccatcatgattccccgcaccgccccggccggcccgtccccgggcgggttcacgctgctcaacccggaggaggtgcagacggccgcgcgggacgccgccctgcgcccgccgccctgttccggccgcagccatgcggggcgggagatcggcagcctgatcggcggcctcgccgggctggccgcggccatcgccctgtccgatgacgatgacggccgcgacgaccagcgcgccgcccaggcggccggcgccatcatcggcggcaccgccggctatctggccggggcctggtatgacggccccgacagctgcggcaccacccgcctgcccgaccgggtgccggtgatcttcctcagcgacgaccagctggaccggctggagcaccggcggcagacgccgggacaggccaccctgcccccgcgcgaacccggccgctgacccgccgcgccgcgacagggcggcgggcatggacgacagctccgccatccccggaccgccattttccgctcgcctcgccgccggcttcgtgccagcaagggccggatctggaggagccatgctggacatctatatcgacgccgatgcctgcccggtgaaggaggagagcttccgcgtcgccctgcgctacgaccttcagctctatctggtggccaacggcccgttgcgcgtgccggcggagggcaaggtccagctggtggtggtgcaggacagtttcgatgccgccgataactggatcgccgagcgctgcggggcgggcgacatcgtcgtcaccgccgacatccagctggccaagcgctgcctggaccgcggggccagggtggtcggccccaacggccgccccttcacggcggccaatatcggcagcgcgctggcttcgcgggcgctgatgcaggatctgcgcgacatggggctggtccagggcggcggcccgcccatgagccggcaggacaagtcccgcttcctccaggccctggaccaggccgtcaacgacgcccggcggggccgctgacggcggatcggagggggcgccgctgccgggcctactgagcccggcgcctggcccggcgggacatcatgttcagcccctcgatcagggccgagaaggccatggcggcgtagatatagcccttgggcacatgggcgccgaagccctcggcgatcagcgtggtgccgatcagcagcaggaagcccagggccagcatgaccacggtcgggttgttgtggatgaaggtggccagcggcgtggccgccaccagcatcaccgccacggtcaccagcacggccaccaccatgatcggcacatgctcggtcatgcccacggcggtgatgatgctgtcgatggagaacaccagatccagcagcaggatctggccgatggcggcgccgaagcccagcgtggccgtcttgccgtcgaacaggtcggggccgggatccgggtccacagtgtgatggatctccttggtggccttccacaccaggaacaggccgccggcgatcaggatcaggtcgcgccaggaaaagcccttgcccaggatgctgaccaccggctcggtcagctgcacgatgatggcgaccgtgcccaggagcgccagccgcagcaccagcgccccgccgatgccgaagcggcgcgccctggcccgctgcgcctccggcagcttgttggtcaggatggagatgaagaccagattgtcgatgccgagcacgacctccatggcgatcagcgtcgccagggccgcccaggcggccgggtcggccagaagaagcatcaggctatccatggattaacatcctcaccgggaaacagcggaaagacgggcggagcctatgacgcgccgccgcatcggactggtacaataagcgcaccgcgggcgccactcccgttgcagcaggcagcgcggcggcgcggaaccgaaaacggtaggggacgaaaacggcacggggcggagacggcgggggttgggcgcacacgaaaaagcgccgcgacctctggggaaggtcgcggcgcccggtccggggccggcgatgtggtgagaggggggcacgggggccacaccgcccgcggtccggtccgtttctgtcagcggcccggcagcgggccgcccatggcgatcagatctcctcgtcgccgaagccgccctcgtcgaagccgccctcatcgaaggccgccgcctcggccggcaggtgttcaccggcggcattcatggcctcctgggccacggcctccccgccggagaacatgtcggccagggcattgcccagcagcatgccgccggccacacccatggcggtctgcgccgcaccggccaggaagccgccgccggcccgcggctgggcggcataggctgccagccgcggatcggtctgggccggctgcccccagggggccgcagccggcgcggcggccgtctgcaccggccgggacggcggacgcgatccgccgaacaggctgccgaacagcccgccgctgcgcgacggctgcacctgctgctccagcgccgtcacccgctgctgcgtggcggccagcgcctgctccagcatgaccaggctctgggccatgagatagggggccgccggctggcggctcacctggtcgcggatataggcctccgcctcggggtcgcgcgggccgctgtcggcctggcgcagcttggcgaacaggtcatcaatgatctgacgttcggtctgatccatggtcgtctcgaagaatcgtctcggatagggagaggggaaggttccgccggacgcacagattccgcagtcaccggcggcagggcagcaaccgccatgggcggaaccgctgcggccgcggcgcttggcatcgatctgcgctcattccgtcggggaccctgccgccctgcggcagacgccggcgacagggggtaaagcgggtcagtgcctggggaagggtcgatgcaggctggtcatatgatcactccaagtgcggtcacgcccgtcggcgcaagagcaggtgaagagatccgacatcgcgactacgtctatgtcgccagaggggcccggatccgaacgctgcagacgtgggaagaccccgcccccctgtcaagggcgcggcgcatggaaatcgtctgccgggcgaacggcattctcccgtatggcaccctcttgcgccggggccagaccgcctagcggtggaactttggctggcttccacccgtctcaatctcctaggctgacagcagaaaattggcgctcagccggtacggtgcatggaggggccatgtccgaggaactgaagctccgggtccggcgggccgccttcggcacgctggcggccctggcgctgctgctgatcctgctccagggcatcttcgccgtcgtcgtcggcggcgaacgctgggtcgatcacacccatgatgtgcggctgacggcccagcgcctcgccaccgccctcggcacagccgaagcggcccagcgcgcccagctgctgttcggcgaccatctctcccttccccgctaccagctggcccggcaggacaccatcgaggcactggaccggctgcaccgcctggtccaggacaatccggaccaggtggccgccgttgccgccctgcgcccgctggtggaacggcgcctcaccgatctggcccggaccctggatctggccgggggcggcgcccgcgatgcggcgatcaccttcgcccgcgaggccgcccagcgcgccctgccgatccccgagcggctggccgccatccaggcggcggagggaaagctgctggccgagcgcgaggggcgggttgagatcctgcggctggttttcctggccggcggcatcgccatggccgtgctgctgggtctgctgctgtggcgccagttccgccgggccgtcagcgaggcggagcgggaaatcgtcgagcgggccaacctggaacgcgttctggaggagaagctgggcctgctgcgggagatcaaccaccgtgtcggcaacagcctggccatggtcggcgccctgctgcacatccagaccaccggcgccgccgacacccgcatccgcaccgccctgcaggaggcgcgggcacgggtcaccgccgtcgggcgcgtgcatcagcggctgatgaacgccggcacggtggacacgctggatctggccgagcatctgccggccctgtgcgacgagatcgtcctggcgctggaccgcaccgggcagatcgacagccgtgtccggggcagcatcgtcgtgccggtggaaaccggcgtggccctgtcgctgctgatcaacgaactggccgcggccaccctgctggcccgtgggtcagcggaacccggtccgttgcggctggcgctgcggcgcgagggggaggcgatcctgctcaccctgaccgatcccgccggctgcctgcccgaagacctgttggggccgcaccggctggaccggacgggtgactgggatgcgccgggtggacaggagatgggcgtccgcagcatggtcgtcgccgccctgctgggccagttgggggcgacaccggtgctgaagccggacagcagcgaactgcgcctgaccattcccgtcgtctggcccgtgccccgccccgcccccgcggccgccgcggccggcggctcctgacagcgccggccgcgcgtcacccggccgcgaccgtcactggcccgtcccgctccgttcggtcttcccctgcccgccagatccctggcttcccgtaccttggcgtccggtgccctgggaccccgtaccctgtgtcgtggcgttgcggtcggtctgggtcaccgcccccccgtcaccggccccgccgctgatggcgccctgccgctgcccggccagggagcggtcgggcagggttcccgtcgccgtgctgccggtgccgccggtatcggtgctgccggtggccgcaggtcccgtggcggcgcgatcctgcccgccgctgcccgtcccggcgctgccggaacccggactgccggtgctcgaactgccggacgtcgaactgccggaggtcgaactgccggaggccttgccgctggactgcctgtcccccgccgccggcatgtcggaatcggtattgcccgtggcggtggcgtcctggcccggcggggtctcggtgccctgtgacgcggtgccgcccgccgccgccccctgacgcttttcagccagggacccgtcgggcaacgcgcccgtggtgccgccctgatccacccggttgcgctccgccccgctgcgggcgtcctggcccggcccgctctggcccggcccggcctgatcggtcccggtccggtcggcgggcatggcggagctgccgccggtggactgtccggcggccggcagggcggcggcgaacagcagggcgcaggcggcggtcatcccgcggaatccgccgcggcggaacggcatcaggcgaagcgtggtcatcggcatctcctcccggcccggtggtcccgggcccttggctgctttggttgaccggccggctgggtgtcagccggtctgccgggcctcaacagccgatgccgcgattcatccggcccgttcttcgttcccccgcctcacaccgccagccggtccagggcggcgaactcgtcatcgctgaggcggatgccggcggccgccacattctcctccagatgccggaccttggaggtgccggggatcggcagcatgaccgggctgcgctgcagcagccaggccagggcgatctggctggggccggcgccgtgggccttggcgatgctgtccagggtcgatcccgccttggccagatcgccggcggccagcggataccaggggatgaagccgatgccggcctgttggcaatgggccagcacggcctcggcccggcggttgccgagattgtacaggttctgcaccgtggccacggggaagacggcgcgcgccgcctcgatctcctccaccgacacctccgacaggccggcgctgccgatcacgccctcgtccagcagggtgcggatggcgccgaactgctcgtcccgcggcacggccgggtcgatgcggtgcagctgccacagatcgatctgctccacgcccagctgcacgcagctcttcttggcctgctggatcagatattccggccgccccaccggcttccacacatcggggccggtgcgggtcagcccgcccttggtggcgatcaccagcccgtcataggggtgcagcgcctcgcggatcagcttctccgacacgtccggcccataggaatccgccgtgtcgatgaaggtcacgcccagctcgggcaggcggcgcagcgtgcgcagggcctcggcccggtccgccggctcgccccagatgccggggccggtgatgcgcatggcgccgaagcccagccggttgacggtcttgccggcggggccagtgccggtgggcagcgtgaacgtaccggacagacgggcatcgggcgtgcggctcatgatcggtccttctggtttctgggcctggtttctgggcctgggtgcagggctggttgccgggcctggctgctgggcctggctgctgggcaggggggcacaaccgcggtcggtgccgggcacccaggccaacaggcggcggccggccccgttgcctgccgatgcgccagcatccgcctgcccgcccctttatgccaccggaaattgcctgcggccgatcagcgcccgtcccggccgcacccgggccgccagcacccgggccggccgcacgccggtgtcagcagcccaccacattgacagccagcccgcccaggctggtttccttgtatttggtgcgcatatcctcgccggtctggcgcatggtctcgatcacggcgtccagcgagacgatatgggtgccgtcgccgcgcagggccagataggcggcgttgatggccttgaccgcgcccatggcgttgcgctcgatgcaggggatctgcaccagaccgccgatgggatcgcaggtcaggcccagattgtgttccatgccgatctcggcggcattctcgatctgctggttgttgccgcccagggcggccaccagcccggccgcggccatggagcaggccaccccgacctcgccctggcagcccatctcggcggcggagatcgaggcgcgcatcttatagaggaagccgatggccgaggcggtcatcagcagcgtgcgcgtgccgtccggcgtggcgttgggggtgaacacctcgtaatatttcacgatggccggcaggatgccggcggcgccgttggtgggggccgtgaccacgcggccgccggcggcgttctcctcgttgaccgccagggcatagaggctgacccactcgaacacctgcgacgggtcggtgcgcggcacccgcttcatcagcgcctcatgcagggcgcgggcgcggcgccgcaccttcagcccgccgggcaggatgccctcctggcggcagccgcggtcgatgcagtccagcatggcctgccgcacccggtcgatgaaggcggtggtctcggcgcgggagcgccaggcctcctcattggcccagacgatgtcggggatcgacaggccgtgcgccgcaccgatctccagcagctcggcggccgagccgaacgggtggcgcagggccacgttgggccggctggcgggctcgccgccctccaccgccacggcgccgccgccgatggaatagcagatgcgctcgatctgccgcccgtcggcatagtcggcggtgaagcgcatggcattggcgtggccgggcaggaactcgcccatgcggaagcacagatgctcgccctcgacgaagcgcagcggcgcgcgcccggccagcggcaggctctggctggcgcggatctcggcgatcaggcccggcacggtgtcggggtccaccgcctcgggctgccagcccgacaggcccagcaggatggcggtatcggtggcatggccgtggccggtcagcgccagcgagccgtagaggtcgcagcgcaccgacagcggcggcgccgcctcgcccgcggccatctcggcaaaggccgccgccgcccgcatcggccccaccgtgtgcgagctggacgggccgatgcccacggtgaacaggtcggtcacggacagcacgggcgggacaggcggcaggggcacgatgactcgtcacgtcagggggatcggggtgcgcccggcagccccggcggcggcccgccgcccggccccgggcggcccgcaccctaacaccgcccttcccccccggcaacccgcgcccggggcggcgccccgctggcgctctgcaccgcaatggggatgctccacttcgccggtcaccggaccgtgcgcagtgcagatgatcagcacgcggaagcgccgtgcagtggaccgacaaaaaaggcggcgccggagcgccgcccttatctggtgcgtttgactgcttgttaacagccagaccgcgatctctgatttgccattcttaccttagaattgaaataatggtcaagcgtcggcacaggacgaatttgatggggatatgatcatgccgtggcgtttgggtctggatatgggcgccgggtcactcggctggtgcgcggttcgcttggatgagcagggacagcccattggcattttggcagccggggctcacattttcggtgacgggcgcacccctgcgcggggagaccaacagggtacgcccttggcggtggaacgtcgggcggcgcgcgccatgcgtcgccggcgggatcggttcaagcggcggcaggcagccttgctgacacagttggcggcccacggcctgttcccggccgacccggtgcgcgccaaagccctggaattgctggacccctatgaactgcgaaccagggccttggaccagccgctgccgcttgagcatctcggccgcgccctgttccatttgaaccagcggcggggcttcaaatcgaaccgcaagaccgatcgcggcgccgaggaggaagcgggaaagatcgccgtcggcgtggatcggctgcgtgccgccatgcgcgatgcgggcgcccggaccatgggcgaattcctgcatcggcggcgcctctccgcccccgatgccaacgccatccccagcgtgcgcacccggcttcgtcccgaaaccggcgaagatgccaagggcgacggctatgacttctatcccggccgcgatctggtcgaggaggagttcaaggccatctgggccgcccaggtcccgcatcacccggcggtgttgacccccgcggtgcatgatctgctgcaccggaccattttccaccaacgcccgctgctccgtccccgaatcggaacctgtacgctggtcgatggcgaacagcgtctgcccaaggcgcaccccctgtttcagcgccggaggctgctggaagaggtcaatgccctgcgtattgtgcggccggggacagcggcggcccccctcacccggatgcagcgcgacctgctgctgctgaagttgaaggacaaggccaaggtcggcttcgagagtctgcgcaagctgctgaaacttcagcccgaggcccgcttcaacaaggaaagcgagcatcgcagggatctggcgggcgacgaggtctttgcccagatggcagccaggacccggttcggcacggcctgggcacatctgcccgtggagacccagtgggccgtcatctcccgcgtcctggaggaggaggaaaccgaacccctgctggcctggctgcaagccgaacatgggctggatgcggagcgggcaaaggccgttgccggcgcccggctgccccagggctatggccggttcggcgagacggcgacgcgccgcctgatcgaggctctgaccgccgacgtcatcacctacgacaaggcggtggtggccgcggggctggggcatcacagcgaccggcgcaccggcgaggtcctggacgacctgccctattacggcatcacactcgaacgtcatcttctgccgggaacgggggaccgctccgatccggaggagatgcgcatcgggcgcctgaccaatccgacggtgcatatcgccctgaaccgcctgcgccgggtggtcaatcgcctgatccgcacctatggccggccggcggagatcgccatcgagcttgcccgtgagctgaagctgaccgcagaggaaaaacagcggctatcgaaggaaaataatcgcaaccgcgccgaggccgaggtccgatccaggaaactggcggagctgggccagcccgataccggcgccaaccgcgcccggttgaaattgtgggaggaactgaacccggacaatgtgctggaccgtcgctgcgtctacagtggcgtccagatttcaccggccatgctcttcaccgacgtggtggaggtggaccacatcctgcccttcgattccacctgggatgacagccacgccaacaagatcctgtgcctgcgggaatggaaccggcgcaagcgcaaacaatcccccttccaggcctggggccacacgccggattggcccgacatcgccgcccgcgccgcccgcctgccacgggagaaacgctggcgcttcgagccggaggccatgcagcgcttcgatgaaaagggcggcttcatcgcccgccatctggtcgacacccagtacatgtcgcggctggcgcgggaatatctggaggccctctaccccgagcgcggggagggcagcagccatgtctgggccacacccggccgcttgaccgagctgatccggcgcaagctggggctgaacgaactgctgcctgaccataattacaccaccggcaagaacaggttggaccatcgccaccacgccatcgacgcggcggtggtcgccatcaccgatcgctccttgttgcagcgcatggcccgcgcctcggcgctggaaggggatgaaggacgggaacgcgtggtggtgatcccgccgtgggagagcttccacgacgatctgcgcgatgttctgaccgtcatgacggtcagccaccggtccgaccatggcacggcgtcgaaggccggcctgccgaaggggcgggatcagacggcgggccggctgcacaacgataccgcctatggcctgacggggctgaaggacagccgcggcaatgatctggtggtcagccgcaagcccctcaccgccctgaaacccgccgatctggaacccgtgcccgatggcaccgccatcacgaccggcgtccgcgacccggcgctgcgccgggctctgcatcgcttcacctgcgggcatgacggcaaggccttcctccaggccctggcagccttcgccaaggacggccccctgcccttccgcggcatccgccgcgtccgccgcatcgaaccgttgaaggtcattcccatccggggggcggacggcctgccctacaagggctacaagggcgacagcaactaccgctacgacgtctgggaactcccggacggcacctggaaagcggaggtgctgtccatgttcgatgcacaccagcccggctggacctcggccgtgcgggccggctgtcccaccgcgcgcaaggtcctcagcctgcatcaggacgacatcatcgccatcgagagcgaggggggaagccgcgaactgaagcgtgtcgtcaagttcggccagaatggtcagattacgctggcagccccgaatgaggccggcgacctgaaacggcgcaacgacctgccgctggatcaggacccgtttgtctacagctccccgacggccggcggtttgaagcggctgaaagcccggcaggtgcgggtggacgagttgggccgcgtccaggaccccgggttccctgcccgcaaggtccgccgccgcacccgcgccaaggtcgggacgtgacgggggtcgccgtggagcggatcgtggacattgccaccgagggccggcatctgtcggcctcgcgcgggttcctggtggtcagcgccgaccggcaggaggtgggccgcatccccctggacgatgtggcggcggtcatcgtccatgcccatggcgtcacctggaccaccagcctgctggtggccctggccgagcggggcgctgtgatggtgctgtgcggcagcaatcacgcccccgtcgccctctgcctgccgctggacgggcatcacgcccagaacgcccgcctgcgcgcccagtggcaggccggacgccccctggtcaagcaactctggcgtcgggtggtggttgccaagatccgctggcaggcggcggtcctggccgccttcggccggccggcggacggattcgacctgctggcgcggcaggtggcatccggcgataccggcaatgtggaggcccaggcggcacggcgctactggcccctgctgatggggccggacttccgccgtgaccggcaggccccggatgccaacgccctgttgaattacggctacaccgtcatgcgctccctctgcgcgcgggcggtggtcgcggcgggattgcatccctccatcggcatccaccatgccaatcgtaccaatgccttcgcccttgccgacgatctggtggaaccgttccggccgctggtcgatgcgctgacgctccggcttctggaccggggggtgacagaggtgacgcccgtggccaaacacgcctatgccggcctgatcgcggtcgaccttcccggcccggccggcaccaccaccgccacgctcgcggcgatgcgggcggcgcagtcgctggccacggccttcaccctcggccaggccgattccctggagcttccgcttccaccaacggccgccgttctggccgatctcgacgggttgctcccatgacgcgccagcctccacagctcagcggatataggctcatgtggatcttcgtgatgttcgatctgcccgtcacgtccaaggccgaatcgcgggcggccacgaaattccgggaattcctgctggacgagggattcgagaaaagccagttttcggtctatgcccgcttctgcagcgggaaggagcagttcgatgcctatatccgccggatcgaggccaacctgccatcgcaaggggaggtccacatcctcaccttcaccgaccggcagtatgagaatatcgtccgcttctccggccgacgtcggcgcaagcagcagaaaaatcccggccagctcgccctgttctgaacgggcctttccgtttcgtcggcggaaaaggcggtcatgtcctttatggatcaaggacatgaccgccgatccatgatagccgctcagagatcgcggtccagcggcaaccgcaggaggttcgcgaacgcaaaccctttcatgatagccgctcagagatcgcggtccagcggcaaccagggaggaggcgcccacgactgcccgcgatgatagccgctcagagatcgcggtccagcggcaacgaacacatggcgccggcgtggattggctgcatgatagccgctcagagatcgcggtccagcggcaaccgcgcggggcgcccaggatcagccccgggcatgatagccgctcagagatcgcggtccagcggcaacgcctccaggctctcatacaccatgtccgcgatgatagccgctcagagatcgcggtccagcggcaactgcgaggacggtggcgacacctggagcgacatgatagccgctcagagatcgcggtccagcggcaacactggcgctgcgtgcgcgggctgcgcacagatgatagccgctcagagatcgcggtccagcggcaactaaatcgttccagtcgcatttcccccgccgatgatagccgctcagagatcgcggtccagcggcaacggtgagggttgcggacgcagtggcggcaggatgatagccgctcagagatcgcggtccagcggcaacggacacagcgaccgcggcagcgccgcccgcatgatagccgctcagagatcgcggtccagcgccgcccttacagcgcactgacgggcatccggcggcccgggcggcgaaaccataagtctttgaaaatattggtgggcccggcaggattcgaacctgcaaccagaccgttatgagcggccggctctaaccgttgagctacaggccccacgcggcgcgcactgtgccccaggaggggcggcggatgcaacaggcttggcgcccgccgccggtccgcccctctccgggccgcctctccgtgcggccccccccttgcggcccccttgcggcccgtctccgggccgccgtcatcgcggccgctcaccagctgcgcagggcgcgcagtttgggggtcttcttcacctggttctcggccaggcgggacagcagccggtccagcgcctgcacggcgtccaccacgcgcggccccttgttcagcatgacacagtcggcgcggccggccatgaaggcgtcggtcatctcgccgcgggtgggcaggcccttcttcaccagcgtctccagcacctgggtggcccagatcaccggcacatgggcggcctcggccagccacagcatctcctcctgcatctcggcggtgcgttcgaagcccagctccaccgccaggtcgccgcgggcgatcatcaggccgaagggctggcggccggcggcggccacgatgatgccgggcaggttgcgcacggccttgggcgtctcgatcttggcgatcaggcccagctggcgccagtccagcggccggcgccgctccagttcggcctgaagctcggccacatcggcgggcgactgcacgaagctgtagccgatgaggtcggcctgggcggccacgaaatccaggtcgcgccggtcctcctcggtcagcgccgccagccccagatcggtctccgggaagttcagccccttttccggcttcagcttctcgccctcggggccggcgcgggtcaggcgcagccagacgccggcggcgtccaccgtctccaccgtgccgcccagcttgccatcgtcgatgaagacgggctgccccacccgcacccggtccaggatggcggggatggagcattgggcctggaacggcgcgtcggcgcgtgcctccggcgcggcgcgggtcagcaggatgcgctcgcccaggcgcacgcgcttgcgcgcggccagcacggccccggtgcgcaccttggggccggccagatccatcagcacggccacgcggcggccgcacgccgcctcggcggcgcgcagattggcgatcatggcggcccaggccgcctgcccgtcatgggcgcagtttatgcgcacggcgtcggtgccggcggccaccagatcgtgcagcagggcggggtcggtggcggcctccggcggcagcgtcaccaggatgcgcacctgccgccccgccggcccgggatcatgggcgggatcggggcgcgggccgaacagccgggccgtattggcgcgcagccagcgctcgccgcggaaatagcgccgcgcccccggcgcccgcacgccggccggcggcgccgccggcccggcgcccgccggcgccatgccctggccggccagcgccgccagggccaggatcacggccgacagcgtctcttccacccggccctcgcagcggcccagcgatgacaggcccagcggcatcagcgccgtctgcagcgggcgcagatcatggtggcgcagagccagatagcgggcgaagttcccggccgacaggcggaagcgccgccgttccagccgcggcccccatcccgccagcgtggcggcgccgtcgcggcgcacctgcgccagaagctcgcccatctccgccagcagcgccgcggcgtggcgcgcctgtgccgcctccggcgtttgcgctccggccccgtcggttccgggcgcgcccgccatcatcccgtccatggccattcctcccggctgtgtcgttgcacacgcaacagcatgggtgcgttcccggtgtgacaaccttgaccgggatcaagggggaggcccgatcacaaaaggttcatgaatccggcagcggccggcacagctccagaccggccggtgccggcgtccaggtctggctcttgccgatccaggggatggcgatatagccgcgcacggtcagcctgtccggcccctgcgccgtcagccgggcgcggtagacgcggccggaatgggggtcatagacgcggccgccgccccattccccgtcgccctccggctccaggccccagatgatgggggcgtggcacaggtcgcggccgcgcagggccgggtccatgttgttgatgtcgcggcgctggccctgcggccactggtcggcgcggccccagaccagccgcccgcacaggctgcgcccggcgccggcacagggcatcagttcgaccgcggccttgccgttctgcatgatccagatgccggagggcatggtcgcgccggggctggcggcgatggccgttgcggggccggccggccccgccaccgactccggcgccagccccaatccggccagcagggcaagaacgcagggcagcgcccggcgccccggcctgcgcggacgttgcgtccgcacggcgcagcccctatcttccggcaaacctttctctggcccgagctccatgaccgacctgtcccacatccgcaatttctccattatcgcccatatcgaccatggcaagtccaccctggcggaccggctgatcgaatattgcggcgcgctcgaggcgcgcgagatgaaggcgcagatcctcgacaacatggatatcgagcgggagcgcggcatcaccatcaaggcgcagaccgtgcgcctgaactacaaggcccagaacggcgggacctatcagctgaacctgatggacacgccgggccatgtggacttcgcctacgaggtcagccgctcgctcgccgcctgcgagggctcgctgctggtggtcgatgcctcccagggtgtggaggcgcagaccctggccaatgtctatcaggccatcgacgccaaccacgagatcgtgccggtcctcaacaaggtggacctgccggcggccgacgtgccgcgggtcaagcagcagatcgaggatgtcatcggcctcgacgccgccgacgcggtggagatctcggccaagaccggccagaacatcgtcggcgtgctggaggccatcgtcacccgcctgcccccgcccaagggcgacgccgcggcgccgctgcaggcgctgatcgtggacagctggtacgatccctatctcggcgtggtcatcctggtccgcgtcgtcaatggcgagctgcggctgggccagaaggtgcgcttcatggccaccggcgccacgcgggagctggaccgcgtcggcatcttcacgccgaagaaggtcgtcaccgaccggctcggccccggcgagatgggcttcatcaccgccgccatcaaggacatccgcgacaccaaggtcggcgacaccatcaccgaggagcggcggctggcgcccacggcgctgccgggcttcaagccctcgatccccgtggtgttctgcggcctgttcccggctgatgccgccgatttcgagcatctgcgcgaaagcctgggcaagctcgccctcaacgacgccagcttccagttcgagacggaaagcagtgcggcgctgggcttcggcttccgctgcggcttcctcggcctgctgcatctggagatcatccaggagcggctggagcgcgagttcaacctcgacctggtcaccacggccccgtcggtggtgtacaagctctacatgaccaacggcgacgtcatcgacatgcacaacccggccgacatgccggacgtggtgaagatcgaccatatcgaggagccgtggatcaaggccaccatcatgctgccggacgaatatctcggcggcgtgctccagctctgcaccgagcgccgcggcgtgcagaaggagctgacctatgtcggcggccgcgccatgctggtctatgagctgccgctgaacgaggtggtgttcgacttctacgaccggctgaagagcatcagccgcggctatgccagcttcgactaccagctggaggaataccgcgagggcgacctggtcaagatgtcgatcctggtcaatgccgagccggtggacgccctgtccatgatcgtccaccgcggccaggccgaatatcgcggccgccagctctgcgagcggctgaaggacctgatcccccgccacctgttcaagatccccatccaggccgccatcggcggcaaggtggtggcgcgcgaaaccatcgccgccctgcgcaaggacgtgctggccaagtgctatggcggcgacatcagccgcaagcgcaagctgctggacaagcagaaggaaggcaagaagcgcatgcgccagttcggcgaagtggaaatcccccagagcgccttcatcgccgccctgaagatgggccaggagtaaccctggcccccgccggcaagccgcggccggggtgacggccggatgcgtgtagccgcatcgcggccgggggtgacggccagggcgcgggccggggtgccgccgggcaagggtggacccggccggatgcgagaaggtggacccggccggatgcgcgaggggaaatcagcggatgctcccctctccgggccggggcgcggaccggggcgcggatcggggcgagcgctgccggacgcggccccgcgcaggcagggactcgtccagaccatgaagggccttcttcgccagtcggaaggtggccccgcgcaggcagggactcgtctcgccgaccatatgctcgggctcgacgatgggcgtcgtccccgcgcaggcggggacccaggggccacagccccccccacgccggtcaggacccgcccaatcccctccgaacaccccgccttccccggacagcgtcgccgatctccggtcgtgctgctcgcctgtggccccgcctgcgcaggcacgacgccgaaagggccgtaagcgtccgcgcccgtccgtgccccgtgtcctccgtgaccctcaaccccgcccgcccaggcatgacgcggatgcgggcaagccccccctcgcggagatcctccgtcagggcgtcggcttcggtgcagtcggcaacctgcccggcggtcaggcgcagatcgacggggtggccttgtgcatcgacaagcgcgtggattttgctggtgcgctccccacgggaacgccctccgcagctagctggttagtcccgtcatttgctcgcgaccgatctcgcaagaaacaactctgcctcctctttacgcccctttaccgatagcacgcgctgaccgagcctcgcatggccgttgatatcagcggaacacagggacggttacggccgagacggcccccttcccatctcgcatcagtggtgaggtccggcttatagtagtgatgtttgcagccggctggttgagtcggtggcaggttggatcctaccatcgacatcccttcattcgacgaactgattctgatcaatctgccgggactgccacccttgatacgtatccgcaccagcacaaccacataatcgccgagaagggtcatatggacggtcaacggcttcaagttttctggaatcaggaggtcaaagcactcctagctgtctacaagcagttcgaaaccttgctgccgaatcctaagaccgcgggagcagagcaccgcggcgaagacgggcggtatgtggaaacgctagtgcgctcgtaccttcaaaagtatttaccaagagacctggaggtactgacaggctttatccttcgcccagcagttaagctgggaaacaacgatcgctcaagatccaaggagaaagattttcatacaacgcagcttgatataattgtctatgacaccggaaattatcccgttttccagagaatggttgatacggttattgtcccgcccgagggtgtggtcgcagtgttgtctataaaaaagactcttcgggatacagagatcagtgcagaatgcaatgcgcttctggaggcttcaaaggcctgccgctgtgacgagagaaaaccggaagcgcgccgccgcgggcctttcctagccttagtcgcaaccaactctgaccttgctgataagcaaaagccgaaagaaagaaaaatattcgaaaagcttgaagccctatatgggagcgacagtgttttcgacgacatgatagggttcgtgggcgacatttcctcttggcatgtattcaaaacgcgcccaccacttaaaatttatgataataatagatttgcgaaatacatgtatgccgaactggatgacaacgaactgcatcaaggatttcaatttattctttcaggaatattgtctgtatactacgataaaacaaggggaggtttgaaacgtcctggatacacagcgtttgcgtcgaaacgcgccaccgaaattggaaagatcgccttcagttcgctgcgctaatccttggcaactaaagcgaaagccgccccggttacggagcggctttctaacccggttttttccattataagccgtcaggagtgaccggaaacacgctttggctgtctcgctggcaacccagaagccgccacttcgggaaaagtaagtggcggcagcgcgaatgtcaagctcccacacacggcgtgaagatttgaccaagtaagagcgtcgaacagagccatttctggacgaagcgccagcagataaggccggcggcgatgtggtggagggcggtgaagatgtcggcgcggcgctcgtagcggacggcgaggcggcggaagcgggcaaaccaagccaaggtgcgctcgacgacccaccggtgtcggcccaagcgctcgcggttgtcgatgccgcggcgggcgatgcgcggaatgatggcccggcgtcgccgcgcttgtcggcagaaggcgaaatcataatagcccttgtcggcgtgcaacttgattgggcgtcgtcgtgggcggcccgcgcattgccggatcgccggcacggcatcgaccacctcctccagcaacttgctgtcgtgccggttggctggagacatcctcaaagccaggggatgccccgttggcatcgacggggaggtggcgcttggaccccgggttgccgcggtccgtcgggttcgacccggtctcctcacccccccttttttgccgggacagcggcgctgtccacggcggctcgcttccagttgatcacgttggcatagcccagccagtccaagaggacccggtgcaaacgctcccagacaccggcttggtgccacgcgtgcaagcgccgccagcacgtcatgcccctccccgcgcagccacggcgcggagagggccgggaccgtccgtccgcgcctccgctccgtgtcctccatgtccctcccccaccccgcccgttgattgcgtaaaggcttattttcctatatcctgccccttcccccctccagcggaaggagtaccgccccatgtcgatgcctgtgcggatcatgcgggagccgcctgccggctcgcccattgacagcccgatgctgccctggggggcggaggggccgccgccggcggaccggctgccggccacgcggccggaggactatcatcctctcgccgcctggccgccccggccctatggcgactgggagcggcggcggcatgccgcctgttccgcggcgcccaacgatgcggccaaccggctgttcctgctgctgcatcccgaggtggcgcacgagctgctggtgcgggcctgcaccggccagggcgagatgtcggacatccatgccttccggcgcggctgggccgtgccgctggacggcagcttcgacgatacgctgccgccgggcttcgccggctgccggctgcgggtgcgcgacggggtggtggtgttcacgccggagccgacgctgggccatgattacaccgacctgatcccgccccccgatgtggacatgccggggctggtctgggccgggcacgcggcgtcccggcccgccccgcaccagcctgacacgccccggcccgccgtccccccgcctgccgcccgcccgcccgccggcccctggtccgggg

SEQ ID NO: 3077 - DNA, 23279 bp, synthetic construct
  misc_feature 1..23279: note = Synthetic
  source 1..23279: mol_type = other DNA
tcgatcatcgtggccttgttcacctgatagggaacttcggtgacgacgatggcctcgcggtcgccgcgcgtctcctccacatgcaccttgccgcgcatgatgatggagccgcgccccgtcgaataggcgttatggatgccggtgcggccaagcacgatgccgccggtaggaaaatccggccccggcacgatctccatcaggtcggcaaggtcgatcgccggattatcgatgacggcaatagcgccattgcacacttcgccaagattgtgcggcgggatatttgtggccatgcccaccgcgatgccgcccgaaccgttgaccagaagattcggaaagcgggccggcagcacacgaggctcactatcggagccgtcgtaattgtcctggaaatcgacggtatccttgtcgatatcctccagcagttcatgcgcaaccttgatgagccgcgcttcggtgtaacgcatcgcagcaggcgggtcaccgtcgatcgacccgtaattaccctgcccgtcgatgagcggcacccgcatcgaccagtcctgtgccatacgcaccagggcatcgtagatcgatgcatcgccatgcggatggtatttacccatcacgtcggataccggccgcgccgatttcacatatttgcggttccagtgatagccgctctcatgcgaagcatagaggatgcgtcggtgcaccggcttcagtccgtcgcgtacgtccggcaacgcgcgcgaaacgatcacgctcatggcgtaatctagatagcttcgctgcatttcctcgatgatggaaatcggctcgatgccggtcggcccgccatcggcgccgggcggtgttttctggtcagtcaaaacggatcacacagggttgggaatcactgtcctcttatataggaagcctaggcaattctccaattccgagcccatttcaatggcattttgcgctctttttccagcactcgttttcgacgccattccaatgagatagacgcgcgcatcaaaaggcggtggcgagatcgccgcttcaggtgcagtcagcgaattgcaactcacttcaatttacgtgcgggcgccgctcctcacagcccaatccgtcagaccgtttccctgaagcggggtttgctctatcaatgagcccagcgacaagacggagggatgaagatgccgaatttcgacagcatcttcaatgcattcgtgacgatcctcgtcaccatcgatccaccgggtcttgcggcgatcttcctggcggtcacgcgtggcttgaaccagcagcagcgccgctaggtgtcggtacgcgccagcgtgatcgggtttttcgttatcgcgctgttcgccgtggccggcgcttccatcctggccgtgttcggcatcacgctggccgccttccgggtagccggtggctttctgttgttttttatcgctttcgaaatggttttcgagaagcggcaggacaggaaggaaaagatttccgatgtcgccgtaacccgagaccacatccacgatatcgcagccttcccactagcaattccgttgatcgccgggccaggcgccatttcagccacggtgctgttgtcgggtacattccagaacgtaggcgcgcgtataacactcgtcggtatcatcttcgcctgcctcgtgattacctatctggtattcctcctatcggaacatatcgaccgtcttctcggtcaaaccggccgctcgatcctgacccgtctgctcggtgtgatcctcgccgcacttgccgtgcaattcgtcgccgacgggatcagggcactggttatcggctaaagcatacgagacttacgccgtcattgtatcgacgacctcgaagtcatgggtgatggttgccgtcttggccatcattgcagaggccgagcagtatttatcgatcgaaaggtcgatggcccgcttcaccttgtcatgggagagcgctcttcccttcacaatgaaatgcatgtgaatgcgcgtgaacaccttcggttcggtctccgcgcggtctgcatcaagctccaccgcgcaatcctcgaccgcctcgcgccctttttccagaatatgaacgacatcgtaggccgagcatcctcctgtgccgatcaggaccagttccatcgggcttggaccaggtgtatggccttccgggccggaagccgtacccagcaccaacttatgcccactgccggactcgccgacaaaggtccgctcttcaacccatttgacccgcgctttcacaaaaatcgtccccgtaccaatccagcctatcgccgccggtatcaatgtcagaatggaatttcgtcatcgagatcgcgcgatgagccaccgccaccaccgcgattgccaccaccgcgattgaaactgtcgttcgggctggattgtccgaaatcggagccgctgcgaccgccgcccgaataccccacctgtccgccttcgccactctgaccgcgtgcatcgagcatctgcaattcgccacggaatttctgcaacaccacttcggtcgtatagcgatcctggccattctggtcctgccatttccgggtctgcaactgaccctcgacatagaccttcatgcccttcttcaaatactgttcggcaaccttggccagattgtcgttgaaaatcacgacattgtgccattcggtcttttccttgcgttcgccggaattcttgtcgcgccagctttccgaggtcgcgatccggatgttgacgaccgggtcgcccgaattcagccgcctgatttctggatccgcgccgagattgccaaccaaaatgaccttgttgacgctacccgccatgacttgtctccacgctcgtccgaaaccgatttttcagccttaccttacaggctgtccccggccttcgctgcccccggcattgtttttccccataaggtttttgttctctttatgttctacacgccattcatgatctcgtcaacagctccgtcgatgacccacgattggctggacaattgcccgcttggcgataggttgctggcatgatctggctgtgccgcttccctctcgccctttgtggtccgttggcgctactggcgatcgcgccggcttttgcaggcgatgccgcaaacccctctgccaaaagcattctgcccggcgtcgaaggcgactatcgtatcgtcaggccggtcgaagccgaacaagcggacacgaacgcaagccacttcaagatcggcaacgtcgatgtccgtgtatccggcagcattaccattgatgtcggtgtcggttcgaccaagacaccaaagcactgagcgctttttccattctcgcaaacatctgcagacaaaagccccgccgcagcttccgctcgcggtcggggctttgtggggtccaacccatcatgccgggaacagactgccggctttcgtttcggatgcaacgcggctttcaaccgacgatccgactacaagtttctgattgtgggtgaaacggcaagcctctgaatacggctcgcatcaagctctcaccggattagagcacctgccgcggctctaccaagggatagagcctgttgggactgtcaggtggagtcatacctcgctccttccgttcattgcgcttggtgtcaggggggcatttattcgccggtctgcggcgcctcgcaaaccgcctactggcagcgaagaggccttgaggcactccgcccctgtgactgccacagtcttgcgccatcgcatttggccgtcaacaccgaaaagccgaatcggcaaaatgtgatcgattgtcaggagtacgttcgatctttgttctttgcgcttgccgatattcataaaaggcggttaaacccggtgacagcatccctcgacgcgacgacgagaatgcctacatagtggatggccgggcaaacccgcctatccgagatattccagactgaggcggcgtaccggcgatggccgaccacaaatatatttccgttcgcggcgcacgcgagcacaatctcaagaacatcgacatcgacctgccgcgagacagcctgatcgtcatgaccggcctgtccgggtcaggcaaatcctcgcttgccttcgacacgatctatgccgaagggcagcggcgctatgtggagagcctgtcagcctatgcccggcaattcctggagatgatgcagaagccggatgtcgatcagatcgacggcctgtcgccggccatctccatcgaacagaagacaacctcgcgcaatccgcgttcgactgtcggcacggtcaccgaaatctacgattacatgcgcctgctgttcgcccgcgtcggcgttccctactcgccggcgaccggccttcccatcgaaagccagaccgtcagccagatggtcgaccgtgtgctggcgctggaggaaggcacgcgtctttacattatggcgccgatcgtgcgcggtcgtaagggcgaataccgcaaggaacttctggaacttcagaagaagggttttcagcgcgtcaagatcgacggcagcttctatgagatcgcagaagcaccgacactcgacaagaaatacaagcacgacatcgatgttgtcgtggaccgcatcgtggtccgcgccgaccttgctacccggctcgcggattccatcgagacggcgctgaaactggctgacgggctctgcgtcgccgaattcgccgaccggccgctgccaccggaggaaacggccgagggcggggctgccaacaaatcagccaacgatacgcatgagcgtattctgttctctgaaaaatttgcctgcccggtgtctggctttaccattcctgaaatcgaaccgcgcctgttctccttcaacaatccgttcggcgcctgtccgacatgcgacggcctgggcagccagcgcgccattgatgcgtctttgatcgtgccggacgacaatcgcaccctgcgcgacggcgccgtcagcccatgggcgaaatcgacttcgccttattattcgcagacgctggaggcactgggaaaagtttacggcttcaggctgggcgataaattcagggagctttccgacgaagccaagaacgccgttctccatggcacgggcgagcgcgagattgcgttcaattacgacgacggcctgcgctcctacaagacgaccaaaaccttcgagggtgtaatcccgaatctggaacgtcgctggaaggaaacggaatccgcctggatgcgtgaggagatcgagcgattcatgtcggcgaccccttgcccggcgtgcaatggttatcggctgaaaccggaagcgctggcggtgaagatcgccggcaagcatatcggcgaggtaacggagcagtcgatccgtaaggctaacgaatggttcgccgaactgccggctcagctcaacgacaagcagaacgagatcgccgcacgtatcctcaaggagatccgcgagcggttgcgcttcctgaacgatgtcgggctggagtatctgaccttggcgcgcaattccggcacgctgtcgggcggcgaaagccagcgtatccgcctcgcctcgcagatcggatccggcctcaccggcgtgctctatgtactggacgagccttcgatcggcctgcaccagcgtgacaattcccgcctgctcgatacgctgaagcatctgcgcgacatcggcaataccgtgatcgtcgtcgagcatgacgaggacgccatcctgcacgccgatcacgtggtcgatatcggcccagccgccggtatccatggcggaaaagtgatcgcgcaaggcacgccgcgcgagatcatggccagctccgcatcgctgaccggtaaatatctgtccggcgaattagaagtggcgatccccgccgagcgccgcacgggaaagaaaggccgccgtatcaaggtctccggtgcgcgcggcaataatttgaagaacatcaccgcggaaattccgctcagcaccttcacctgtgttaccggcgtatcgggtggcggcaagtccaccttcctgatcgaaacgctgttcaaagcggcgtcacgccgtatcatgggatcgcgcgagcatcccgccgagcatgatcgcatcgaagggctggaattcctcgacaaggtcatcgacatcgaccagagcccgatcggccgcaccccgcgttccaatccggccacctataccggcgcgttcacgccgatccgggactggtatgccgggctgcccgaggccaaggcgcgcggctatcagccgggtcgcttctccttcaacgtcaagggcgggcggtgcgaagcgtgtcagggcgacggcgtcatcaagatcgagatgcacttcctgccggacgtttatgtgacctgcgacgtctgtcacggcaagcgctacaatcgcgaaactctggacgtgatgctcaaaggcaagtccatcgccgacgtgctggatatgacggtggaggaaggcgtcgagttcttttccgccgtgcctgccgtgcgcgacaagctggaaacattgaagcgggtcggcctcggttacattcacatcggccagcaggcgacgacgctttcgggtggcgaggcacaacgcatcaagctcgccaaggagctgtcgcgcaaggccaccggcaagacgctttatattctcgacgagccaaccactggtctgcatttccacgacgtcgccaaactgctcgaagtgctgcacgaactggtcgagcagggcaatacggtagtcgtgatcgagcacaatctcgaggttatcaaaacggcagactgggtgctcgacctcggccctgaaggtggggacggcggcggcgaactggtcgcatccggaacgcccgaagatatcgtggccgaaccgcgcagctacaccggccattttctcagggagttgctcgaacgccggccaaaaggcaagcgcgaagccgccgaataagtttcacttgagcgaagctacactcagcgtgtggccgcacagagacgcttgaaaactgcgcgacgatccgtcgtatcttggcaatcgggaggacaggatgagcaaacagggaacgatccgcgccggcatgggcggctggaccttcgagccatggaatgccgcattctatcccgagaaattggccaaggccaagcaactccaatatgcctcacgacaggtgccgagcatcgaggtcaacggcacttattattccagcttcaaggaacccactttcttcaaatgggcgaaggagacgcccgacgattttgttttctcgctcaagggaaaccgcttcgtcaccaaccgccgggtgctcggtgaagccggtgaatcgatgatgcgcttcctggaatcgggggtggccgcactcggcgagaagctcggaccgatcctgtggcaatttatgccgaccaagaaattcgacccggacgattttgaagccttcctcaagcttctgccggaaaagcaggacggcgtaaaattgcgccatgcggtcgaggtacgtcacgaatcctttgtggtcccggaatttgtcgccttggcgcgcaagcatcaggtcgcaatcgtctatgccgaccatgccaaatacccggccatcgccgacattaccggcgatttcatctatgcacggctgcagaccggcaaggatgacaatccggactgttatacgccgaaggcactggacgagtgggcgggtcgcgcgcgggaatgggcggcgggcaaggcaccagttgacctgccgcacgccgatccttcaaccgaggcgccggtcaagccgcgtgacgtgtttgtctatttcattaccgagggcaaggtccgggcacccttcggcgccatggcgctgatgaaacgggtggccggctgatcgagcctggatcggatgatccggataaaaatggcgatcccggcaggattcgaacctgcgaccatcggcttagaaggccggtgctctatccggctgagctacgggaccgcaaaccgggcgctgaactcacaaccttaatgagtccagggcgtgcggcggtcatagcggaaattgtccgcatatgaaatctgccggcgcctgggttccttcggctcatcaagccgataggcaactccgttcttttccgcgtaggctatcgcctcctcgcgcgtgtcgaacgtcagccttatctggcttttcatgtcgcccgacgacgtataacccatcagcggatcgatcttccggggctgctcgggatcgaattcgagcacccagtaaccggttttggacctgccggactgcatggcggttttcgcggggctgaaaatgcgggcagacatgggaacctcgtaacagcttcgacggccagagccgtccttgctgcttactgtgcaaacgggctcgcggcaagagcagcgacagttcctttcgccgagcgacacgtttccgccttccatgcccgttcaaccgacaagaagcagccatgcgggcagcatcgaacacccgctccggcggcgtggcgccggcaggtctgtcagaggcgatgaaatcgcggtcgaacccgcggaaatgtcggcggcgcgcgcttcaggatgtgtcggcggattcctccagcgtccagaaagccaggccgtgcacatccttgaggatctcatggacctcatggcccgaaaccttgtggccatctcggcgactgccgccgggcgggcggccggggcgcagcggccagatgcgccgcgcagggctggcccgatggctgatctgcaccgcgcgtgcggcattgcgggatgcttgccagcgcgcgaagcgcctcgcctgcgccggcagattgtccagcgcgcggccgagcgcgtcaagacgcagcgccagacgccttgcgtcaaccgcatcgtcgggcgatgagggccgacggagtgcaatagggaaaggccggctgaaaccgggcaccgagatgcgcggcaccccggccggggccggccgcctgcggctgttccacgccggcagcggatcgagcagcggcaggcaaaggctgcgcggtttgggcgatggctccgtgcccgcctgccccgcgcctgctgcgtggccggctttcggctgcggcttgcgcggctttgccggcgtcaccaccagcccgcgcgcggcaatgatgacaagccgccgcgccgccgcctcggccgggcgcaacagccgcagcacggcgcggtagagatggcgcggcagcaataagcggtagtcggcggttggcgatgggcaatcgggaacagccgggccagtggcggcttgttcctgtcctgcttccgcctgccggtgggcgactgccgattgccggccttccaacccagccatggcgacgagcccggccaggacgcgcttcagcgcccccggttgttctcgattgccgcctgccagtccattgccgcctgtttctccgtcagcccgaaaatagcggcgacattatcgcgcgcaggccggaggcgtggataagtttttattttggcgtcaaccggcaatgagcgtgagccgtgaggctgcgctgtgtggtgcgtccttcgaggctcgctgcgctcgcacctcaggatgaggaccggcgtgcgttgcggcaagttgctcggcgtcgtccaggccgcgcatgaagagcagatagctgatctgctcgatgacctcgagcgatcggcgatgccgccggcccataaggcgttccggtcctgatcgatcttcgagcgaagttcccctgtggtcatcccccgctcttggcaaaacaaaaaaggcggcgccggagcgccgcccttatctggtgcagactggctgcttgttaaccgccagaccacgatctctgaagtcgttacaataacggctgatcggccgccgtcaagcggctggagatctggtccagcggcaaccatctaactttgggagagtgcaaagacattaccccaaaagtaagtttttaccgtgaaaggcgggagcgctcccacgtgggcaggtttggaccctttccccggttgagtttggaaccccaacccgaatcacgatgatgaagtcgatataggtctccagtttgaccgtcaaatattagatgaggcataatattggaagcaggttgttcaacgatgattcgactcttttgcatcctgcggtaaggtgtcgtggggcagaacaatcgaggcgggaaatcatgcgttggaggcttggggccgatctcggcacgaattcacttggctgggcagtcatcgagctggacgatgacgacgtgcctattcgcgttgtcaccgccggttcgcgcatcttcagcgacggccgagacccgaaatcgggcgcgtcgctcgccttcgaccggcgggcagcgcgcgccatgcgccggcggcgtgatcgcttcaaacagcgccaggcggcgcttctcaagcatctggccgatgccggcttctttccggccggcgagacggagcgcaaggcgctggaggggctcgacccgttcgcgctgcgcgccaatgcattgcgggaaaagctgccgctgcaccatctcgggcgcgctctgttccatctcaatcagcggcgcggcttcaagagcaacagaaaggctgatcgcggcaagaacgacgacagcggcaagatcagagtgggcgtcggccggttgcatgaggccatgcgagacgccggcgccgagacgctgggcgactatctgcacggccggcgcgcggcttcggccgatcccaacacgattacaagcgtgcgcacgcgtttgcgccccgaaaccggtgaaggcgcgcgcggcgatggctacgatttctatccagaccgcgcgatgcttgaggaggaattcaagctcatctgggaacggcaagcgccgcatcatcccgagacgctgacgccggaaaacgaaaagcgctttttcgagatcatctttcaccagcggccgctgaagcagccgaagatcggcatgtgcacgctgaccggcaacgagccgcggctgccgaaggcgcatccgctgttccagcgccgccggcttttggaagagatcaacgcgctgagaatcgttagggccggcgccaaccccgagccactgacgctggagcagcgcaatctgctttatgtcaggctcaaggacaagaaagtcgtctcgttcgatacccttcgcaacaaggtgttgaagctcgatcccgacgtccgtttcaacaaggagagcgagaaccgcaaggacatcaagggcgacgaggtcgccgccgaacttggcgccaaggcgcgcttcggcacgctctggcagcatctttccgacgaagcgcgatgcgaagtggtgtcgcgcatccgcgaacaggagagcgacgaggacgaggcgatgctgctcgcttggctgcaagagacgcacaagctcgcgcccgaacaagcacgcgccaccgttggtgcgcggctgcccgagggttacggccgcttcggcgagacggcaacaaagaagctgatcgaggcactgaaggccgaggtcatcgtctacagcgaggcggtggagaaggctgggcttgggcatcattcggacaagcggaccggcgaaatctttaccgacgcgaagggccggcctgccctgccctattacggcgtgccactggaacggcagatcatgcccggcaccggtgacccggccgatccggaggagatgcgcgtcggccggctgaccaatccgaccgtgcatatcggcctcaaccagcttcggcgcgtcgtcaacgctctgatcaggcgctacgggccgccggagcagatcgccatcgaactcgcacgcgaactgaagctcgacgacaagcgcaagcaggagatcaatgcgaaaaaccggcagaaccgcgatgcggcggtcaagcggtcggaaaagcttggcgaaatcggcattgccgacaaaggcgccaaccgcgccctgctgaagctgtgggaagagctcaatcccgctaacgtgctggaccggcgctgcgtctacaccggcacgctcatttccatcgacatgctgttctcgggggcggtggaagtcgatcacatcctgcccttcagcgccacactcgacgattccaacggcaataggctgttgtgcatgcgtgaggcgaaccgcgagaagcgcaagcgttcgccgtatgatgctttcgggcatcgtaccgactgggaagaaatcgccgcccgcgccgcgcgcctgccgcgcgaaaaacgctggcgtttcgagccggacgccatgtcgcgcttcgacgtgcagggcggcttcatcgcgcgccaactcgtcgacacgcaatatctgtcgcgccttgctcgggaatatctgagctcgctccatccggactccggcgagggcagcagccatgtctgggtttcgcccggccgactgacggaaatgctgcgccgaagctggggcctgaacagcgcgctgccggatcacaatttcggcggcggcgccgatcagcccaagaaccgcaaggatcatcgtcaccacgccatcgacgcgatggtgatcgccgtcaccgatcgccgccggctgatggagatcgcgcgcgaagcgggtcagcacgggcacgaatctgccaaccgcatgacgtccgatctttcggagccttgggaaggtttcagcgacgaggtgcgcgaggttgtgcgcggtatcgtcgtcagccatcgccccgatcgcggcactgcctccaaggccgggctgccgaagggacatgacgccacggccggccgcctgcacaacgaaaccgcctatgggctgaccggcgagaaggacgaaaagggcaacgctatcgtcgtccatcgcgtgccgctgacggcgctgaagaagaccgacgacatcgacgccgtgcgcgaccccgacctgcggacggccctgcacgagtggactttcgggctcgagggcaaggatttcgaggcgcggttgcgcaagttcccggaactcggtcccctgcccttccgcaacatccgccgccttcgcgtcgtcgagccgctttcggtcattcccatccgcgaccgcgacggccgcgcctataagggctacaagggcgattccaactaccgctatgacgtttgggagatgaaggacggcaaatggcaggcggaagtggtgtcgatgttcgatgcgcatcaaccgggctggatgtcgacggtcaggcagcagaacccgaccgcgaagaaggtgctttcgctgcatcgcgacgacctaatagccgtcgagccgcacggaacgctggagctggttcgggtcgtgaagttctcggagaggcaactggccctagccccgccgaacgaggccggcgcgctgaaggcgcgcgcagccgacaaggaggacccgttcaactatctctatccatcaccaaacaccctgaagtcatggaaggcgcggcaggtgcggatcgatgaactgggccatgtatcggacccgggttttcctgcccgcaaggcaaagcggcgcaaacgcgccaacttggtcgcggcgaaataggccgtgcgatggaacggatcgtcgacatcgccaccgacggccgccacctctccgcctatcgcggtttcctcgtcgtcagcgaggagcgggttgaggtcggccgcgttccgctcgacgacgttgccgcggtcattgtccacgcccatggcgtaacctagacgaccaatctggttgcagcccttgccgagcgcggcgcgctgctggtgctgtgcgggtccaatcacgcaccggtggctgtctgcctgccgctggacggacatcacgggcagaatgcgcgcatgcgcgcgcaatggaacgccagcaagccgctcgccaagcaactctggcgtgaaattgtggtggccaagatccgctggcaggccgctgcgctggaagcagaaggcgtcgaggccggcgcctttgatatgctggcgcggcgggtgcgctccggcgatccagacaatatcgaagcgcaggcggcacggcgctattggccgttgctgatgggaccggactttcgtcgcgaccgctcggcggacggcatcaacgccctgctcaactatggctacacggtgctgcgctcactggtcgcgcgctcggtggtcgcggccggcctgcatccgtcgatcggcatccatcacgccaatcgcggcaacgcgttcgccctggccgacgatcttatcgagccgttccggccacttgtcgatctgatgacaataaagctgaccgcgaagggatattccgaagtgtccgccgacgtgaaacgtgcgtatgccggcttgatcgcactcgacctgccgggagaagacgggaccaccaccgtcgcgatggcggcaacatatctatgtcaatcgctggcgcgcagtttcgaaacgggaaaggcgtcgaacctcaacccaccgcgccctccttcggcgatcgaactcgccggattgggagccaccgtcacgtgagcctcacccaactcagcgggtatcgtctgatgtggatttttgtcatgttcgacctgccggtaacgacaaaggcgcaaagcaaggcggccacgaaattccgccagttcctgcttgatcagggcttcgaaaagagccagttttcggtctatgctcgattttgcaacggcaaggaacagttcgagacgtatatgcggcgaatcgaggacaacctgccggaccgaggagatgtccatgtcctcacttttacggacaggcaatatgaaaacatcgtccgattctccggccaacggcgcaggaggcgaagaaaaaaccccgaccagcttgctcttttttgaagccagcaacgatttgtggcttattgccggggcgggtatctcgtttcttctcaacaagatacccgccccgggattgtagccgttcagagatcgtggtccagcggcaacaaatcttcggccttggccttcagggcatcgattgtagccgttcagagatcgtggtccagcgccgccttacgaatcccgattatctcaaccgcatacggataacgctgattccgttttgcaaaagaaaagtctttcagccccttgcgctcaaagccttgttcttctaggggtttgccggcctcggagtgtagcgcagcctggtagcgcatctggtttgggaccagagggtcgggagttcgaatctctccactccgaccatttttcgattttctcgtttgaccggcatcgagccgcaggcagcagggctgcgcgcctacagggtgaactcgccctgcccttcatccattgcatttatggtctcggcggcaagcgcgcgggtgatccggcattgttgctccagcgcgatccggtcaagtcgttcgaccacccgcatcgccgtcgccagcgagcgctcgatgcgccggacgagatactgcacgacatgcggctccaccgccacctgacgatcggcaaacagcttggtgatgacgcccgcaagcagaaaatcgtccggctcgtgtatctcgacggtcgccgccgccttcaggcgcgaggcgagatcaggcagggtcacaccccaggcggcagggaaccttcgcgcggtaagcagcaattgggagcccgcagcctgcaccgcgttgatcaggtgaaacagcccctgctgatcgatcggcagcgcatcgacatcgtcgatcagggccggccggtggccaagaccttgcagggctttttccatctcaaggccccccaccgggaaggcgccggccagttcacaccagatcgaagccagatgcgtcttgccgcagccggcaggccccgccatgatgacaaccgccgaaggccaatccggccagccgtcgaccagcgccgccgcctgctcattggagcgcgagacaacaaggtcgtcacgcgaatagccgatgccgcccgcaaggtcgaacggcaattggcgcggcttttcggcatatccggtcatcggtcgcggctatccggctgcggggtacgcgcccggcgggcggctttcaccgtcggtcccgcttcagcgtgccctcgatagaggggcgactccagatagcgcgcaatggcgaagcgcaccagcacggcaatcgcggcagcggcgggaacggcgatcagaagaccgacaaagccaaacagcgcgccgaaggcgaacagcgcgaacatcagccagaccggatgcagcccgacgctcttgcccaccagcttcggcgacaggatattgccttcgatgaactggccgatgaaaaacaccgcggccacggcaacgaccatcatccagtcgggccagaactgcacgaaggcgacgccaacggccagcaccagtccggtcaaggagccgacatagggaatgaagctgataagaccggcgaacagcccgatcagaatgccgaaattcaggcccgtgagcgtcaggccgatggcatacatggagccgaggatcaggcagagcgtgccctgcccgcgcacgaacccggccgtcgccgtgttgatgtcggtcgccagagcgcggacggtctcgacattgtcgcgcggcacccagctatcgacggtggccaccatgcggtcccagtcgagcagcatgtagaaggcaaccaccggcgtcaccacgaacaggctgacgacggaaaccagcgccacgcccgatgtccagatcgacgtgaagaccgtggtgagaaagctgaaacccgatgtcagcagggaattgagcccgtcgcgcaggctgctggcatcgacaccgaacctgctttccagccatttcgggtcgaaactggtgatcagggtttgcaagcgtgtcagatattccggcagcttgccgacgaaatcggcaagctgggtcgcaagcaccggcacgaggatgacaaaagccagcaccagaatgacgatgaaggcgatcaggatcaccacggtcgccatcacccgcgacaggccgagccgttgcaggcggtccgccaccgggtcgaggaaataggccagcaccatgcccgctacgaagggcagcaggatgtcgctgaatatgtaaaggaagagcgcaaggataagggcgccggccagccagaacgctgcggggcgccacaataccgtcgcagccgcggcatcggcggcgtcattgtcaggtgccgggggtgctgccttcgccatagccgttcatgtgcctcagccaagccacgagataggctgccgcggaagcgacggtcaagagcccgcaggtgaatataaggatcggacgcacaggtccgagttggatgccgaaggcaagttccccaagtacgacggccgccagcacgatctggacggccgtgttggccttcgaaaccagcagcggcttcatctcgaccggatggctcatgacgctcgacaggatgaccgcgcagatgatgagcgcatcgcgtgaaacgacggcgatgaccagccacagcggcaattcggagatgaggcccagcaccacgaagacactgaccagaagcagcttgtccgcgatcgggtccagataggcgccaagacgggattgctggttgaactggcgggcgatgaagccgtcgacgccatcggaaacacccgccgcgacaaaccctgcaaatgcccattcccagcgcgcttgcagcatcgccagcacgacgcccggcaccagcagcaggcgcaggatggtgatcaggttagggatcgtcacatttcttcccattgtttcaatcgcctgaatgcgtaagctcgcaaattaccacaataggagcgccgcaatagccgtccaccgctttgtggagcttgcaaagctccgcgccagccggttcttgcgggcagcctgtgttcgtgcgaagagccggcacaaaagcaaggatatggcgatgagcaaagaccgaaacgggctcacctatgccgaagccggcgtcagcatcgatgccggcaatcagttggtcgagaagatcaagcctctggtgcgcacgacgcgacggccgggagcggacggcgagatcggcggcttcggcgggcttttcgacctcaaggcggccggcttttccgatccggtgctggtggcggccaatgacggcgtcggcaccaagctgcgcatcgccatcgaggccggcaagcatgacacgatcggcatcgacctcgttgccatgtgcgtcaacgaccttgtcgtgcaaggcgcggagcctctgttcttcctcgactatttcgccaccggcaagctcgatcccgatcagggcgctgccatcgtcagcggcatagccgagggctgcaagcaggccggctgcgcgctgatcggcggtgaaacagccgaaatgcccggcatgtatcatggcgacgactacgatcttgccggctttgccgtgggcgccgccgaacgcgaccaactcctgccgagcgacgatatcgtcgaaggcgacgtgcttttgggcctcgcatcgtcgggcgtgcattccaacggcttctcgctggttcgccgcatcgtcgcgacgagcggattggcgtgggaggcccctgcaccctttgcaaaggatgtcacccttgccgaggcgttgctggagccgacccgcatctatgtgaaaccggttttgaaggcggtgcgcggcacgcatggcatcaaggcgctggcgcacattaccggcggcggcttccccgaaaatattccgcgcgtgctgccgaaggatttttctgccgaactcgatctcgattccatcgatgtgccgccggtattcggctggctggcgaaaaccggcggtgtcgcgccgcaggaaatgatgcgcaccttcaattgcggcatcggcatgatcctcgtcgtatcgtccggccaggccgcgcaagtggccgccgtcttgcaggaagccggagaaacggcgacgccgatcggccgcatcgtgccgcgccgcgatgccggcgttcactacaggggagcgattgacctttgacccaatcacgcaagcgcaccgtcattctgatttcgggacgcggctcgaacatggctgcgctgatcgcggcagccgcggacccgacctatccggcggaaatcgtcgccgtcatttccgacaaggcgaacgctcccggcctcggcattgcggcggcgcgcggcgtcgccacgcaggtgatcgcgcgcgccgaccatgcgagcaagcaggcgcatgacgacgcgctccacgcggccctttccggccttaatgcggaaatcgtcgcgctggccggctatatgcggcttctgacgacaggcttcgtcaggaaatggcagggccgcatgatcaatatccaccctgcccttttgccgggcttcaaggggctcgacacgcatcgccgcgcgctcgacgccggcctgcgcttgcatggctgcacggtgcatttcgtcacgccggaaacggatgacgggccgatcatcgcgcaatcggccgtgccggtgatgctgggcgatgacgaacagtcccttgccgcgcgcgtcctcgccgccgagcatgggctttatccgctggcgctgaagctggtggccgagggcaaggcgcggatggaaaagggccgcaccaccttttccggcttttcggaagaccgcagcgacgcggattcgcgcctcacggcacccagcccgctgcatggcgaggtcgatctggagcagttggcgcgcatcacgccataacggtcaaccggccgcacgcacccacaccttgttgtcgtgcacggcggccccgccataaggcgccggcgcatccgcgcccgtcagcacattgatgccttcaccgcgctcatgcgccgaattcggccagatgccctcggcaatgaccacgccgcgccgcaggccgtcgaacaactttgcgtgcagcaccacctcgccgcgctgattgccgatctccaccctgtcgccgtccgccagtcccaacgccgctgcgtcgtccggatggatcagcaattgcggccgcccttccctggcctttgaaaccggcgtctccgaaaaggtggaattgagaaagttgcgcgccggcgatgtcgccagccggaacggatgcgcgtcatcagtcatctcgatcagatcgacatggtcgggaaattccggcagccgctcatgcgggccgaacacgcccatggagcgcggcggccggttcggcgcgcgctgccctgtccagtccggcttgaaatggaacttgccgtcggcatggccgaagccggtgagatagtgcgcctcctcgaaaggcggctgcagatcggcccatttctgctcccggaacgtctcgaacgtgcccagtccctttctggccagcatgaaatcgatatgctcgcgctcgctcataccgaagcccggcagatgcgcgacgccgagccgtttggccagttcctcgttgacgaaatgattgctgcgcggcccttccggcggctcgatcagtttcgggccgagcgtgatgtgctggttgccaccgcccttgtagatgtcgtcatgctccagaaacatggtcgccggcagcaccacgtcggcgagtttcgccgtgtcggtcatgaactgctcgtgcacgcaggtgaacagatcgtcacgcaggaagccgcgtttcaccagtcgctggtcgggcgcgacattggccggattggtgttctggatcagcagcgccgtcaccggcgggccgccgtaaagcgcatcctcatgcccgcacagcaccgggccgatgcgcgaatgatcgagatagcggatggacggatcgcgcagcctggtgccctcgaccacgctggtatcgagcttcaggaccccggaattggaatggaatgccccgcccccctcatacagccaggcgccggtgacggcggcgatgcaggaggcagcgtgcatgttgacggaaccgttgcgctggcgcgaaaagccgtaacccagccggaaaaacgtctttctggtggaaccgacaagccgggcaaatgcttcgatctcggccacggcaaggccggtgatggcggacgcccattcaggcgtttttgtccgaagatgcgcctccagcccctttggatcgtcggtgtatttctccagataggcgcggtcggccatgccttccttgaacagcacatgcatcaccgcacaggccagcgcggcatcggtgccgggcttgacgatcaggcccatatcggcctgcttcatcgtcgcggtctcgtagacatcgatgacgacgatcttcgcgccgcgttccttgcgcgccttgaccgcatgggtcatcacattgacctgcgtgaccaccgcattggtgccccagatcaccacgcaatcggatttcgccatttcgcgcggatcgggaccggcaagcttgccggtgcccatcatccagccggtccaggcgagattggtgcagatcgagccaaagaagccggaatatttttttgcgtggcgcaaccgctcgatgccgtcgcgctgcaccagccccatggtgccggcataaaaatagggccacaccgtctcggagccatgttttgcttccgcggcgtcgaatttctcggcgacgagatcgagtgccgcttcccagcttgcctctttccagttgccatcgcccttggcgcccgtccgcaccaacggcttcaggagccggtcgggatggtggacgcggtcggcatagcgcgcgaccttggcgcagatcacgccgtcggtgtagctgttggacttggcgccgcggacgcggccgatccggtcgggtgcgagaagttcgacctcaagcgcgcaggtcgaggggcaatcgtgcggacaggcggaatagccggttcttgtttcggttccggtgatgctggcgtgctggttcatgggcaacgctataaacctcatcgaccggcgcgaacagggccagcggatcaggcttcgggaaccacacctcaggatgagggctgaggcagcgcatatttgccttgaggcggcatacaaacctccctcatcgtgaggaggcagcgtaagctgccgtctcgaacgacgcactaccaaactggagccgccctcgcccttcgaggctcgccgcgttcgcacttcaggatgagggctgatgtagcgccattgcctctacgtccaaagatgcagccgcaacctccctcatcgtgaggaggcagcgtagctgccgtctcgaacgacgcactgtttagccgcacaaaccttcctcatgctaaggagccggcgtctcgaaacacgcaactaaaggagcacggcgagtgtccgctactccgcgatcccctgctcgtattccgcgctcatctccagccatttttcctcgttgcgggaaagctgggcggagagttcggaacgctccttggcgagacgggtcgccttgatcggatctttctcgtaaagcgccggattggccagttcgtcttccacggtgtccatgcgcttgcgcagccggtccatcagtccttccgtcgcgcggatttccctggccagcggttccagcgcggcacggcgcgcggcagcttcccgccgacgttcggccttggacgccttttccgcttcgcgcttttcacggctgtttgacgaaacgccggtcaccagcgtcttgtagtcgtcaaggtcgccgtcataggtgttaacctggccgtccttgaccagccacagccggtcgaccgtcgcctccagaagatggcggtcgtgcgaaatcacgatcaccgcgccgggaaattcgttgagcgcatgaaccagcgcctcgcgtgaatcgatgtcgagatggttggtcggctcgtcgaggatgaacaggttcggcccgtcgaaggcagccagccccatcaacagccgcgccttttcgccaccggacagatccttggccggggtgttcatcttctcggtcgagagaccgaattgcgcgaccttgccgcgcaccttcgattccggcgcctccggcatcatgcggcgcacatgctcgtaggcgttttcctccggtctcagatcgtcgagctggtgctgggcgaagatcgccaccttgaggccgggcgcgatcgtcatcgtgccggtttcggccttcagccggccggcgagcagcttggcgaaggtggacttgccgttgccgtttgcgccgagcagcgcgatgcggtcgtcggcatcgatgcgcaacgtcatgttcttcaggatcggctggccgggctggtagccgacattgacccgatccagcgcaatgatcggcgaagccacggtcttgaccggctcgggaaagctgaacggcctgacggtatcgtccaccagcgccgagatcggcttcatcttttccagcgccttgatgcgcgactgcgcctgccgcgctttcgaggccttggcgcggaagcgatcgacgaaggattgcagatgcttgcgcgccgcctcctgcttgacgcggcccttttcctgcaattcgcgctgctccgacaattggcgctcgaactggtcgtaaccgccgcgccagaaggtcagcttcctttgatcgagatgcacgatggaattgaccgcccggttgagcagatcgcggtcgtgggaaatcagcagcaccgtatgcggatatttggcgacataattttccagccacagcgtgccttccagatcgagatagttggtcggctcgtccagaagcagaagatcgggttccgaaaacagcacggcggccaatgccacgcgcatgc

SEQ ID NO: 3078 - DNA, 23273 bp, synthetic construct
  misc_feature 1..23273: note = Synthetic
  source 1..23273: mol_type = other DNA
agcagtcggtcttcataggccgagagcttgaagaaatagctctcttcctcgatccattcgaccggcgtgccagtcggcgcgcgccacgagccgtcgggctgcttggtcagttcgctctcgtcgtaataggcctcgtcgcggacagagtaccagccggaatacttggagaggtagatgtcgcccttctcctgaagcctgcgccagagttcctgtgtcgacggaagatggtccgcgtccgtggtgcggataaacctgtcataggagcagttcaggcgatcggccatggcgcggaacttcgccgccatctcgtccacgaaggttttcggggtcgtgctgttgcgatccgccgtctgctggatcttgagaccgtgctcatcggtgccggtcatgaagaagacgtcgtaaccatcgatacgcttgaagcgcgcaatggcatccgacgcgacgatctcataggcgtgcccgatatgcggtgcgccattgggataggaaatggccgtcgtgatgtaatatttcttcttgtcggccatgacgatcctcttgccgatagaaccattcaggccgttcgccgaaccgcttcggcgagatcgtcgaacagcgccaggatgaaggggcggcggtcgaggttgtagacatcaatctcacgcgccgagcgggcgatcttgtcacacacctccaccagcggtgcaagacgcgaagcgcctatggctgccctctcatggagcctaccgctcgcccaacggtgaagggtttccagcataagcgcgtagtcttcgtcggcatctttgcgcgcgaggctatccgccagagcgatgtattgcttggtatcgccacgcggcagggcgtcgagcagcgccgtgacccggtcgatatgggccaccttgtccgcgtccagcaattcgagcgtgcgacgtgcggagccttcgctgagggcgatggcccggctcaacaccgtgtcgggcgtttcgctccagggtgcgcccagggaagcgatcaccgctctgatatccgtctcgctcaaagggcgaaggagaagccggcggcagcgggagcggatcgttggcagcagtcgctgcggcgcgtggctgacgatcaggaagatcgagcgcggaggcggctcctcgatgaccttcagaagcgcgttcgcgctggcgatggtgagatcgtcggcgctgtcgacaatgcagaccctgtagcctccattcgctgccgttgacgaaaacatgccgagcgccttgcggacagcctcgaccggaatggtcgacgaagccgccttcttgtcggtgcccggcgcccgccgcaggaccgcaagattggggtgagacaaggccgcgacttgatgggcggtgcgagagctttcaggtacatcaagacttgtgagatcggtcgagccgggagcgagatcgaggatggcgcgggcgacccggtaagccaaagtcgccttgccgatcccttgcgttccgccgatcagccaggcgtgatggagacgtccgcttcgcaagccttcgaggaaagcgccctctccttcggcgtgcccatagaaggcaagctgctcgcgcggatgcagggccccttcgagcttgtccgtctcgatgctgtcgtcgctgtcacgcgccatgtggctgggcatccttagcattgacggccaagagagggagacgggtttggaccgcgtgccagattgaggcttcgacatcgtccggagagcggttggcgtcgatcacaacgcatctcttcggctcgctcgcggcaatatcgagataagcctgacgaagcttttcatgaaacgaaaggccttcgccttcgaaacggtcgaccccctcacccgctccttctcgcctgaccccggctcgttgcaggccgacatcgacaggaaggtccaggatgagcgtcaggtccggcttgttgtcggcaacaacaactctttctacgccttctatcaatcgcttatcaacgtttcctgaggcgccttgataggctctcgtagaatcggaaaagcgatcgcagagcacatgggtgcccttcaacaaggcgggccgaatggtctgatcaaggtggtcgagtctcgcggcgtaaaagagtagcgcctcggcgaaagctccgaacggtttggcttggccgctcagaagaaatgtccggatctcttccgcgcgcggtgagccgccgggttccctcgtcaccagaacggattgtccttgctgtgcgagacgctggcgcaggcgattgatctgggtcgacttgcctgcgccctccccaccttcaaaagtaataaaataacccgtcatctgatccggctggagaggcttgagagcgcattcgaagcggcgcggcgggcccagccggtgctgaactcaaccagaccgtcgaacgcgcgttgcctgatcgttcctaccccgacatcctccgccgcataaagcggaatctcgagggctctcacgtcccccctgtcgatttcgaggcgggccacttgcgttcccttcgctactgggggcttgagcggccctatataacggatgcgagcgctcaggcgctgcgcctctccgcggggcatgagaacgcgaacaggcttcatcgccaccagcgggaccgaactttgggagccgccgaagaccttggcgtctccaattacatcctgatccgagaaaatggcccgggactcgaatgagcgaaaaccccattccaggagcttacgggcctcgccggagcgttcttgcgccgttttgaggccattcacgacgacgatcaggcgctggccgctctggactgcggagccagtgagcccgtagcccgcctcctcggtgttcccggatttgaggccatcagcgccgatgtccatcgtcagcagcggattccggttgcgctggcggatcttgttccaggtgaattcctgctccccgaacatcttgtacaactcgggataggtttcgataacgtgctgggccagcgtcgccagatcccgcgcgctcaccttctgttgcggatcgctgaggcctgttgcattgcggaaagaggcgcttttcaggccgatctctttcgctctttcgttcatcagcttcgcgaagttctcctcggttccggagataccttcggcgattgcgatggcggcatcattgcccgattgcacgatgaggccgcgcaaaagatcttccagccggacggcactgttgaccttggcaaacatcgcaggcccgccagagggtcccccaccctttcgccaggcgttctcggagaccatgaattccttgtcgagactcagcctgccgctcttgatctcgttgaacacaatctctgccgtcatggtcttggccatgctggcgggagtcaaacgttcatcagcattcttctcgaatagaatcgagcgcgtgccggcgtccacgagaatggcttgcggcgctgtggtctgaaatgtctgtgcaggaacggagatgggcaatacgatggccgctatggcggtccatattccccaaaggcctcttgatgccgagtggaagcgtctgcccgggagccattgcagaaacggcatttttcacctctccaagcggaaagatgaatctgtggcgcgagagcgtttaaatcaacgccctcaccccaatcttggctaggcttatcgaaccgcgaacttggtctggtcgagcgtcccaaaagtcgctgaacgctcgaacttctgcggagccgattgcggctccgcatagtagagacccgccacaatcgggcgcgacggcggcaggacattgctgcccgcagacgagacaaccatcggaaccggcgtagctgcgccggggatcgtgccgagatcgaagggccgctcgggcggaagaggaatcatgccgatggtcgtgggccgaagcggctgagcttgaggcatgaccggagcaggcgtctcaacgacggcgacttcctcgcttgcctcatacgtctgtgtcgcgatcgtttcgcgcacgggcgtggggcgcggagtagcggccgcaatcatcgtcggcgcgccgccggtcagcgaagccggctggccatccgtccgcaggctggccaggagcacgcggtcgtcgctgccattgacggacgcacgaccgacgtactcgacgcggacgcgggctgtgccagagcgtttgaaaccaagggcatcggccgcccgttccgaaacgtccacgatgcggttgccgtgatagggcccgcgatcgttcacgcgcacgatcatggaatggccgttcgaaacgttcgtgatgcgagcatagctcgggagcggcatggtcggatgggccgccgcaatggaggcgcggtcgaagacctcgccgttggcggtcaggcggccgtggaaattgacgccgtaccaggaagccaacccttcccggctatagctctgattttcaccggggacataagtcttgccggcgacggtataaggcttgccaacaagctggcgtccaccacccttgggaactggctcgccatcgcgaaccacgcgggggctggcggcgacgccatacttggggtcgattcccccaaccttggagcaattggcgactgccagagcgacgaaagtgacaccagccagacgaagaagggtggagcttgcgaaagaagcaccctcctcgctcacgagatggtttgaatcggcgcgatcaacaatcataccgtccgcattccttgttccggcccgatggcctagccaggcgatgtgcgggcaaacagattcccgcaccatgcatttgcgcggttaggaaatgttaaaaggtcaagcttgtcaatgcccaagcctcgatcaggctattctacggtgaacaacaggttgtcgaggtggtcaagcgaaggcagttgcaagtctagcgaagagaaaaaggcccgctcacgaatggtctgaacaatcctctcaattataatagccttgccatcaagctgttgctggggagttcaatttgctccaatggcctgacgccgtgctcgctcctctatgccggccgcgcagaaaaatcttgaccttcgaacgggtggcattaaggcgtatcaagcacaaggcgcgtcgatgctccggggagccctatcccacgagagacgagacgacccggaggggtggccgagtggtttaaggcagcggtcttgaaaaccgccgtgggtgcaagcccaccgtgggttcgaatcccaccccctccgccatttttccggtaagcgattgtaaagtcggagctaattggagttcggaattgtccgcttcgtgtccttggtacagaaacctggggcagaggagctgggtttggcgcattaccatgtcacccatctggtgcgcagagggcatgtgttttggtttcgaatggctctgccccatcgcatggtattgcgatttggtcgccgggaaataaagctgtctctgaagacaagtgtcccaggcctcgctaggctgcgggcacgggcgctcagcgccgcctctttgcagttgatcacactcgtccagaacatgcccgaactgtctccgtcccaagtgcaagagattgcaaggaattatcttcagacccgattgcataaggctgaagaggtcgtgttgctcgtctctcacgacaaagaaatcgaccgcgaatttgaagccaagagcgccctcgaggacgcaggcattcttcgccaggatctgtcggcgcgccgtttcagtccctcgttgaggggtgaagcaatggaggcactcgctacccaaggccttccaactgaactggccaaaggtgagggtttcgatcagctctgcgctgcaatccttcgggcgcagatcgaaaactatcgaatttatgccgcgaagctgttcggtcagtatgaccaatcggcaccgctagatcctcttttcgcgggggtgcatgctctcggaccgccccccatagctgaggatcagacaccttctcgcactttgaagctggtgattgagcgatattgcgagattcggcgcagtgattgggtattgaagaccttcaacgaaaatctccgggtgcttcgcttgttcatggcgctttccggcaaggatcggccaattgtctcaattcaggatgatgatgttcgcgattttcgcgacgctctcctccgcttgccttcgaattatatgaagcggcaaggagggactgacctcgacatccgtgaagtcctgaagaccgcagatggaaaggcccccttagccaaaaagacggcgaccaaatatcgatccaatctgaccacttttttgcggtggtgtgtggatgaaggctatctgaccaaggagcctggagccaaaatcaagactccgcagatctcggctcaggaggccatgcaggcgagagagtccttttcgacagagcaactaagtagccttttcagttcgccattgtatcgaggctgcaaatccgagactcggagaagcgcaccgggtcacctgattctccgcgacgggaaattctggataccactggtcgccctttattccgggatgcgccttggagagatcgtccaattgctcgtttccgacatcaaagtcgatgatgatatcgcctatttcgatgtcagaccgggggagggaaagaccgtgaaaacggcgtcaagcgtcaggaaaatcccagttcattcagaactcctccgcttgggcctcatggagcatatccaggaaactcagaagaaaagcccgaagggacgcctgttccccgatatcaaacctgggtcggacggatattactcgcacaatttctcaaaatggttcggccgctacacggctgacatcgacatcaagtcgcaaaggaccacgttccatagcttccggcacaccttcaaggatgcgcttgtgagagccaaagtgcccgggaacattgcgagatcattgatggggcacgcgagtgagagcgtccatgatcaatacggatcggccttcgcggttgacgtgttgaacgaagagttgcaacgtgtggcctacaagattgacctatcagggctctatcccgcgaagaactgaccttcgcccttccccatgccggtcaaattcaaactcccctcaccttcctctaacaagagcgcgctcctagatgcgagagagatcgcttattgggtaaagagggaaaaagagaaggtagccgtcttacgaccgaagatagataaggtttctatcacatatagcatgtgggaccttaccgaatcccatgccgagatgatgaaactccagcagcatgttgagcaggcgctctgggatgcggctgatcaagacgtctcggccttcaagcccgcacctttgggtaagagtccctctcgatataaaactaatattatctggcacgggaccccttctgaggggggcatactcattcaagcacatcccaaatcgaagaaagttaaacatttctttcggtttgagttcaatccatccaccctctctaaggcctctattgccggatttttcgaggagtgggcggagctatcgatccaagcgggcagcttggaagacatcctcaagaacggaacgatcactcggctcgacattgctgtagacgtcgttggcgtcagcattttcaatctcctcttcagaggtggagaagcgcataagagtttcgcctatttcgcggagtccgggccggtccaatccgtttatctgaactacaagcctaaaaagaaacctagcgacacaaagggctacaacaagcgcaaagaactcgaagagacagggaagctcccggcttacggaggtatcccctattcgcgtatcgaagtgacacgcaaaacggcgcttcctatcccgaaacttggcacgctaccgaacaagctcatgggtatctccgtggcttctcccaactcctacaggccagaaggtatggaaagccaaacatggacctggttcctcgacagcgtgagacaccgaggagaaaaggccgctctagccacggtgatcgatgcaagccttcgctcggaaatagagacctgcttgaatgaggcccatgcggatctctggagacctcaggacatttggaaattttggcctgaggcccttaaggcggcgcagctcaccctcgacgattgatcgagagagcaacaccccaagctgccactgcgttgcaattgcaagttaattgcaattgattgcactcaaacccgccttcccctcagcgcttgatcgcccggattatccgcaaggctaacgtcagttcggcatccgataggcccctgacgaggctgttagcctccgcctcctgttgagctcttcgagggctttccccgtgaaactccggcagtccctcaaggaaataaactggagcgacctcggtcaatgccgctatccgagccaatgtatcgatgccgggaagcgcgtggccgcgttcaatgttggaaatcgtctcgacggctctatcaagcaattccgccaatccagcttgcgtcaggccagcgtcacgacgggcagatttcacgcgtgcgccaatgtgtcgtttcaaatccatgccccaatgtttgaattgaggcggcgtcaacgaacatgttattaaaatgcgtttctttgcaaatttattatgatttctatagcgacaatcgttattatgttcgagtcttaagagcgtagatgacccgatgtgccctgctccaacaccgccacagtattctcccgcaaacgaccaacctggccaactcaaggcccgagtgatgagcgctttcgggcaccttttcattttcatcgtcattgtgccggtgcttatggccggacttgcggcgtggtcctcccctatcaccaaagtcgcggcctggggttttctgaccgtgggcttggttgtgatgatcaagccgtcgcttgtccctggattgagatcgcgctggatggcggccgggctcgtatggtgctctctcgcaggctttgtttacgcgatcgccgacgacaagaaagctgaggacgcgaccaagattgtggtcgaaaccacctccacacctcacgaggcttcgaagcaggtggatgtccctgtttcaccagtctcaactgccgtcactgaggtcgtggaatctgagaaacagccgctggagccggtaaagagcgaggcgcagattgctaaggaacgggagctggccgcagcacaagagcgccgcaaggaggccgatgacttcatgaggcgtttgagcgacggcgttcgatcagccacgtatggtgacgcaaattcatggttattggcatgttatggggcaatggaggattgtctggatcggcttgatggtgtcgccatgttgatctcagcccgaaaacactacgaccttgatccaacccaacgcaaagcctttgacaatcttttgcagcaggtggtgaaatttcaacgggccgcgttctcgaagctgcgggaacgctatgtacgtgaggcagccaaggacggatggatccaagatattgatgtcaaaggttcaggctcaggaacaacggtggttacatatatccatgcccgtttctcctcgaaccagtacatcgccgaggctcaacgagtcctcgcggcgaaactcacgcgctatcgctttcgtgaagtccgatacaaatggtatgagggagcgtcccagctgacctattacaaactgaccgctcccgacgatggggtcattgcgcgatggtctcgcggtaacgagagctacgatgtcccatgagatatcgcggacacggtttcggacaaacgcaagaccgctccccctattcgcgaatttccttgtggtgcaagagaaagaggcggttcttgtgtacgtaacgcggaaagttcccggacaaaaaagaagggctttttgcagcgttggacagtcagagttatagcgctaccgccgggccttcctaccttggaggcgctccaagcgtcctcacctaaactgtcgtcaaaaacgaaaaatctgacgctccagtgccacgtaggtaaacaaaaaaggcgacgccggagcgccgcccttatctggtgcagactagctgcttgttaacagccagaccacgatctctgagcacaaactaacagttgaatttctcaggtcaaccggattttattcttttgagtgaaggtcggagggaatgatgaagtggcggcttggaattgacctcggcgcaacctcgctcggatggtgtgggtttctgctcgacgaggatggtcaacctgcagcaatcatcggtgcaggtgcccggatttacagtgatgggcgcgagccgaaatccggcgcttccttagctgtcgaccggcgcaacgccagggccctgcggcggcggcgcgaccggtttaagcggcgtcaagcggcgcttatcaagcacctcacgaaagatggggtgtttccggcgactcctggagatcggaagctcttggaagggctcgatccctttgagttgcggtcgcgagctttggatgaacgcctccccctttatcacataggtcgcgccttttttcatctcaatcagaggcgaggttttaagtcgaaccgcaaggcagataggaaggcggacgacgaggccggaaagatcgccgtcggtatcgatcggttgaggatggctatcgaggaaagcggagctaggacttttggcgattttctgcataaccggcgaagtgccgccacggattgcaatcgcattccaagtgtaagagctcgcctgcgccctgaagcgggagatggagcaaagggcgacggttatgatttctacccaggccgctctcttctcgaagaggagtttgatgctatctggcaagctcaggcccctcaccatcctgaggcgctcgcgcaggaagtgcatgaccgacttttcgaaatcgttttccaccagagaccgctcaaggaacaggaggtcggagcgtgcatgttgctccctgaggagaagcgccttcccaaagcgcatcctttgttccagcagcgccgcctgctggaagaactgaacgcgctgatgatcgtgcgcccgggtgaaaaggcccagcggctaatgatggaggagcgcgatcttttattcctgaagctgaaagacaaggcgaaagttaaatttgagagcttgcgaaaagtgctgaaactcgaccccgagactcgtttcaataaggagagcgagaatcggcctgaactaaagggcgatgaggtctccgcactgttgagcgacaagaaacgtttcggtccgcgctgggcgcatctgtctgctgatgcgcagtgggaggttgtggcgcggcttcgcgcgattgagacagatcaggacgatgcaaaattttgcgcctggctatcggcaattcacgccctgtcggccgatgaggcgacatcagtcgcgtctgttggagccagattaccccaaggatacggtcgtttcggccacacggccacaagccgccttatcaaggctctgcgccacgaaacgaaggatggacgggtcattgtctacagcgaggctgtcgaacgggctgaccttgggcaccatagtgacctccggacgggcgagattcatatgactttgccctattatggcgctgtccttgaacgtcatatcatgccgggaacgggcgaaccctcggatcccgatgagatgcgcatcgggcgcctcacgaatccaacggtccatatcgggctcaaccagcttcgtcgcgtggtcaaccggctcatccgcgcttatggccctcctaaggaaatcgctatcgagcttgcccgtgatttgaagctcaccgatgacgaaaagcggcagcggaacaaggagaacaacgacaatcgtattgctgccgaaaagcgctccaagaagctccttgaaatcggtcaacccgatacgggtgctaatcgcgctcttctcaaactctgggaggaactgaatcgagacaacgccttggaccgacgatgcatttataccggagagcagatctccattgacatgctcttttctggtgcggtcgagatcgaccatatcctccccttcgaggcaaccctagacgattccaacggcaataagatcgtctgcatgcgcgaggcgaaccggttcaagagcaaacgctcgccttatgaggcgtggggacacaactcgcaatgggacgaaattgccgctcgtgctgcccacctgcccaataacaagcggtggcgcttcgagccggatgcaatggaacgttttcaggacgagggaggctttctcgctcgccaccttgtcgacacgcaatatctctcacgactggcccgcgaatatctggcagctctctatccggagcagggagagggctccagccacgtctgggtctcacctggtcgcctaacagaaatggtccgccgcaagctcgggctcaatgagctgctgcccgatcacaacttcgccggcggtgatgcctccaagaacaggttggatcatcgtcaccacgccatcgacgcagcggttgtcgccattgtggatcggtcgatgctgcaggctatcgcgcgcatttccggacaggatggtagcgaggggcgcgaacgcattatcgttcccgagccgtggaaggggttccgcgatgacttgcgccgtgtcgtcaatgacatcgtcgtcagtcaccgtgccgatcacgggacggtttccaaagccagattgcagaagggcctggacaccacagctggacggctgcacaatgaaactgcttacggtctgaccggtgaaacggacgcgaagggtaatagcgtcgtcgtaacccgaaagccccttggcgggcttagcccttccgatctcgacatcattcgcgatgtggacctcaaggaggctctgcgtgacttcacgaaagggcgtcagggtaaggacttcgagaaggcccttgccgacttcgcgtatctcggcccgctgcaataccgcggcattcgccgcgtgcgcgcggttgagccgctgaaggtcatcgagatcagagactcctccggacacgtctacaagggttacaagggcgattccaattatcgctatgacgtatgggagctggcggacggcaagtgggtgccggaggtcgtttcgatgttcgatgcacataagcccggctggtcatcgaggatcagagccgcccaccccaccgcgcgcaaggttctgagcctgcagcagaacgatgtaatagccatcgaaccggagggcggcgagcggcgattgatgcgggtagtcaagttcgggcagaacggccagatcaccttggccgcgccgaacgaggcaggagatcttaagcggcgtgacgctgccccaaatgacgaggatccgttcaaatatatagcgccgacagcaggaggactgaagagggtcaaggcccgtcaggtccgcatcgacgaactggggcgcgttcaggatccaggctttcctgcgcggatagcgagacgtcagacacgcagaaaatcgacctaagcagaggcggatatggagcggatcgtcgatatcgcgaccgatggccgccacctttcggcctatcgtggattcatgatcgtttcggaggatcggcaggaggtcgggcggatccctcttgatgatgtcgccgccgtgatcgtgcacgcgcacggagtcacatggtcgaccaatcttgtagtagctcttgccgagcggggggcactgatgctgctgtgcggatcgaaccatgcgccggtggccgtgtgcctccctctcgacggtcatcatgcccagaacggccgcatccgcgcgcaatgggaggcaggaaagccccttgccaagcaattgtggcggcgcgtcgtcatcgcaaaaatacgctggcaggcggcagtactggaagccaacggaaaatcggcctccgcgttcgatcttttggcacggaaagttgggtcgggggatcccgagaatgtggaagcacaggcagcacgtcgctattggcagctgctgatgggagaggattttcgtcgtgaccgtgagtcgggcggcgcaaacgcgatgctcaactatggttatgcgatacttcgctccatgtgcgcccgcgccgtcgtcgctgcggggctccatccctcgattggaattcaccacaccaaccgcggcaacgccttcgcattggcagacgatctgattgagccgttccgtccgctagttgatgctctaacccttcgcctgcttgtggctgggatcgagtccgttacgccggaagcaaagcgcgccttcgccggactgattgcacttgaccttcccggagaggctggcatcactactgtcacaggaactgccatccgtacggcgcagactctcgctgattgcttccaaagcggaaaggctgcgaaccttattctgcctcaaccaccgtctgccgccgatctcgccgggttggacactctgctgcgatgacggcgacccaactcagtggctatcgactcatgtggatcttcgttatgtttgatctgcccgtcaccaccaagaagcaagggcgcgcggcgaccaaatttcgggaatttttgctggacgaaggtttcgaaaagagccaattttcggtttatgcgcgcttctgcaacggcaaagaacaatttgaagcctacatgcgtcggatcgaggccaacctgcccgatcagggtgatgttcacatacttaccttcaccgatcggcagtatgaaaatatcgtccgattctcgggccagcgtcgcaagcggcgacggaaaaacccagatcagttggccctgttttagagatttggcacgctttctgttttgccaagaagcgccgttatctcacgcttttcaacaagataacggcgcatctagactagcagcttagagatcgtggtctagcggcaacccaaaaaggcgcggatgggtgacggatccgagactagcagcttagagatcgtggtctagcggcaacctgaacagcttgccgaatatatcagatgtaagactagcagcttagagatcgtggtctagcggcaacgatggcaccgtcgctcatcatgtcggcttcagactagcagcttagagatcgtggtctagcggtaacccggcgccacgctttgactttcgtcatggaagactagcagcttagagatcgtggtctagcggcaacggcgtgtgcatcttcacggcgggctcgatgagactagcagcttagagatcgtggtctagcggcaaccccacgggcggagtaatgccgggcgcatagagactagcagcttagagatcgtggtctagcggcaacgatggcaccgtcgctcatcatgtcggcttcagactagcagcttagagatcgtggtctagcggtaacccggcgccacgctttgactttcgtcatggaagactagcagcttagagatcgtggtctagcggcaacggcgtgtgcatcttcacggcgggctcgatgagactagcagcttagagatcgtggtctagcggcaactgcgtcgacacagccttgatcagatacgttagactagcagcttagagatcgtggtctagcggcaaccttgggagcgcgggcggcgcgacggagatcagactagcagcttagagatcgtggtctagcggcaattatgagatcaccggacggctcctcacccaagaggccatgagcccatcataacctctgataatccctcattatcagaggtataaaacgcaaccgccacttccctccttgcacctcgccgcctctccgttaacgtcgaaaatatagcggattaggtatggaccagatcatagcagcgactgaaccctcaggccttcgtgagacacttccaatcgctgtaagggaattcaccgaagctgcgatatcggcgaatacgcggcgagcctaccgggcggatctcgatcactttcttctatggggtggctcggtaccatccagtgctgagaccatcgcacgatatctatcggtgcatgccgagcgtctgagcatcgcaactcttgcccgccgcctcgtctccatcagcaaggcccacacgagccgcggatttcccaaccctgtcacctcagatctcgtacacctcaccatgagaggcattcggcgcgtccacggcaaacctcagcgtcagagtgcagctcttctggttcaggatgttcgccgtatgatcgcgggatttggcgacaatccgaccgaccttcgggaccgagcactgatattgatcgggtttgcgggcgcgcttcgtcggtccgagctgcgtgcaatcaactgctctgatatcgcacgcgtcccgcatgggctcctcatccaaataacccgaagcaagacggatcaggaaggcaatggccggaagatcggtattccctacggccgaactgtcgcctgccctgtgctggccttggaagcgtggttagcacgcgctcagataggtgaagggccaatctttcggccaatcgaccgccaaggggtgatagctgagaccgcgctatccggcgaggctgttgcccatattatcaaacgaagagccaaagccgcaggcctcgacccaacgcgctattccgggcactccctccgcgctggtttggcgaccagtgccgccgaagcaggtgtcccgacttggaagatcaaagcacaaaccggtcatcggtccgatgcagtgctttcccgctatatccgtgatggagagatgtttatccagaacgcggcgtccgtcttgtaatttcatcggcggcaaagacatcctcattgccccgccgacggccaaagctaacgtcaaaccgttattatacaaaggtttgacggatgccttctttcgatcaacagccgctcctctttgagcaaaatttcgcccccgacatcaccctccttccctgcgatccgtggattgcggcaagcgcgttacagaaggcaattcgccgaagcgacaccgtcaccgcacagcgggcggcactgacatgtctcgaagccggtcgtgacgtgtggcgtcgcttgatcgtcattgcattcgaggacatcggcgttggatctgaggaagccgttgccgaagtgaccgaagtagtggcggaattgaaagtcgagaagcgatcaaaacatgacatcgccctcctctttcatctcgtgcgccgtcttgcggaagctcccaaagatcgaagcgcggattacctgatctgcgccgcaatgcatcatcctcctttggcacagatgcgggacatttgtgggagtgccactcaatcggaacgtttctcgattgtgaagggcgccaaccattccctatcggaacgggccgtggcggcatggtacgcgtcaggattgggatgccgcttcaacccgagccgcgaaagggaacaagcgcgcgctctggccgaattttaccgcgacgcggatatatctcctcgactcgtagaagcgacagaaatggcttgtcggctcacccgcgagccgattgtcgccctcgtgccgctcatccagatggaggttcgaaaagacctaactcgcattattgagagcccgacaccggcttatgcgaccttcaatggtattccaagctacgcgatggacaagcacacgcgaagcgggcggaaagccgtccagcgtctgatttgggagagccctgctctgcggggtattcttgaagaagcggtcccggaataccgctggcgagatgctgctttgatggctgcgttctacgcagacggcgttccaacaaggttgcgactggattggtttcaatcgcaggcgcttgaagattatggccgtgaggtcgatttcgcgagagcgggaattgcaaaagactacattgcggcaatgtcggaagcgatggcatcttcgcttggcattctcgatacaattcggtgcgcatttacgccgtggcgaagctcctgagcccgaccgccttgagctacggcatcgcacacctgtcttttggagctctctatcggtgtggtgacgctcctggcgaagactacactaggtcgcgtacccataaaccgaatgaccggaaatggtggaaaaccgggccacagccgagggggcgaagtcgctctgcgctagcgctggagagcggtgatggtattttggctacatggctagatgcacagcaccagttgaagggcatcgctcagcgagcgctgcaatgcggctgtggctacgcaattatgagcctacggccttagtgatggccatgacccattccgttttgcggcccgcccgaacggtgtgacaggtgtcgcaccgtatcctgaagtgccctttgtccagaccaaatcagtgccgacttgcaaaggcgcgctgtgtcccgtcttcccttccctattgagcggttgtattcgtgcccgcttatcccgccgaaggaaaatactatgcgcatcgcaatgattggggctggctatgtcggattagtgtccggggcatgctttgctgacttcggccatgaagtttgctgcatcgatacggatcaggggaagatcgacgcccttgttaaggggcaaatcccaatctttgagccagggctcgatgatctcgtcgcggacaacgtgagaagtgggcggctgacattcgggacagacctgtatgaggccgtcagatcggcgtccgcggtcttcatcgccgtcggcacaccatcccgccgcggagatggacacgctgacctgtcttacgtgtatcaggccgcacgagacattgctggagcaatcgacggctataccgtcgtcgtgacgaagtccaccgtgcccgtgggcacgggcgacgaggtggagcgcatcatccgcgaaacccgcccggaggccgagttcgccgtagtctccaaccccgagttcctgcgcgagggcgcggccatttcggatttcaaacgaccggatcggatcgtgatcgggactgaagacggccgcgcacaggccgtcatggcggagctatacaggcccctctacctcaaccaagcgcccctcgtcgtcacgtctcggcgcaccgcggagctaacaaaatacgcggccaacgccttcctagcgactaagatcacgttcatcaacgaaatggctgatttgtgcgagaaggtcggggcagacgtccgggatgtcgcccgcgggattggcctcgataaacggatcggcccgaaattcctgcatgctggcccaggctatggtgggtcgtgcttccccaaggacaccctagcgttgatcaagacagcccaagacaacgcttctccggtccgattggtcgagactgttgcgtcgatcaacgatcagcgcaagcgcgccatgagccggaagatcattgcggcttgtgggggggcggtcagaggaaagacggtggcgctgttaggcttgaccttcaagcctaatacggatgatctcagggacgccccatctctcacaatcgtcacagccctgcaggatgcaggagcgagggtacgcgcctatgacccggaggggatggaggcagcccgagatcttctgcctgatgtggaattctcgtcggatccctacgcgtgtgcccaaaatgctgacgcgttggtcatcgtaacggaatgggatgtgttccgcgcactggatttggggcgtctgagacaccttctgctcgaaccagtgattgtcgacttgcgcaacgtctatgatccgcaggatctccagcggaacggcttcagatatgttagcgtcggtcgtccttagtccctcacaaccactccgacctaatgatggcatgaacgcctagtccgcaggaggcattttgctgctggtttaagacggtacaaggcgcggcaagtatcatgtgccttccgaaatctgcaatgttttgtcgctacctccgctgccggaggcgatttgaacgacgagattgacgattgcttggcgcatctcagagctttcgatggttgagaacgccttcagcagcctgaaggtttgaaccgtattggccagcccaaggatgctgcttacgttcccctcttgtggctcaatctcatcgtagaagaaggcgatcggcacattgaggatccgcgccagatcctccaagcggccggatccaatgcggttggtacccttctcgtatttctggacctgctgaaaggttacgccgagcttctcgccgagggccatctgcgacattccgatcgacgctcgtcgcgcacggatgcggcggccgatctcctcgtcccgcggactaggctgcttcttcgtcatcgttttaccttcagagttgctgggatcttgaacggtgcccatccctttagggcgctcccgtatccgatggcaacttgaccaatgtcgccgcgccggtcgtatagccgtcccctctccgtcatttaagtcggttaactatttggtttttggcgctattttctgtcggagcaactcctgacccaacgtgagccctagcacaggcccagtgcatggtcggtcggatcgacgtccgcaatgcgcgaccttgtcgcccgattatgataagcggctcctctggcaaatgcgcgccggactcgcatctgatctggttggttggctggaacggtgggtagagcaagacaacccacttcatcgcaggcctcaacaatccgggaatgaggttcgccgacacggcagcgcacgagtttgatgttgagcgatcagatggcggcgggatttcgtcgcgaacttacgagtcgcaataggtcatcgagccgcgcagcaagctctcgcgctaacccttgctaaacccttgccaaccggcgtaacaaccgctgaaacttacttgcaccttggtaacagttcagggcatctctagcaggcaacggggagtattaaatggctatctcaggtgctgtagactcactgataggagacaccatctctggatgggtagcatgtgatggacacgcaggcatcacggtagtcattagccttgatcaggatacagtgactgttcctgtgaatgtccccagaacggattttgctgaaagttcggggcgccttggattcaaggccaagctcccgcgcgttgcaatgcctagtgagtttttcaacggtcgcttggctgtacatgccaatcacaatggccatttaattccactgactgtatgggagccgcttcggcaggcggcgagcttagaaagcacagatttccgagggatggcgcaggcggtccgatttctgagccctgagaagcgccttgaattcaacaagattttcgcagaaccaaaaagctggaaacagttaggctctaagaaaccactgtgcgtaatttcttatgcacacgatgcgtctgcatggttcccatatttttataactattatacctcagttgttgagccgaatgctattttcattgtcactcctaatccccaggagttcactaagtacgctcttggcggtgtaatttccattgacggatttccttacgacaatgcggcgcgctcgcaaattatgtcccggttgtgtcaaggattgcaggcatatttcgagtggaccctattgtgcgacgtcgacgaaattgtcgtcccgcatcctgcttccggcaaatcgttttttgaaacgcttgcagcgctgaattcggatatatcgacgtcaagggggtttgatataattcagctcgatgacgagctcgactttgactttaaccagccggttctccaacagcggcgctttgggttggccgcttcagggctttgcaaacctcatctcgcccgtatcccagtgcgttggagtgtcggctaccattttacaaactacaaacctcgcttcgagccagaaggtcaaggtttcgtgacgcttcatttgaagtgggcttgcgacaaaatcaggcttgacgttgcaaaaattgttcaaaaaacgaagtatgctgtctcaaaaacagcagattatgccttggaaagcgttgtcatcagcaagcaccccgcaatggttagtggcgctcctccaatttcattattgagcagcgatgctcttaagagttttgaaaaagaatttttttctggcctttggtacaattcagaagaagatctctgggcaagagaacacttcgtgagctcggcgttgtttgattttaagaagtaaggttttgatcatttggtcagcgtgcgacatggacgcaatcattgagagaatattacatgccaaaccagcaatcagagctccttgaactggcttctaaactagcgaaagaaataaaaattcttctccaagagggattggacagtggtgaacatattcacaacttgagtagagttgtaagagagcttgtcgagcgcggcgtctctattccaccgcttgtttatgacgtcttgagaagcgatcaggtgcgccaagagtacagggcgctgaaccaaaatcgatcctgaaacatctcctatttaagtggcggcattgaagcgtagcatcacccagaaacccaaattggggcctaactcggcgcgtgatttagtaacatctaagggagggattgcccgtattggaatgttatcctgcatccgctcgcttccacgctcagcttggagcgagtgtccgccagctagcgaggttaaacacccagagcggtgggtggctttttataacttaagaaccccaaatcggccgcctgctgaacaaaaaggtgcgccgccttgatgatttctcggccttcaaacaagtcagccataacaacctgatctttaatcggcatcagatgatgctttagagagatctcgtcgaatttgaaccccgtttcgcaaatgtaaatctctccgctatctgcgcaggggagcagatcatgcgagtaaaaaccaagacctaaaacatcaccaacactacggcaaatttcatttatataatctcgaaatccaataacgagccgagtgtacaagtaatttaggagatccggttcaaggggcgtattgatagcatgcactgatgggttcccttcatcgaccggacggcaccgcacgtaaacggagtggcaaactccaccaacacacatggcccgaagcgagacaaagtagtcctttcctctgaagctatgcaccgtgttaatgaaggctgtattgtaccgccgctcatccaacgtttcacccgcgtgtcttgttgaaaccgcttggccggacccttgaatcacattcgagaacactttccctaacgcggttgtgcccgccgccatcggcggaacgttgataccccgtttcgaaaacgcctcgttggaggcggccttgctgctaacgatctgcccagtcttgtaagggtgtaccagcagaaaccgctccaagtgatttgaacacaggtcttccgtgttcaacacctcctcaaaggattcctcctcattgtatatgagagcaacaacagctcgcttgtgctgagaaatgcgcgcttctaatgcatcaaaactctcgtacttgaagacgttaaggccacaccggttcaagatcggttctgcatactggaaaaaatacccaaccttgccattcccatgcagtgcgttcttctttgtcccaacgaataggatatcctgcatacttgccccgtagatatcgactgtcaaaatttagtgagaagtgtccgccgcataggcagtgcggacatcctgatcgtct

SEQ ID NO: 3079 - DNA, 23273 bp, synthetic construct
  misc_feature 1..23273: note = Synthetic
  source 1..23273: mol_type = other DNA
cggctgggccatcgacagcgcgacgggcgccgacaacaaatatgagtcccccgtcaatgtcaccatgatcccggaaggtgcggcacccgcccccgtggccggtgaagcctccggcaatgctgccggtgccgccacccccgcagctccgaagtaagagaccgccatgagactgctgcaccttctcaccatcaccgccctgctgctgccgcttgccgcctgttcatcgcggccagaggcaatggttgccagcgcccccgccgacgcaaggggtctggtccattcatcgccgctgttcctgtcgaccagcgtcggcacggtgacgacggcgacggagaagggaaagtcctgggagtttgtctccgaagggctgttccgtgaaggattgcagcagtcgctgggcgccacgggccttctggcgaccgaccgtgcgccgacctatatcgtggatgtcgtcttgatcgataccgatcagccgattttcggtaccgatttcaaggtgacctcaacgatagattacacgatccgtgacaaacggacggacagcccgattttcaaggaacgggtcgtcgcccccttcactgccaaattctccgaggccttcctgggggcggagcgggcacgggtggcgaatgaaggttccatgcgggccaatattgagaagttcctgggcgctgccctgaaagccctgaaggatgtgaaggccgcaacgccgacatcataatcggcgctggggtccgctgggcacagcagcaggtcaggtcgaagggcggcacaccctcgacctgacctacggggatgattgactttactccaccccacccgccagcacctgtaccgtcaggccgcccgtggtccgcaaggtttccaccacgcgttgggcgtggcgtttggaccggcattcgatggtcaggtcgatgtcggtggccttgaccgtcgtggtggtgaacaggcgctggtgcgaggcctcgatgatgttgccgccggcttcgcccaccagaccggtgatgcgggacagggcgcccggacggtcggggatggcgatgcggaccgcgatcaggcggctttcacgcaccagttgacgcatgatcacctgggccagcaggcggctgtcgatattgccgccgcacaggaccagcccgaccttcgatccctggaaaaggtgcggatgggtcagcagcgccgccagccccgccgcccccgccccttcggccacggtcttttcgatgttgaggaacagggccacagcctcttccaccgcgacatcggggaccaggaccacctgatccaccagggcgcggcagatctccagcgtcagggcgccgacattcttcaccgcgatgccttcagcgatggtgtcgccgcccacctggatcggctcgcccttcagggcctgggccatggcgggataggcctccacctccaccccgatgatgcggatggcggggttcagggctttggccgcgaccgcgatgccgctgatcaggccgccgccgccgacgggcaccaccagcgtgtccagatgcggaacggcgtccagcatttccagaccgatggtgccctggcccgcgatcacgtcgggatcgtcatagggatggacgaagaccagcccctcgtcgcgcgacagacgctccgcctccgccgccgcttcggccaggacggtgcctttcaggacgacgcgggcgccatgttcctccgtccgctccaccttggtgaagggcgtgccttcgggcatgacgatggtggcgggaatgcccagacgaccggcgtgataggccacaccctgagcgtgattgccggccgacatggcgacgacgccgcggcggcgctcctcctccgtcagcttgcgcagcttgttcagggcgccgcgttccttgaaggcggctgtgaactgcaaattctcgaactttacccaaacctcggccccggtcagttgcgacagggtgcgcgacgggacgcagggcgtgtccatgatgtggccggagagcgccttcgcggcctccttcacatcggccagagtcacggaaaggggggcggtggatagggcggtcatggattgcggtctccttggacgcaaggatacggcatcccacccaccgcgacggggcgggcggggccggtgggtgcgcgttcaggtccacgcacttctcacgcattcttgagtctcacgctccattgttgctgacgagacgatttttcacagcgctggtagaccgggtttcgttttcctcaagcgccggcgcggcatccgctgcttggcttcacgccgcacgtgcggcgcgtcggcagtcgccgccggacctgtttctggccaaccgtaaacagctctacgtcagcgcgggcagcccggcgtgccgcaacgggcagcacccgccgcgacatagacgccgcagacggtgcatttggccatttcctgcgtatcggtcgatggcgtcttgcggtcattgccgcgtggcgtctttgcccggtcaccgccattgcggcgcagggccgcctgccgttcccgctggaccttgccaagcaggcggaatgcgaaccagacgatggccagaaggcccaccagggtgatgatcttggtcaaggacagcatggctgcaaagtgtgggaagccggaaacgggagcaagtaaattcagagaccaaagcgcgcgaaagcggcgcgttcggatgccgcatccgccaccccatcggccagcgaccgcgcgtccagcccgataaagcgccccaggccgggaccgcgcgggggattgatcaggcggatatccaccttctccccgaaccgttcgcgcaaggtggcgcgcatgtcgccggtgcgatcgatcaggccaagctccagcgccctggccccggtccagaaggcgcccgtgaacagatcatcctccgccgccttcaaccgggaagcgcggcggtcgcgcacccaggccttgaacgcctcatgcatttccgtctggatggatttcagatgggcgacatcctcttcccgctcggggcggaacgggtccagcatggccttggccgccccggacgtatggacgcgccgatcgacgcccaaccgctcaatcaggccggtaaagccgaagccggcagagacaacgccgatcgagccgacaatagaacaggcatccgccgtgatctcatccgccgcacaggccagccagtagccgccggacgcggccacatcctccacaaaagccaggacgggcacattcttttccgccgccagcgcccggattcgccgcccgatcagggccgattgcaccggggagccaccgggagagttgatggcaagcgccaccgccgccagcccgttcggggcgaaggcccggtcgatatcatcggccagcccctccagcgacaggccccgccgccccatgccaatggcccccgacaggcgcagcaccgataccagcggcgacaatgagaggccggcaagctttctgaggcggcggatcatgggcgaaggctttccaaagcgaaggtcatggtgaagagatgggggtggcatgcgcgcaacggtagccccgttccatacgaaagagcgcggagaaggtttgaccgcgccccggcagcggcgcaccctgtcacttatgacgaaggttcgagccgacaccacatcttttgtatatgtcacgctggcattctgcatcctttcattggtgcagctggccacaccactcgcctatgcagagcaaacggtcgtagaactgatggccgtgcaaagcccgcccatggcgatggcggacggggaagagccaggtgccgttctggaactggccaccgcggcggtggaacgggcggggctgaagcccaaggtcaccttcatcccctggcgccgggcgcaggaaatggtgtcggggggcaaggatgtcctgatcaccccgctgacctggctgccgtcgcgcgcggataaattcacctggatcgggccgatctgccgcatggaacgatccatcgccagcatcaaggaccgtatcgacagcctggatcaggccaagcgggaacggcgtatcctggtggtgggggccggcagtgcccaggagatccagctgcgcgactggggctatccgtccgaccttatcgtcgccacgccgctgggcacgcgggaggcagagatgctggccagcgggcgggtcgatggctggtacagcgggaccgcacagattcgctggcgctggaaccgggaggggcggaaggagcggctgatcatcggcaacgcgattgtcgtggatcagatccatctggcctgttcacgcgattgcgacccgacgctggccgccaccctgcgcggcgcgctgcaaagcctgcgtgatgatggaacggcggatcgcatcctggcgcggtacgacctttactattgaaggggcagcggggccgcatcgcgcagcatagcctccaccggggcggtgtagccctggccctccccatgcagaaccagaccgggcagcagggacaaaggcccgcgcgcgtcgcgccgggcgctgacaatcacacgcttggcgggcacgccggcgcggggccagagcggcaggacgcggatatccccgaaccggcccgccagcagcgacagcagatggtccagccgttccgccggatagatcagggtcagcgtgccgcggcttttgcccaggcgcagggcggcctgtacgaatcccgccagatcgcccaccccttccccatggctgttggccttgtgcccgctgggtgagggcgtgtggcggcccgtgggccagaagggcgggttggccagaatatggtcgaaactgttggggcgcaggccttccggcggggcggacacatcgccatccaggacggtgacacggtcggcaagaccgctttcggcggccccgcgccgggctaaaccggcggcaaggtcctgtatctccagccccgtcaccgccagacccggcacacgggcggccagacacagcagggccgcccccgtgccgcaccccagttccagcacggcctgtcccgccaccgccggcacggcggcggccagcaggaccggatcgatcgcagcgcggtagccgtccgcaggctggaacaaagtgacgcggccacccagcaatttggtggcatcgatatcgccgcaaccggtcacgccgaagcccccggcgcaacggccaagcctgcctctaccagcagggcgcgggcatcctccagatcatcatcggccacgcagagacggcggggaatggccccgatgctgccttccagcacagaggtgtgctggtccagcaggacaaacgggatgccggcatcggacaggagcgattgtgcgaaactcagctccaccgggtcgttgctgcggatcagcggctgcatgcgggtccatccccttcggagtttcaaggcggacatgccgcgtataaacgccggcaggtcttgacccgccgggcttccccgctatgctcccccgcaatccctcggcccgtcaaccgggcttgttgtctgctgccttctcgcgatggagccttgacccgtggccaccgtgaccacccttgatcccaagcgccggaagccggacaccaacgcgctcgacaatctggtcgccctcgtggcccaggatctggccgatgtgaacgagatcatcgtcaaccgcatgcagtcgccggtagcgcttatcccgcagctggcaggctacctgatcgccagcggcggcaagcgtttgcgcccggtcctgacgctggccgccgccaaactgtgcgggtaccacggcgagactcacaagccgctggcggcgtgtgtggagttcatccatacggccaccctgctgcatgatgacgtggtcgatgaaagcgacctgcggcgcgggcaggccagtgccaatgccgtctatggcaacaaatcctccgtcctggtcggtgatttcctgttctcccgcgcctttcaggtgatggtggaggcaggatcgctggacgtgctgcgcatcctgtcgaacgcgtccgccgtcatctcggaaggcgaggttctgcagctaatcacgcagaacgataccgagaccagcgaggaagcctatctggaggtcatcaaggccaagacggcggaactgttcgccgccgcctgccgcatcggcgcggtcgtcgccggtcgccccacggcggaagaggacgccctgcgctcctacggcatgaatctgggcatcgccttccagctggtcgatgacgtgctggattattcggcggcgcaggccaagctgggcaagaatatcggcgacgatttccgcgagggcaagatcaccctgcccatcgttctggccttccgccggggcgatgacgaggaacggaccttctggcgccggaccatggaagatctggaccagggcgaaggcgatctggaccgtgccatcgccctgatggccaagcataatgccctgcatgacagcgtagagcgcgcccgccattacgtctcggtggcgcgcgacgcgctgggcctgttcccggccagcccggtgaagcgcgccctgctggacgtgctggaattcgtggtcgaccgggattattgattgcgacgtgtcacgcaaaaaatcaggccgggagggatcaccccccggccttttttgtatcgggcggagcggtgagtgggcgcgatgctgccatgcggaccggcatgggtgggaaaacgtcatctagggcttgcatgggccgttcgatgacgctatacagccgcccacgcaaacgacggcttcggccaccgggtgcggaacatgtgacggagtatagctcagcctggtagagcgctgctttcgggaggcagaggccggaggttcgaatcctcttactccgaccagtaaaaaccccggttcgacactgtcggaccggggttttttgcatatgggccggggtcgggagagggcggcggcgtatttcctgatcagccactgaccatcctcgcccatgattgaccacgcggcgcgggcacgatagtcgtggcggtgggtgcccgtatcggcgacgtcggcgaggcgtagatatgcgaggccgatgttttcagggtggccgatccgttgataatgtgcaaacgcctgccgacagagggagcaggcatccgcgcggcccacgaaatgatcggacgccccgtccgccattggggctggccgggggacgaggtcaccctcacggcctgcgtccggcaggtgctggaaacacatctgtacagagatgaacctcagcccccctcacaggcgcggggctgagcagtcggcggccactgatactccgtactgaggtccagcagccatcgccgcccgaccgggcacttcggtggtgccggcgggggacaggcggaaaagtttcaagtcaggcatgatccgggtcgatctctgcctcgggttcgatttccggctctggcagaatgaagccaaggcgcttcagccgggaacggataccaccctcggttcgttcaaatcggcgggccagagcagcgatgtccataccgtcctgccaaaggccggacagttccgcgtccaataccttgttccaggaggcgcccgcattggcaggcaaatcgacacggcgctgtttcgcctgcggcttacccgccccatccagcgtctggataatttccgccagggccgtccattcattgcgcgtcaaggtgatggcagggccacccggcgcccgtaattccgccaccgcgccatcgtccggtatcaacagggcaaaggccttacccttcacgtcccattcaacaatctggcgacgaaccacagccaccatgctcatgctaccttttgtgtacgaccgcgtcttggcgtcccgccccgcgccacccggatacagtccagttgcgttcttttagaagaaaatttgagacgagtgaaaatatcctggaacatctactactgattccaccttgtcagaattcgactttatcaatctctccctctttgagtatggcaaagatttttccatattggaattatcaatattattagcgtcaatgctatctattagatctttgctgactccgtttctgataataacgccgctggcaatatttccatctaaatttaatgggaccgggaactgcaatctacgctcgcttccaatatacttttccccgctgacttcgaatatattatcatctcctttacgtacatctgcaatttcctgaatcgccatctttttctgaatgactgcattttccattgctttctgcatccctttctcatccctcacggaacgagcgcgactgtagccggcatcagggtctaaaaaagcgcccgcagcgtatggaagtccggatgctgcaaagaatcttgacaagctacttcttgcaatcgcctctttcgctcttaatttaagggagtctgttatatgaattttctgccctgatccgggcgggtccgtgatgaccaaaacagattcgtgcctaggcgggtcttcattttcggtcttagcaatgaatagaccagaaacaatcgtttctccaccaccaatatcaaatataagatttcttatttgctcctttccagcctcgatctgtctgtttaatggacctcttccgctttgcgtacctttgcattcgatctgatgataaactccgtttgagataccaataaaatcaggggttttttgagccccattcaccgctatctctccaatgtattcagccccagcatcatacgccaactctttaacgaagtgcagcccatcacatacttcgtctatacccaacatcttgatcattgcgtacatagagaacgcgacgccaaaatcatcgctgagtatcgttttctgatgtggatcaattgaattatattctggcttcaggcggaggtggcgaccatctattactgtgaaatagtatctaatccacgcgtaatactcagccaaggaagcgccaaaagaggatactggggtcgtcaaaaccccaagcaaatgaaaaacttcatttagtggaaatttataataatactcacccgctggaaagcatgacggaacgtctttacccagctccagccagctcctagtctgaacctcaatctttacccatttttccattatcgtgactccttatcagttaaattccaagttaattctattaactggagcatcaggacaatcaactctcctcagaaaatcctatggagccgttcaaacccgcaattggtggctttgaacggcccactgttcaggctttcgcggtttaccactactccccgcttaatttgaagcgaaattaggccagaccattgccgctgcacgtgcgcccaaaggcgttctgacaggatggttgccaaggcccggtccaactgcaccttacaggtggcgggcggcgcgggggttgggcaatgatggtcagggcggggatcggtttatctgggttttcaggaaaggctcaaaggccaacaggtaatcctatggccctgtgaagcggcggccatagcctggaccgtacccagataggtgataaccgttcgccgcgcctgtcctgccgtccggttcagagctggctgacggggagcggcaggcccacggtttcggtcagttcttccaacaaccgcccaaatagagctggccgggttgaccacgacaggcccgaccgcgccgaccgcctgcatctgcgcatagaggccaacggcatagaagatgcaatattcaaccctgccaatctccgtgcacagccgcgtggcgcgcccgatcatctgttcatagaggatgcggctgaacacccggcgtacaaagaccgggttcacaatcttcggcacttggccatagcaccgggcgcggtgagaaagcaaaaaaggcggcgccggagcgccgcccttatctggtgcagaagactgcttgttaacagccagaccgcgatctctgatacacaaaatctgccatatgcgaggaaaatgtgcaacctttattttcaggaatgcttacgcaggcgaccaatgcataatagagaattcaaataaaaatatctaaaaacatctcaaatgagaagagcgctcatccctaatgatgaataagatacgtatccttcaatcaatggcatgaggcatgaagatgcgctggcggttgggcctggatatgggggcgggttcgttggggtggtgcgcggtagggttggatgatcagggctaccccgacagcatcctggccgccggcagccacatcttcggcgatggaagagcaccgtcgcggggggatcagcaaggaaccccgctgggcgttgagcggcgtgcggcgaaggccatgcggcggcggcgcgaccggtttctgggaagacaggccaagctgctggcacggctgacgctggccggcctgtttcccgctgaccctgtccgggccaaggcgctggaactgctggacccctatgtcctgcgcgcccgcgcgctggacgaggcgttgccgccccatcagctgggtcgcgccttcttccacctgaaccagcgccgcggtttcaagtccaaccgcaagacagaccggggcgtggacgatgaggccggcaagatcgccatcggtatcgaccgactacgtgccgccatcgcggcggcagaggcccggaccatgggcgagtttctgcataaacgccggcaatcggcaccggatgtaaaccagatccccagcgtccgtacgcgtctgcgccccgaaaccggagaggaggcaaagggtgacggctatgatttctaccctggacgtgagctggtggaagaggagttcgatgccatctgggacgcgcaggccccacatcacccaagcttgctgaccccggacaacagagcgctgctgcacgaggccatcttctaccagcgcccgttaaaggcgccgaagatcggcaaatgcaccctgctgaacaacgagccacgcctgcccaaggcgcacccgctgttccagcggcggcggcttctggaagaggtcaacgcgctgcgcatcgtgcggccaggcgaggtggcaaccaaactgacgtgtgagcagcgcgaccttttgatgctgaagctgaaggacaaggccaaggtcagctttgaaaccctgcgcagcaaggttttgaaactggagccagaggcccgtttcaacaaggaaggggaaaaccgaacagaattggtgggcgacgaggtctgcgcccagatgtccgccaagacccggtttggcaaggcctgggcacatttcaccgatgaaaagcgatgggcgatcctgtcccgcctgatcgaggaggaggacgaagaacgcctggacacctggctgcgcaccgagcatgggctggacgcggagcaggcaagggcggtggctggcgcgcgtctgcccgcaggctttggccggttcggggaaaccgcaacgcggcggttgatcgcggcattgcaggccgaggtgatcgtttatagcgaggcggttgttgccgccggcctgggccatcacagcgatatgcggacgggcgaagtgctggctgaactgccctattatggcatgacgttggaacgccacctgctgcccggaaccggcgacaaggccgatccggaggaattgcgcatcggccggttaaccaaccccacggtccatatcgcactgaaccgcctgcgccgcatcgtcaaccggttgatcaagacctatggcaggccggagcagatcgccatcgagttgggccgtgagctgaagctgaccgacgaggataagcagcgactgtcgcggcagaataaccgcaatcgcgccgatgcggaggcgcgatccaagaagctggccgaactgggacaggccgataatggcgccaatcgcgcccgcctgaaactctgggaggagttgaaccgggaaaacgcattggatcgtcgctgcatctatagcggccagcaaatctccatcgccatgctgttctccgatgcggtggaggtggaccatatcctgccctttgatgccaccctggatgacagcaacaacaatcgcatcctgtgcctgcgcgaatggaaccgccgcaagcgcaagcaatcgccctatgaagcatggggccacaccgactattggccggatatcgccgcccgtgccgcccgtctgcccaaggagaagcgctggcggttcgagcccgacgccatgcagcgcttctctgccgaggacaggttcattgcccggcacctggtggatacccaatacatgtcgcggctggcgcgggagtatctggaggcgctgtatccggagaaaggagaaggcagcggccatgtctgggtgtcgcccggtcggctgaccgaactgatccggcgcaagctgggcctgaatgaattgctgcccgaccataattttgccggcgtcaagaaccggctggaccatcgccaccacactatcgacgccttcgtcgtggccgtaaccgaccgctcactcctgcaaggcatatcccgcgcctccgctctggaaggggaggaagggcgggaacgggtgatcgtgccggaaccgtgggacggctttcgagaggcgttgcgcaccacgctgaacaccatcaccgtctggcaccgacaggatcatggcaccgcgtccaaggccggactggcccaagggcgcgaccaaacagcaggaaagctgcacaatgacaccgcctatggcttgaccggtcggcaggataccaagggcaacgatttggtggtgagccgcaagccgctgatgtccctgaaacccgccgatatcgagccggtgcccgacgttgcgcccatcaccaagggcgtgcgggaccgcgatctgcgcaaggcattggcgcatttcacccaggcgacggagggtaagggattccttcaggcgctggagcgattcacacgcctggggccgctgcattttcggggtattcgccgcgtccgacttatccagccactggcagttatcccaatcaaggggccgggcggtgtgccctacaagggctatctggggggagagaatttccgctgcgatgtctgggaaatgcctgacggggcctggaaaccggaagtgacatccatgttccaggcgcaccaaccgggctggacctcggctatccgggccgcgtgccccaccgcgcgcaaggtgctgagcctgcacaagcgggacatgatcgccatcgaacgggaagaaggcgtacgcaccttgatggtggtggcacagatctggtccaacggtcaggtcaccctggtggagccgcacgaggccggtgacctcaacaagcgcaacaagtcagaggatgatcccttcggctatttcatgccaacggcaggtgggctgaaacggctgaaggcacggcaggtgcgcgtggacgagttgggccgcgttcaggaccccggcttccccgcccgcaaggcgcgccggcggacgcgaccgaaacaggttgattgacgggacaggtggaccatgggcctggaacggatcgttgatatcgcgaccgatggacggcacctgtcggcccatcggggtttcatgctggtcagcgaggacaggcaggaggtaggccgtgtcccgctggacgacatcgcggccgtcatcgtccatgcccatggcgtcacctggaccaccagtctgctggtagccctggcggagaggggcgccatcatggtgttgtgcgggtccaaccatgcgccagtggcgctctgcctgccaatcgacgggcatcatgcccagaatgcccgcctgcgcgcgcaatgggacgcaggccgccccctggtcaagcaattatggcggcgcacggtggtcgccaagatcgactggcagcgcaccgtgctgcttgcccatggcaaacctgccgatgccttcgaccttctggcacgtaaagtgacatcgggcgacaccggtaacgttgaggcgcaggccgcccgccggtactggcccctgctgatgggggacgatttccggcgcgaccgcgacgccgccgatgccaacgccatgctgaactatggctatacggtcatgcgttccctctgtgcccgcgcggtcgttgccgccgggctgcatccatccatcggtattcaccatgccaaccgcggcaatgccttcgccctcgcggatgatctggtggaaccgtttcggccccttgtggatagcctgacagtacggcttctggacaagggtgtcgtttcggtcgatccggcggccaagcgtgcctatgcaggccttatcgctttcgatcttccgggatcggccggtaccaccacggtggcagtcgcagccaaccgtgtggcgcaaagcctagctctcgctttcacgctgggccggtcggatctgctggaactgccccctcccccgccaacggcggcgctggccgatttgggcagactggtgtcatgacggccacacaactcagcgggtatcggctcatgtggatcttcgtgatgttcgacctgcctgtagcgtcgaaggcgcaatcccgtgccgccaccaaattccgtgaattcctcctggacgaaggcttcgagaagagccaattctccgtctatgcacgtttttgcagcggcaaggagcaattcgaaacctatatgcggcgaatcgaaggcaaccttccagcccagggagaggtgcatgtcctcacttttaccgaccggcagtacgaaaatatcgtgcgtttttccagccaacgccgccggaaaccgaagaaaaaccccgaccagctggctctgttttgaccgatccggcccgatttgcaggcacagaaaagccatcataccctttaatatcaagggcatgatggcttatctataatagccgctcagagatcgcggtccagcggcaacgcggaggtggtggagctgtcgaagggcatgataatagccgctcagagatcgcggtccagcggcaaccgcccgaacacgctcttgcccgtccccatgataatagccgctcagagatcgcggtccagcggcaaccgcgccgataccggggacgcggcccttgaataatagccgctcagagatcgcggtccagcggcaacgaaaccatgcttggtcttggtgacttccggataatagccgctcagagatcgcggtccagcggcaactccggccatgacggcttccgtgaagtcgctataatagccgctcagagatcgcggtccagcggcaactgccagagggtcgggcaggcttgataatgcataatagccgctcagagatcgcggtccagcggcaactatctcccgattggcgaaggtgaatgtcagataatagccgctcagagatcgcggtccagcggcaacgtggatgcccacccccgcagcgataggtatataatagccgctcagagatcgcggtccagcggcaacaaaccagcatcgcggcaacaggccgcgcacataatagccgctcagagatcgcggtccagcggcaacgcccgcagaatggcggcatcgacgcggccgataatagccgctcagagatcgcggtccagcggcaacggatacaaggtgctgctcgtcgacgctgatataatagccgctcagagatcgcggtccagcggcaacgccgccggcgggctgccccaggcgccacggataatagccgctcagagatcgcggtccagcggcaacgaaagagacatactatagaccctggcagcataatagccgctcagagatcgcggtccagcggcaaccgcaggttgggcgaaaacgcagcgtccccggataatagccgctcagagatcgcggtccagcggcaacggtcacctcgactggcttttggctggccgcataatagccgctcagagatcgcggtccagcggcaacttagaccacgtttcgacattacccaggatcataatagccgctcagagatcgcggtccagcggcaacaaatggcagcctgcgcaattcatagcgctgataatagccgctcagagatcgcggtccagcggcaactccgctggtgtccgcatgccgggcagacatataatagccgctcagagatcgcggtccagcggcaacgcaacagccgcgcgaccaagaccgccagcgataatagccgctcagagatcgcggtccagcggcaacggcgcccgcgaaggtgtaatcgcgccgcgcataatagccgctcagagatcgcggtccagcggcaacgatatcggcgccgatgcgatggagcgcattataatagccgctcagagatcgcggtccagcggcaacggcatgatggttcggcagtcgccgcagtggataatagccgctcagagatcgcggtccagcggcaactgcgtcaccgcattcgtcagctcgcccattataatagccgctcagagatcgcggtccagcggcaacgccgcgaccttggaggacagcaggcccgacataatagccgctcagagatcgcggtccagcggcaacgcttctggcagctgcttgccgacgccctgaaataatagccgctcagagatcgcggtccagcggcaacacactaggcatagatagccggaatgtgtacataatagccgctcagagatcgcggtccagcggcaacaagtcaaggacatcagcaccagcgccattataatagccgctcagagatcgcggtccagcggcaacgcccggctgtcgcgcggcggggtgaccttcgataatagccgctcagagatcgcggtccagcggcaactcgctgacgggcactatctacctgggaaacataatagccgctcagagatcgcggtccagcggcaacaatgcggtcacgcgaacaatcctggttgaataatagccgctcagagatcgcggtccagcggcaacttgtccatcgccgcatggaacgtggcattgataatagccgctcagagatcgcggtccagcggcaacaacaggtgtggtgtgtcgacgataccgctgtataatagccgctcagagatcgcggtccagcggcaacagcgtgagcaaaagacgttgggcaaagtcaataatagccgctcagagatcgcggtccagcggcaacggccattggcgcgctgccgtggctgtcggaataatagccgctcagagatcgcggtctagcggcaactgtcctggcatcgccgttatccaggccgccatatgagatagaactccgacccatagaagttctgccgaccggtcaggggtgagccttgccgataaggcgacgcgtcctaactctctcgtcatgcaagagcttccctcccttcccacccccgtgcgcctgctgggcctgtccggggttctgccgcaggtgctttgcctgggcgctgccatgcttgtcccttcggtcccggaaaacaacgcacccgcagccatgggcctcgcctatgccgcactgatcctatcctttctgggcgggttgtggtggatggcggcgttgcagcggggggtgacggcatcggcaccctatatcctagcggtgctgcccagccttctggggtgggtcgctttgttcccggtcgctcttggctttgacaatgtgcattccgccctggggtttgtgggggttctgctgttgttgagcccgctggtggaccggtatctggggcgcagcattcccttgccacccggctgggtccggttgcgggtgatgatggccggtgggttgggcctgctgaccatcgccctggccctggtgtgaggtccgcgatggcgatgcggcgcgcaccggtcactgtttggtatgacggggcctgcccgctgtgccggcgggagattgcgctgatgcggcggctggaccggcggcgggccatccggtttattgatgctgctgatccgggtacggcctgcccactggaccgcgccgacatcctgtcgcggtttcatgtgcgcgagggggagcggatgctgtccggtgcggcagcgtttgcggccatgtggcgggctatccccgtgctgcggcccctgggcatcctggccggatggcggcccgtgacgccgctgtttgaggcggggtaccggattttcctgcggctgcggccgcgactgcaaaggttattgcgatgaatgaccgttcccgccccgtgccgcaggcccgcttcgcccggctggccgcctttggacagatggcgggcggtgtggccacgggcatggtgggcgaaggcttgcgccggctggcccgcggggagcggccgcaaatgtccgacctgatcctgacgccaggcaatgcgcgcaaggtgacggagcagctatcccgcctgcggggtgcggccatgaagctgggccagatgctgtccatggatgcgggcgatgtgctgccgccggaactgaccagcatcctggcgcagttgcgcgacaatgcccatatcatgccgccgccacagcttgaccgggtgctgatcgaggcctgggggccgaactggcgccggcggttcgcgcggttcgatcccacgcccatcgccgccgcctccatcgggcaggtccaccgcgccaccctgccggggggccgcgaactggccatcaaggtgcaatatccgggcgtggccgccagcatcgatgccgatatcgacaatgtcgccacgctgctgcgcctgtcgggcctgctgccggtcagcctgaacatcacgcccctgctgctggaggccaaacgccaactgcatgaggaggcggattaccaacgcgaggccgcacagatgcggcatttcaaggacctgctggcccaggacgagcggttcctggtgcccgaaccggtggaggagctgctgcgccccacggtcctgcctatggatttcctgtcgggccggcccatcgacacgctggccgacgccacgcaggcccagcgcgaccgggccgtggcggccctgctggacctggtgttgcgcgagctgtttgtgttcggccatatgcagaccgaccccaactttgccaattaccgctggcaaccggaaacgggccgcatcctgctgctggatttcggggcggcacgtgcggtggaaccggccacggtcgaggggtatcgcggcctgttgcaggcggggttgcgcgggaaggtggaggccatccgcgatgccctgctgcgcatcgggttcatcgccccggcacaattgcagcgccacgggttggtgattgaagagatgatcggcatcctgctgcgccatctggatcatagccggggcggcctgttcgatttcgccgaccgcagtttcgtgggcagcctgcgcgaacgcggcgcgcccatcctggccgaccgcgccagttggaccgtgccgcctgccgacacgctgttcgtacagcgcaagatcagcggtaccgtcatgctgggcgtgaaaatgcgggccagattgccgttgatcgagatgctaacgccgttcgcggggtaacgccgcgcaccatccccatcctgtcaggccccttgccaggaaccgtcgaacaatggtcctgtgattgtctgttcccgccccggccacagacccaggagacaaaagagtgacggatcagtcccaacgcgagccgacgctggcccgcaatgtgaacctgccgcagctggcgctttacggtttgggcagcatgctgggggccggcatctatgggttgatcggcaaggcggcgggggagatgggcaatgccgtgtggctggcctttctggtctccatggtcgcggccctgctgacgggtctgtcctatgcctcgctgggctcacgctatccgcgtgcggggggtgcggcctatgtcacacagcgcgcctatggctggcccttgctgacatatctggtcgggctgacagtgatggcatcgggcctgacctcggtcgcgacgcagagccgggtggtggcggaggcgctgacgcggctgcccatgctggaaggggtgccggtgatggcactggcgctgggcttcctgctgctgatcgccggcatcgtgttccggggcatcaaggaaagcatgtgggtcaacatggcctgcacatttatggaggcgggtggcctgctggtggtgatcgccgtcggcattccgtactggggcggggttgacctgctggaggtgccgcccacgacgggcgggatcgatgcggccatgatcctgcaaggggcggtgctgaccttcttcagcttcatcgggttcgaggatacgttcaatgtagcggaggaagtgaaggacccgcagcgtaccctgccctgggccatcatcatcgccatggcggcggccacggtcatctatctggctgtcgccatcacggcggtgtcggtcgtgccgtggcaggaactggccacagcatccggccccctggtggaggtggtgaaccgcgccgcgccctggataccgcccgtcgtgtttgtggtgatcacggtgttcgcggtgtcgaatacggcgctgctgaactatatcatggcgtcgcgcctggcctatggcatggcgcggctggaactgctgccgcgtgcgctgggccgggtgcatgcggggcggcgcacgccgcatgtggccatcgccactttgctgctcatcgtgacggccctgatgctgtcgggcgatatcgcgcaactggcctcggccacggtgctgctgctgctggcggtgttcaccatcatcaacatcgccctgctgatcctgcagcgccgcccgacagaggcgaagggcgtgttcgaggtgccgtccttcgtgcccgtcggcggggcgatgatctgcgccctgctgttcgtcaaccggctgacaacgggcgactggaaggccccggcgctggccgtgggcatgctggccgggattgttgtgctgtacctgatcatgcggcccaaatgtgtggacaatctggacaatgcagatgaggtgacggtggattaagaccgcctcccctaccccatcgcctgggtgcgcaggtcggtgcggaaacgctgcaaatcgtcgatgcgctgatagggcagaacggtttgcaggttctccgccggctcgccgcccagcagggccagcatgtggcgggccagttcctcaccatcgcggcgctgcggctgataataataggtgacgccctgttcgaacggcatgcggaagggcatgccgccgaaaccgacgatgcgcagtccgccctgcgccgggtcccgtccctgttcctgggccgcatccatggcaccgaacatggaaagctgattggcgcagatgatggctgtcacgctgctgtcgcgcgccagaaggtcgcttaccgccgcctgactggcccagaccgacaggggggaggtcaccagcagcgacctgtcccagggcagacccaaatcggccagggcgcgctgatacccccgcagccggaaaccagcataggtcatgccgccggtgggattgaacagggcgatgcgtttatgcccgtctgccgccagccgggtcacggcatcatagaccccgccttcatcatcatgatcgacaaaggcgtgggcgctgtgcagttcggtgcgcccgaaactgacgaacggaaacttgaattccagacagaagcgcgctcgttcatccatgggggtggtgcgggaaaagatgatgccgtcggccagacgctgctgaaacacccggcgtacggtttccaacggcgactggctggccgtttgcgccaggacgatcaagttgtaactgtcggtctcaagcgtacgcgacacgccctccacctgtgccaggaagccggcatcgccgtaatccgcgacttcaggagcaaagaagaccgaacagatcttcatggtgcgcccggtgcgcagatagacgccgccggcatcgggcagatagcccatttccgccgccgcctgtttcacccgcgccaccgtatccggcttcacctccggcccgtccttcaaggcccgcgacacggtcgtgatcgacaggcccagatgttcggccaaggttttcagattgatgcgcggaggggatggcatggcggtcggtcaggtcacctttgaaagtggcagagagtaagatcaatcacccgccatgggcactgcattctcatgcatcacgcggcgcatgaaatcgaacgatgcctttggcgtgcgtttcagcgtctggtaatcgacatgcacgaggccgaaacgcttgttgtacccgtgcgcccattcgaaattgtccagcagtgaccagggcatatagcccctgatatccgccccttccgaaatcgcccggtgcatgccggccagatagtcctggtaataggcgatgcggtcctggtcatcgatgcggccatcggggccgggaatatccaggaaggcggcgccgttctctgtcacgaagacggggggattgccataatcgcggcgcaaaccgtccagcgcctgatagaaggcgtggccatcgatgccccagttcatctccgtccggcgcagatatttcggcggctccacaatcttgaacggccaggccgccccgtccaccggcgacaggtatgtggggaaataatggttcaccccctggtaatccacgggccgatggatctcatccatatcgcccgcctttatatgcggggcgaaccggtccagcacactgtcgggatagcggcccagatggacggggcccaggaaaaccccgttccacttatcctcaaacaatttcaccagatgcgcgtcacggtcggcaaattgcggcagggggcggcccgtatggaccggcaggacgaaaccgacgggaacgccgggcgccagatcacgcaccaatcccaccgcccgtccatgcgccaggttcaggtgatgggccacgcgcacagcggcgcgcgggtcggtcaggccgggggcgtgccgcccctcctcattcccgacccaggcgcagaccgatggttcgttgaaggtgacccaggttttcgcccggtcgcccaggcggcgcaccatcagcgcggcatagtcggcaaaccatgcggcactgtcgcggttgacccagccgccccggtcctgcaacgcctgcggcaggtcccaatgatagaggcagggccagggttccagcccgcgttccagcatgccatcgaccagccggtcatagaaatccagacccttctggttggtcgcccccgtcccgtccggcaatacccggccccacatgatggagaaccggtattgctgcgcgcccaggtcccggatcaggtccagatcttcggcccagcggtgataatggtcgcaggcgacggtgccggtgtcgccattggttacgcggccaggggtggcgcaataggtgtcccagatgctgggtccacgcccgtcatcgggcgccccgccttcgatctgatagctggaggtggagacaccccacttgaacccatccgggaaacgcatgattggattctttcgccgctgaaagggagatggtcaaaatcgtaacgtttcgaaaaatgcaggtccagtagaaatcacggccttaccctagttatccatatttgacattcgcggttccgcgtccatacttccaggaaatcgaaacgttttggattgtgcgacgcgatgaaggtcagggccaaatcatgctgcgtcgccgcaaaagttgcgg

SEQ ID NO: 3080 - DNA, 23270 bp, synthetic construct
  misc_feature 1..23270: note = Synthetic
  source 1..23270: mol_type = other DNA
cacaatcgacagatgatgttctcaggcaagtttacttatcgcattgaaacggagccgtccgtcctggagctccacctctcggccatccgagccattggtgatgcagagaaggatgcgctcggcttcatcccggaagggggcctgcgcgaggccatctaccgaaggcgcctgtttgccatggtcgctcgggacggggagactttagaaattgccggctatatcttgttcggcggagtgtttcctagcgctcgtgttttgcagattgccgtctcgccaagtcatcgtcgaagcggggtcgcgtcggcactaatcagctctctcgtgacctacctggagaaacgaggatacatcgatttgacagcggccattgcgtccaacttgccggacgcgcaagcattctacgagcgaaatggctttatcgagcgacgcacacgcgccggtggacaggctcgtcagagaaccatcattgtccgtgcacgtaatctcgatacaaaaagcctgctttcgctgatgagcccctcgaacgtcatgtcttcttctgtcgcggatctgggactacgtcatcccagcgcctttgaggctccgctgtatgtgttcgatctgaacgttctgttcgatctcatccgcgatcgtgcgcgttcagaccttgcaaatcacctttttagtgctgcgctttcacacatggttcgtctagcggtagcgcctgagttcattgtcgagttggagcggtcatcacgcggcgaagccgccgaccccacattgagtttggcgcggcaacttccacggctgccgagcttcccgaaaatcgaagtcgacaccctcgccgcggatattcatcgggtcgtgttcgaggacaagaagcggtcgcaggcaggccgcccccaagcgttgagtgacgcgcgtcatctggccgaggcggctctgtctcgcgctgtcggctacatcacaagcgacgaagcgttgttgaactcgcgcgatgagattctcgagatgatcggcgtggatgtcgcagggctcgatgaatttgtccacctgctcccgacgccggagtcgaacgtctggcgcaaccagcttcaggggacagaatgtgagactaaatcggcttcgatcccggacgccaagcgttacctggtctctcagcaagtcagcgaagaggtcatccgggagttctgcccaagcacctcatctctctcacgtcctcgaacaatgggtgtgtttgagaatggcgagatcgtcggcctgagcatttaccaaatgccgccaagtgtgaatgcgactggcaagctcctggttcatgtgcggcctgatcacgtcgtgcacggcacattcgtcgaacacctgctcgatgatgcgctctatgaggcctgcacttcgggcccgataacgatcgagttgaaatgtggacctggtcagtcggccacgaagcgcacagcccagctccgaggatttttacccacaaacctgccagagagattcattaagattgccatgggcaggccattaacacccgccacttgggataatatcattcgacagacgcgacgtcggacaggactggagcttcctgattatcctcgtgacacttccaccctcgaattcggcgtgctggttcgacgtcccgacgggaccacgacgaaagtctctctgtcttccctggaagacgcactctcgccaacgttgatcatctggccgagccgcgacggagttatcgcgccaatcacaaagacgtatgcagacgacctcctcggaacggccgagcagttccctctattcggtcgaccacgcgcggcattcgttggttctcggacctactttaacagtccccgcacaatggcgttgatgcggccgggtgcgccgatcctcttctacgaatcgtggaggtcaggaggacgggccgccattgttgcggccggccgcatcgttgacgcagttgtcatactgaagtctcaggtacctgacgatttgcgccaaagggcagttgtcgaggacctcgagccgctgactgcctcgtccgacgttctagcaacaacattcgacaatttaattcggtttccgactcccgttcgcctcgatacactgcgagcactcggcgccgaggggacgtcgaacctgcaaagaacaactgcactgccgaatgctcttttggcagctattcttgatcttgggtggtccggtgcctgacgaatgcgacgcaatcatctcgattcgtccgaattttgcggatgcgatcttgaatggtactaaaacgatcgagctgcgtcggcgtattcctcagatagcgaacggttcgcgcctttggatttatgctacccgccccaccgcagcagtcgtcggtgttgtaaccatcacggatgtggatcgagcgcatccaagtgagatatggcaaagacacaagtatgaagttggtttggatcacgcctcattcaaagagtacttccacggtgctcaggaagcggtagccatatcattggaggcggctgagcgtgttgaaccaatttccatgagcaaactgcgaaagatccgagaccgtttccatccacctcaggtgctcgttcggctgacggattccgaagcaagggcattgcaaaaattggccaagagatgagtccgagaattccgattaaggaacgagcccgcggaggccccaaggtttttgcgctctacggaaagtgcaacaaggacgagttcacgctgttcgtcacgttcggaattctcggggcaggccgaaaacttcgccggcagcaaagctactctccacctcgtttattgggagcaatccacgctggctgggtcacacttggaaagcgccgtaacccatcatttgcatccgacggatgggttacggcacttcgcgcctaacccaccctacagccgccctgcccccctcctgatcagctccgcaatcccggcgcctcgtggccggtgcgggcgacgtattcggtgtagccgccgccgtactggtggatgccgtccggggtgagctccagcacgcggttcgacagcgcggctagaaaatgccggtcgtgcgagacgaacagcatggtgccctcgtattgcgagagtgcaccgatcagcatttccttggtcgccatgtcgagatgattggtcggctcgtccagcaccagaaaattcggcgggtcgtagagcatcagcgccatcaccaggcgcgccttctcgccgccggacagcacgcggcagcgcttttccacgtcgtcgccggaaaagccgaagcagccggcgagcgcgcgcagcgagccctggccggcctgcgggaacgcgtcctcgagctgctcgaacacggtgcgctcgccgtcgagaaggtccatggcgtgctgggcgaaatagcccatcttgacgctgccgccgaccgccacgctgccgtcgtcgggctcggccgcgccggcgaccagcttcagcaatgtcgacttgccggcgccgttgacgcccatgacgcaccagcgctcgcgccgccgcacactgaagtcgagcccttcgtagatgcgcttgctgccgtagcgcttgtggacgtctttgagactcaccacgtcctcgccggagcgcggcgccggcggaaagtcgaacaccacggtctggcggcggcgcggcggctccaccttctcgatcttgtcgagcttcttcacccggctctgaacctgggccgcgtgcgaggcgcgcgccttgaaacgctcgatgaaggcgatctccttggccagcatcgcctgctggcgctcgaactgggcctgctgctgcttctcggcgagcgcgcgctggccttcgtagaactcgtaatcgcccgaataggtggtcagcgtgccgccgtcgatctcgaccaccttgccgacgatgcggttcatgaactcgcggtcgtgcgaggtcatcatcaggccgccctcgtagcccttgaggaacgcctccagccagatcaggctctcgagatcgagatggttgctcggctcgtcgagcagcatggcgtcggggcgcatgaggagaatacgggcgagcgcgacccgcatcttccagccgcccgacagcttgccgacgtcgccgtccatcatctcctggctgaagccgaggccggccagaacctcgcgggcccgcccctcgagggcgtagccgtccagctcctcgaagcggtgctgcacctcgccgtagcgctcgatgatctcgtccatctcgtcggcccggtccgggtccgccatggcgtgctcgagctccgcgagctcggccgcgacggcggccaccgggccggccccgtccatcacctcggcgacggcgctgcggcccgccatctcgccgacgtcctggctgaaatagccgatggtgacgccgcgatcgaccgagacctggccctcgtcgggctgctcctcgcccgtgatcatgcggaacagcgtcgtcttgccggacccgttggggccgaccaggccgaccttctcgccgcgctggagcgccgcggaggcctcgatgaacaggagctggtggccgttctgcttggagatggtgtcgagacgaatcatgggagcgcgggaaccttgagcacgagtaggatctggagcacgagagaagccggaagacgggtttgcggcgcccttatgccatgccgcgccggcgcgggcgcgttttccggcggcctgcttgccggcggcccggttgcaggttttgccggccgttgatatctatcattggtagataccaagggaggcgccgatggccgaggcgcgcgcgaagctgttcatgcacgggcgcagccaggcggtgcggctgcccaaggaattccgcatgcccggcaaggaggtgcgggtccgcaaggtcggccgcaccgtggtgctggagccgctggagggggagttcgacgtcgaggcgtggtgggcaaagctcgacgagtatcgagatatcccgttcatgccggaaggacgcgagcagccgccgatgccggtcgacaaccgcaaatacttcgacgacgacgatgactctgcggacaagtagccgccgagcgatcatacggcgggtcgcatgatttgcctcgacaccaacacgatcatcgtcgccctgaacgatccgacgtctcgggcgcggctgcgcatcaatgccgccatcgcgtccgcgtcgccggtgttgatttcggtcatcgtcctgttcgaattgcgcttcggcatcgctaagagcacgcgccgcgactacaattcccgacggctcgacgacttcctcgacggccccttcgacgtgctgccgttcgacgccgaggacgcggccgaggcgggcgacatccgcgcgaccttggaaaaggccggcatgccgatcggcccctatgatctcctgatcgccgcccaggcgcgccgccgcgacgccctcctggtcacggccaattcgcgcgagttcgcccgggtgcccggcctgcgcagcgaggactggtcgctgccggcgtgaatccggccggcctcaacccgcctcgtcctccgccgccacgggcggccgctccccgaaaatcgcggtgccgatgcgcacatgggtggcgccgaagcggatcgccacggcgaagtcgtcgctcatgcccatcgacaggagatcgaggccgttgcgccgggcgatcttggccgccagggcgaaatgcggcgccggcgcctcgtcggccggcgggatgcacatcaggccgccgatggtcagatcccagcggtcgcggcaggcggccaggaaggcgtcggcctcctcgggcagcacgccggccttttggggctcggcgccggtgttgacctcaacgagcagcagcggttgccggccggcgcgctgcacctccttggcgagcgccgtcgcaaggctcggccggtcgaccgagtggatggcgtcgaacagcgccaccgcctcgcgcgccttgttggactgcagcggcccgatcatgtgcagggcgacgccggggtgcttttcgcgcagggccgtccacttggccttggcctcctgcacccggttctcgccgaaggcgcgctggccggccgcgatcgcggcctcgatgccggccgccggcacggtcttgctgaccgccaccagcgtcacggcgccggggtcgcgggcggcctcgcggcaggccgcgtcgatctcgcggcgcaccgcggccagccgcgccgccgccgacgcgccgggcgcgccgggcgcgccggcgcgttctgctgcaggcacaacgggatgcgggtcgaaattcgtcatgtcggaatcgctcgatttttatcgattgcctgaaggccgttttcaccccgcccggctaccatcgttctggggaatgggacacgtcgcatgccggacaaaccgcagcggagtcttagcacgcgtcggcgcatcaagccgaggctgagcatccgtgcgcgcctgatgctgctggcgctgctcgccgtggtgccgctggtcgtcgaccgcgtccacctgaccgagaccagccgcgtcgagcgggtgcagatcgcctataccgaggtggtgacgctcgcccgccgggcccgcgacgcccaggtcgagacgatcgatgcgacgcgggcgctgctgcaggtggtggcgcgcgcctatatcgcgtccagtgccaccaccggcgactgcgccaccttcctgtggggcttcgtctccgacgcgccgtggatcaccagcctgtcggtggtcggcgccgacgggcggatcgcctgctcgacccgccgccaggcgatcgggctcgatctgtccgatcgcgactacatcaaggaggtgcagcgcacccaccattacgtgctcagcgattatctgctcgagcgctcctacgagaagtcgaccgtgctgatggcgtttccgattcagcgcccggactcgaccgagacggccgtgctgctggcgcccgtcgacctccactggctcgcccgcatcggcgaaggcgtcgaaagccgctccggcaccgccgcctatctgatcgacggcaaaggcacggtgctggccgggctgcagagtcgccagcggctggtcggcaagcgctacggggaccacccgctggtgcgggccgtgcaggcgcagccgaacggcaccgcgacgatcgaaggcttcgacggggtgcgccgcatcttcggcttcacccagctccccggcaccgacgcccgcatcgtggtcggcttcgaggagcgcgacgtgctgagcaagatcgaccgcgagtccggcatcgcctatctgcacgtcgccttcttcggcctgttgaccatgatggcggcctggctggtcggcgagcacctgatcgtcgagccgatccgggcgctggcccgcacggcgacccgcatcggccagggcgatctcgaggtgcgggccgagccggagagctgggcgccggagttcgtgccgctcgccaccgcgctggccgacatggccggccggctcgccgcccgcgagcacgagctgcgctccgccaacgagcatctcgaggagctcgcctcgatcgacgcgctgtccgggctcgccaaccggcgcagcttcgatgcgcggctcgcctccgaatggcagcaggcggcggcgagcggccacacgatcgggctgctgatgatcgacgtcgatcatttcaagctgttcaacgacggctatgggcacgtccagggcgacacctgcctgcgccagatcggccgcgtgctgaccggcgtgatcgacggcccgtccgacttcgcggcccgctacggcggcgaggagttcgtgctgctgctgcccggcgccgacgtcgcccgcgcggtcgagctggccgagcggctgcgcctcgccgtgatggcgctgcgcatccgcaacgaggccgcgccgtccggcttcatcaccgtgagcgtcggcgtcacggcccatgtgccggcgaagggcgcacggccgcgcgcgctggtcgaggcggccgacggcgccctctacgccgccaagcgtcgcggccgcaacaccaccgtgatcgaccgcgacgtccccctggccgaggccgggtgatcagtcgcggcgacgcgcctcgaaatagagccgtctcagcgtctcttcgccgatcacgtcggcgagagcccggaacgcgaaatacggaaagaacgtcaggaacatgagagccgtcgtggcgatcaccagatggagcgtgccgccgccgatctcggcgacaccgtcccacagcggtttgccatgcaccagcgcaagtgtcgcttcctcgatcaccgtcaggacgccgacgagcacgagaaatatgacggtgcgatagagcgtcggaacaatgaggggacgctttccgtagccgtcgccgatgtggagggcgcgtccgaccagcatgaacttcgccgtgacgagcgccttcacggccgcgaaggcccacggtgcgaacgcgatcccttccgcctggaggatcgcagccttgtaatagacgagggccgcgaaccagacatagaggtaggcggccagaatgccgaactcgcggagctcacggacgaggcgttcgaaaggggagcgtttcgcaacagtcgattcgtcgtgcatcggatctctcgaatgcctgacggagccggatcaccatcaccgccgcgatcgctgttcgccgtgtatgggaaccattctctgtctcttcgcagctcgggagcgcttcgcccgtcctgcgccctcgtcgtcgtgtgaaggcctcaacgcgtcgcgcccgcgcgccatgccttgacggcttcgagcgatttttgaatgtgggccgccgctccggagtccttgaccgacgacaagatcgtcccatccggcgcaatcacatacgacacacgatcggccaaaggcagattgacgacccccaacccgaaggccgcatcatagtccttgatcactttcagatccggatcagcgcccacggggaacttgtcacggcattcgagcgaggagaattttcgctgtgtctcgatggtgtcggctgaaatcccgatgacgctggcgccgttcgcggcgaactcgtcgatcgcttctgcaaagagatgcgcttcctccgtacacacgctggtgaacgacttgggataaaaatagagaacgaccggtcccttcgcgagggcgtcggcgagcggaaactgaaaggatcgaccggcgagagcggcttcgatcgtgaacgtgggcgcccgtgcgccgacctgtagtcgagccagcgccggggagaccgccagcaccagagaagcggcgagaacgagcttggctacgcgcagcatgtgaccctttcgtccataccatggtccgtgatgctctccgggtccacgccgagtgtcaaccgcccggcgccgccatgcatcccgggtccactccacgtcctcggccctcggtggtcgaccaaattccgatggtcccgatcgcggcgcacaagctcgcgagagccgtcattcgatatgaacaagtccatcaaggactggactcgcaatctgacccagtcgagcgcaccgccgagggccgcggtggcgtggccgttccgggcgagtttttcgatttacggcgacggtcgatttgcgctgaccggcgagatcgacggcccgtcggttgtcgccgcccgcgacggcggcgaggcgttcgtgctgctgcggcccggcgccgacctcacccgcgccgtcgacatcgccgaacggctgcggcttgccgcgatggcgctgcgcatccgcaacgaggccgcgccgaccggcttcatcaccgtcagcgtcggcgtcacggcccatgtgccggcgaagggcacgaggccgcgcgggcgggtcgaggccgccgacggcgccctctacgccgccaagcgtcgcggccgcaacaccaccgtggccgaggccgggtgagggcgacgcagccggtgaattctcctgcgcctcgacgcgaaccgggctttcatatcggcaacagacgccagcacgcaaaaaaggcggcgccggagcgccgcccttatctggtgcagactggctgcttgttaaccgccagaccacgatctctgaagccataagaataactattgatatttacgcgtcaaggcttttctattttgtctggtatccgcgagggcgttgctatgccgtggcgacttgggctggacctcggatcggggtcgctaggatggtgtgctcttgctctcgatcaatccggagcgcccgtccaaatcctcggcgctggatcgcgaatcttcggcgatggccgcgcgcccagccggggaaatctgcaaggcacacccctcgctgtagaacgccgcgccgcacgcgccatgcgtcgccggcgggatcgtttcaagcggcggcaggccgcattgctcaagtaccttaatcttgacggcttgttgccagaagacccgaccgagcgtaacgccgtggagcgcctcgatccgttcgcattgagggcacgggccctcgatgaagctctgccgctccatcagatcggccgggccatttttcatctcaaccagcgccgcggtttcaagtcgaaccgcaagacggatcgcggtcgtgacgacgacgtcggcaagatcgcgatcggaatcgatcgactgcgagagaagatcgaagaaaccggggcacgaacattcggcgaacttctccatctccgacgcgccggtgcgagcgaccccaactctattccatcggtccgctcccgattgcgtccggaacccgatgacgccagaaccggcgatggttacgatttctatccgggtcgagacctaatcaccgaggaattcgaagcgatttggagcgcacaggcacgccatcatcccgaacaacttacgccggaggttcatgatcggctgttcgagatcgtgtttcatcaacgaccgctgaaaaggccaaaggtcggaagctgcacgctcgtttcgggcgaatgccggttgccccgtgcgcatccgctctttcaacatcggcggctgctcgaagaggtaaatgcactgaccatcgtacatccaggcgaggcccccgtccgtttgacgatggaacaacgcaatgctctccttctgagactgaaggtcagcaacaaggtcagctttgaaagtctacgaaaacttctaaaaatcgacccagacgctcgcttcaacaaggagacactgaaccgcaaggagctcaagggaaacgaggtggccgccgaactgagcgcaaaggctcggttcggcaagagatggtttcacctttcccacgaagagcagtgggcgatcatctcccgcctcctggaggaggagcaggactctgtgctccaccagtggctcgtggatagttgggaattgaccgacgatcaggccaaggccgtggcgaaagccaggttgccgcaaggatatggccggttcggccacacggcgacgatcaagctgatcgcggccctcgaagccgacgtcgttgtctacagccaagctgtcgaagcagcggggctcggacaccacagcgacctgcgcaccggcgcgtcgtttctcaagctgccttattacggcgtcacgctcgaacgccacctcttgcccggcacggcggagccgtcggatccggaggaaatgcggatcggccggctcaccaatccgacggttcacatcgccctcaatcagctccgccgggtcgtcaaccgtctgatccggcgctacggcatgccggcggaaattgccgtcgagatcgcacgcgatctcaaatccaccgatgacgacagaaagcggtttgaacgagagaatcgcgccaatcggctcgcggcagagagccggtcacggaagctccgcgagatcggccagcgcgacaccggtgccaaccggcagctcctcaagttgtgggaggagttgaacgcggaaaacagtctcgaccgccgatgcatctattcgggtcgccagatatcggtcgacatgctgttcaacgggacgaccgaggtcgatcacattctgccgttcgaagagacatgggacgacagcaacgcgaacaagaccctctgcctccgggaggcgaatcgcgcgaagggaaagcggtcgccccacgacgccttcggtcataccgcggattgggatgcgatatcggcccgcgctgcgcgccttccggatggaaagcgatggagattccaaccggacgcgatgcggagattcgatctcgagggcggattcctggcccgccatctggtcgacacgcagtatctctcacgcctcgcacatctctacttgtcggctctctattccgagcgcggcgagggttccggacacgtgtgggtctcgcccgggcggctcaccgagctggttcgccgcaagctgggcctcaacgacctcttgcccgatcacaacgtcaagactgcagcggagcactcgaagaaccgcctcgaccatcgtcatcacgcgatcgatgcggccgtcgtcgcgatcgtggaccgccgaatgcttcaggcgatttcccgtgcctccggacaggagggtgccgagggttccgcgcggatccggataccgaacccatgggacggcttccgagacgaactgcggcgcacggtcaacgatatcgtcgtctcccatcgcgccgatcatgggctgaagccgaaagccgctctgaagcaaatgccgccaccccacagcacggccgggcgactgcacaacgacacggcctacggcatcaccgaagcgatcgacgagaatggcaacaccgtcgtggttcaccggatcccgctgatcgcgctcaagcccgcggatgtcgagaccggcggaaaacgccgcgtcgcagacgatacgttgcgcaccgcgctggccgacttcacgcgcggcaaggatttcgatcggaccttgaaggactttccgaaactcggtccgttgcattttcgcggaatccgcagggtacgggtgctggagccgctgacggtgattccgatacgggacgagaagggccgtgtgtacaaaggctacaagggcgactcgaactatcgctacgacgtgtgggaattgaaggacgggaaatgggagcacgaggtcgtctcgatgttcgatattcaccaacccggatggtcgtcgcgcatccgtgacgccaatcccacggcgcggaaggtgctgagccttcatcagagcgatctcgtcgccatcgagcccgagggcggggagcgcaagctgatgcgcgtcgtgaaattcgggcagaacggtcagatcacgctggcggaaccacacgagagcggagatttgaagcgacgcgacgccgttccggtggaggaagacccgttcaagtacatcgctccgacggcgggaggcctgaagaagttgaggacacgccaggttcgcatcgacgaggtcggccgggttttcgatcccggattcccggcccgcaagcgccgtggcacgttcagccctgctcccgagcggtgactcggcgcgacaatggaccgtatcgtcgatatcgcgactgacggacgccatctttccgcgtatcggggtttcctgatcgttgcggaggatggacaggaggtcggtcgggtgccgctcgacgacgtcgccggggtgatcgtccatgcgcacggcgtgacctggacgaccaatctcgcggtggcgctcgcgcagcgcggggctcctctccttttgtgtggctccaatcatgcgccagttgccgtttgcctccccatcgacggtcatcacgaggtgaacggccgtatcagagcccaatgggaagcgggcaagccgctgtctaagcagctctggaagcgtgtcgtcgtggcgaagatccgatggcaggccgccgtgctggaggcgcagggacactcggcggcagcgttcgagactctggcccgcaaagtcggatcgggagatccggcgaatgtcgaggctcaagcagcccgacgatattggccgctgctgatgggaagcggattccgtcgggacagggctgcgggcggcgcgaacgcgatgctgaattacggctatacggttctgcgctcgttgtgtgctcgggccgttgtcgcggcaggccttcacccggcgatcggcattcaccacgcgaatcgaggcaacgccctcgcgctcgcggacgatctgatggagccgtttcgtcccctcacggacgccttggtggtccggcttctggcgagaggagtcgattccctgacgcccgcgagcaagcgtgctttcgcaggactcgtcgcgctcgaccttccaggcgataccggaacgaccactgtctcggggatcgcgacacgctcggcgcaaactctggccgcttgcttccagaccgggcgcgcggccgatctgatccttcctgtgcctccgtccgcgctggaaatcgccgggttggacggcttgttgcaatgacggccactcagctcagcggataccggctcatgtggatattcgtcatgttcgatctccccatcggatctcgggagcagtcgcgcgctgcgaccaagttcagggaatttcttctcgaccaagggttcgagaaaagccaattctccgtatacgcccgcttctgcaacgggaaagaacagttcgagacctatatgcgccgtatcgaagccaatcttccgaatcgcggggacgttcacgttttgagctttacggaccgccagtatgaaaatattgtccgattctctggacagcgtcgcaaacaccaacaaaaaaaccctgatcaactcgctttgttctgatcgacgactgattttttggatggagacatgaccgattatcccgctcttttcaacgagataaccgatcatggaggatagccgctcagagatcgtggtccagcggcaacgatgccggctgggcaggcggcgcgcggccaggatagccgctcagagatcgtggtccagcggcaacaaggcgaagcgcgccaagcccgtgaagctcaggatagccgctcagagatcgtggtccagcggcaacgatgggcggctcggcgtggcgtcgcagggcaggatagccgctcagagatcgtggtccagcggcaacaccgagcccgagcggatcgccttcaccagcaggatagccgctcagagatcgtggtccagcggcaactctgtgttgatttggatgatgcgcagcgtcaggatagccgctcagagatcgtggtccagcggcaacgagcgcgaggacatcgacgacgatcacttcaggatagccgctcagagatcgtggtccagcggcaacttgcgggcgaagccggtgtcgggatcgtcgaggatagccgctcagagatcgtggtccagcggcaacaagacgaacaagccgtaaatgctttttcagaggatagccgctcagagatcgtggtccagcggcaacgcgcttccgccccgcctgatgccagtcgctaggatagccgctcagagatcgtggtccagcggcaacatattggtcgaggcggtgcagtggaccggcaggatagccgctcagagatcgtggtccagcggcaaccgctggccccacatcggcacctcgccgataaggatagccgctcagagatcgtggtccagcggcaacgtcccgtgtcgtgatgagtcgggagatgttaggatagccgctcagagatcgtggtccagcggcaactggcgtcgagcacccgagtcatcgccggcgaggatagccgctcagagatcgtggtccagcggcaactaaccgatgcgggacgccatctcgacgaagaggatagccgctcagagatcgtggtccagcggcaacggcacctcgatcgtcgtcttcgcggccggtaggatagccgctcagagatcgtggtccagcggcaacggcttgtgcaggatggtgtcggccgtggcgaggatagccgctcagagatcgtggtccagcggcaacgcagcgagcggcgcaccgtccttgccgggcaggatagccgctcagagatcgtggtccagcggcaacaaggggcacccggacgtgacgcgggtcgagaggatagccgctcagagatcgtggtccagcggcaacggggcctggtccggagagaagtttcgactgaggatagccgctcagagatcgtggtccagcggcaacggaacagatcaccgcggaaggcacgagaaaaggatagccgctcagagatcgtggtccagcggcaacggctttgcccgtcagggtgttgaagacttcaggatagccgctcagagatcgtggtccagcggcaactgcgattgagcactggacgtgcgccgggagaggatagccgctcagagatcgtggtccagcggcaacatcaccgacacccccctgtcagaacgcctgaggatagccgctcagagatcgtggtccagcggcaacctggtcaccgagcaccaaggggccgcgcgcaggatagccgctcagagatcgtggtccagcggcaacgagatcgtgaacgacgccgcggcgtacgagaggatagccgctcagagatcgtggtccagcggcaactcgatgctggaacggtatgtcgggccgcagaggatagccgctcagagatcgtggtccagcggcaactgatgccggcgccgctcgatctgccggcccaggatagccgctcagagatcgtggtccagcggcaactgggagacggcgctcgccgtccaccgcgagaggatagccgctcagagatcgtggtccagcggcaactcatggaggggctctatctcagcaatggcgaggatagccgctcagagatcgtggtccagcggcaactggggcgcgggcaccgaccccaacgcatagttgcaccgagaatccgggggcctccccccaaaagcgaatggccgaacccccggcccccgcccccgtgcggaatcgttgacccgggcgccgcaatgatgtccaacgggcgccgacaattcgctgcgagcgagccgaatctcatgactgcagaacgctataatgcccgcgtcaccgagccgcgctggcaggccgtgtgggacgagcgcgacatcttcgccgcccagaacgacgatccccggccgaaatactacgtgctggagatgttcccctacccgtcggggcgcatccacatgggccatgtgcgcaactacgcgatgggcgacgtggtggcccgctacaagcgggccaagggcttcaaggttctgcatccgatgggctgggacgccttcggcatgccggccgagaacgccgccatggccaacaaggtccacccgcgcgaatggacctacgccaacatcgcctcgatgaaggcgcagctcaagtcgatgggcctgtcgctcgactggggccgcgaggtcgccacctgcgacccgtcctactacaagcaccagcagcggatgttcctggacttcgtcgcggccgggctggtcgagcgcaagcagtccaaggtcaactgggatccggtcgaccacaccgtgctggccaacgagcaggtgatcgacggacgcggctggcgttcgggcgcactggtcgagcagcgcgagctgacccagtggttcttcaagatcaccaagttctccgaggagctcttgagcgcgctcgatacgctcgaccgctggccggaaaaggtccggctgatgcagaagaactggatcggccgctccgaaggtctgcatgtgcgtttcgccctcgacccggcgacgacgccggccggcgagaccgagctggagatcttcaccacccggcacgacacgctgttcggcgccaagttcatgggcctgtcgcccgaccatccgctcgcccaggcggcagcggccaaaaacccggcgctcgcggcgttcatccaggagtgcaagaagatcggcaccgcccaagaggcgatcgacaaagccgaaaagctcggcttcgacaccgggatccgggccatccatccgttcgacccgacctggcggctgcccgtctatgtggcgaacttcgtgctgatggactacggcaccggcgccatcttcggctgcccggcgcacgaccagcgcgacctcgacttcgtcaacaagtacgggctcggcaacaccccggtggtgtgcccggagggccaggacccgaagaccttcgtgatcacggacgaggcctatgtgggcgacggccggatgatcaactcgcgcttcttggacggcatgacgtttgcgcaggcgcaggccgaggtggcgaagcggctggaaaacgacatccgcggcaacgcgccggtcggccgccgcgaggtgatgtaccggctgcgcgactggggcatctcgcgccagcgctactggggctgcccgatcccggtgatccactgcaagagctgcggcatcgtgccggtgccggtcgccgacctgccggtgcggctgcccgacgacgtcgacttcgaccggcccggcaacccgctcgaccgtcacccgacctggaagcacgtcgcctgcccgcaatgcggagccgcggcgacgcgcgaaaccgacacgatggacaccttcgtcgactcgtcgtggtacttcgcccgcttcaccgatccgtggatcaccacggcgccgaccgaccgcgccgcggtcgattcctggctgccggtcgaccagtatatcggcggcatcgagcacgcgatcctgcacctcttgtactcgcgcttcttcacccgcgccatgaaggcgaccgggcatgtcggcatggacgagccgttcgccggcctgttcacgcagggcatggtggtgcacgagacctaccgcaagccggacggcacctttgccgcgccggccgaggtgacgatcgaaggaatgggcgaggcgcggcgcgcagtcctcaccggcaccgacatgcccgtagagatcgggcccattgaaaaaatgtcgaagtcgaagcgcaacaccgtcgatccggacgagatcatcgggtcctacggggccgacacggcgcgctggttcatgctgtcggattcgccgcccgagcgcgacgtgatctggaccgaggagggcgcccagggggcggcccgcttcgtccagcggctgtggcggctggtcggcgacgccgaggcggtggccgccaagggcgacctgccgcgcccggcgatgttcggcgaggccgccatcgcgctgcgcaaggccgcccatctggcgctgtcgcgggtgtcggaggatatcgaaaaactgcggttcaaccgctgcgtcgcccacatctacgagctcgccaacgcgttccagacgtcgctcggcgccgccggcaaggatccgccggccgattatcgctgggccgtgcgggaggcggccggcgtcctggtggtgctgttccacccgatgatgccgcatctggccgaggaatgctgggccacgctgggccagagcggcctggtggccgaggcggcctggcccgaggtcgagccggatctgctggtcgaggacaccgtcacgctgccggtccagatcaacggcaagaagcgaggtgatgtaacggtgccacgcaacgccggaaaagcggaggtggaggctgccgttctggccctggacgcggtacaaagggcgttgggcggagtagcccctaaaaaggtcatcgtcgtcccgcacaggatcgtcaatgtggtggcttgaccgtacgggactttctcgcccgacgcccgaccgggccgggccgcaccggcgtgccgtgctggcgcgcggcgcgcggagcctcgtcgtcctggcgctggcggcgccgctcgccggctgcttccagccgctctacggcagccggacgctcgacggcggtcccgccgtcaatgcatcgctcagccagatcgacgtcgcccagatcccggccggcaacagcacgccggaggcgcggatcgcggtcgagctgcgcaaccagctcgtgttcgggctgtcgggcggcaatccggctccgcccacccaccggctcgacatccgcatctccagcacccgcacgtcggtgatcgtcgacaccacgacggcgctggccaatgtcgagaactaccgcctcaccgcctccttcagtctggtcgacctgcagaccggcaagccggtggtcaccgacacggcgttcgggcaggtgtcctacgacattcccggccagcagcagcgcttcgcccgccagcgcgcgctgcgcgacgccgagaaccgcgccgccggcgtgatggccgagacgatccggaaccgcctcgcctcctatttcgtcgccggaacctgagccggggtcggtgcctcacggccgtcattccggggcgccgcgcagcggcgagcccggaatccatacacacagaccggggttatggattccgggctcgcgggcttgcagcccgcgccccggaatgacggagtggaggtgatcggcccgcggtgaacacccgttcggaagccctcgccatgaccgccctgaagggcccggagatcgacgcctatgtgagccggccggacgccagccggccgatcgccctcgtctacggccccgacgccgggctggtgcgcgagcgtgtcgaggcgctggtcaaggcctcggtcgacgatccggccgacccgttcgcgctggtgcggctcgacggcgatgcgatcgagccgggccggatcgccgaggaggcgcacacggtgccgctgttcggcggccgccgcgccgtgtggatcaaggccgggcgcagcaatctggccgccgctgtcgaggcgctcgccgccgatccgccgcgcgactgccgggtggtggtcgaggccggcgagttgcgcaaggattcggccctgcggctcgcctgcgaaaaggcccgcaacgccgtcgttctgccctgctatgtcgacggcgacgccgatctcggccggctggtcgaccaggagatgcgcgccgccggcctcaccatcgcggatgacgccaagaccctcgtggtgtcgctgctcggcggcgaccgccaggcctcgcgcggcgaactgcgaaagctcgccctctacggccacggccgcggccgcatcgaggccgacgacgtgctcgccgtcatcgccgacgcctcggcgctcgccctcgacgacgtgatcgacgccgcattcgccggcaagccggccgctttcgacagcgaatatgcgcgggcgcgcgccgccggcacgcatccggaccgtgtgatcacctcggcgctgcgccatgccgcccagcttcaccgcgccaaggtggcgatcgagtccggccgcagcgcgcaggacgcggtgcgggagggatttcgcgggctgttcttccgccgcgagccgaccgtgcggacggccctgaccgcctggacgacgccgcgcctcgcccaggcgatggccgacctcgccgaaacggcgaccgcagtgcgtcggcagaacgatctggccgatgccctcgcccaccgggcgctgttgagcctttccctgaaggcccggcagaagcggtgactggatgacgcacaacaagcactttcagcgtcgtcgccgggcttgacccggcgacccatcttttagcaacagaggtctttcgcgaattggatggatgcgcgggtcgagcccgcgcatgacgaagtcgggatcaagcgttccgatgcggggccgaattcccgttcacttgtagtatccgaccccgcaggcctggccgccgaccttgaccaggaaggtctccttggcgaccggctcggtacctcccggccgcgggaacttgtaatcgaccgaggtgacgaccccgtccttcggggccgcgaacagcttgtcgccgagcggcgagccgtccttctccttgagggcgcgcacgtcggtgcccatcagcgccttgttggggtgcgccgtccacatcccgctcccagcctcgaagcagaacacgtagaggtcgcggtcgcggaagccgccggccgcatcgttgaacttggcgagcgcatcggcctcgccggccttgagcgtgacggccgccttctcgaccagcgccttcgcctcggctgcagtgccgaagtcggcagcggaggccgccatcggcacggccacggccgcggccaaagcaagcgccgtcagagcgagcgcttctttcatgatttcctcccggatcaatggatgacaacgatcaatcgcgacgcgagcggaccggctcgggccggccaaatgcgcccgtcggaagtatgggtgtaggcgaggtggcgttgcaactttcttgcggtgtcccgggtgcggccgtttgtccgtcgcgaacgccggtatcttgatgtggctaatccatccccggattaaccgaccggtaggcagtaagcatcagtatacaacccatagacgcaacaggtgaccatccagacagggggaccgccatgacggcaatgccggcgacgggggacgatgtcgtgcggaccatcgcacggacggcaggcgtgctgtcggtcgagctcgccgacatcgccggcaacatcgccgacgtcgaccagaaggcccagagcctgacggccgagtgccggaccctgtcgggcgccgcgactgagctgaccagctcgaatcgccgcatcggcacggccgcggccgccgccgaccggaccatcgaggccgcctgcagcgagatggacgcctcctcccagtcggtcgcgacctcgctggccgagatcagtgcgctggccggcgcgaccgccggcttcgagagcaagctcgacggcctgcgcggcgccctcgaccgggtcgccaaggcggccggcgggatcgacgtcatcgcccggcagaccaacctcctggcgctcaacgccaccatcgaggcggcgcgcgccggcgaggccggcaagggcttcgccgtggtggcgagcgaggtgaaggcgctggccaagcagaccagcgaggcgaccgccgagatcgccgcgaccctggggctgctcgacacccagacgcgcggcctgatggccgagtcggccgagacggtcggacgcgccgccacggtgcaggccggcaccacggcgatccgccaggtgatcgaccatgtcggcccggcgatgacgcggatgcgcggcgacatgcggctgatcgtcgagtcgaacgtcgacatccaggcgcgctgtgacgccctgcaggccgccttcgaggcgatgaccgggcatgtggcgcgctcgtccgcggatctgcgctgcgccgaccagcgcgtccacggcctgctgacgcgcagcgaggagctggcgctgctgaccgcgcaggccggggtcgagaccgacgacacgcccttcgtcgccctggtcaccgagggcgcgggcgagattgcggcgatgctcgagcgcgcgctggcggcgggcgagacgtcgatgacggatctgttcgacgaaaagtacgtgccggtgccgggcagcgatccggcccaggtgacgacccgcttcacggcgctgtgcgaccggctgctgccgcccgtgcaggaggcgctgctcgggcgcaacccgcacatcgccttttgcgcggcggtcgaccgcaacggctacctgccgacccacaacaggaaattctcagctccgcagcggccgggcgagtccgcgtggaacaccgcgaactgccgcaaccgccgcatcttc

SEQ ID NO: 3081 - DNA, 23270 bp, synthetic construct
  source 1..23270: mol_type = other DNA
  misc_feature 1..23270: note = Synthetic
ggcattcgccagccatgcgggggcggccatcggcctgctcttctggggtgcggcggccttcgcgatcgttccgcccgtacagatgcgggtgatgcaggcggcctcggacgcgccggggctggcttcctccatcaatgtcggggccttcaacctcggcaacgcgctgggcgccgcgatcggcgcggcggtcatcggcatgggcctcggctatgcggccattccgatcgccggcggcctgctggcggttgcgggcttcggcatagtgctcatcggtggccgcgaaaaagcaccgcaactcgaaacatgcggagcctgaagcagtgcttcagcgcttcgcgcaaaccgagctgataggcagggccgggggaattttcagagggttgacgcgtgcttgatctttttcagcagtgggtttccacaacgtgacgtatgtgccttgcacgatctcgatcggaatgtcggttcccatgatcggccagcatgctgacccatggttgcaagatgacgcaattccgggaaaccgggggctgccgttagatggatgcttattgcacggtggcaatcgccgtgaatgtgtatccgacaccgtaaaccgccttgattggggccggcagttttgaatgaagctcgatcttgcggcgcaaacggctgacgacggcatcaaggtgccgattatcgaagctggacttggggcgtgtgagcatctccatcaacctttcgcgctggcatacctcgccgcagcatttgcataacacgttcatgaaggcgaattccgtcgcggtcagcttgagcgcatgctgattgggagcagtcagcgtccagctcgtgctgtccagtatccattggtcgtcgtggtcggtcgttgtgtgaggcgggttcccggttcgccgcagcaggctgcggatcgcggcctcgacctcgcgcaaggtgctgtccttgacgagatagatgtcggcgccgctctcgaagccgcggatgcggtcgtcgctatcgccgagcgccgtcagcatgatgatgccgcaggaatgcgaccgccggatttccccggcaaggtcgaagccgtttccgtccggcagcccgacgtcgaggatgacgaccgaaggcgcgttgtccccggcaaggacgcgccgcatgtcccgcgccgtcgcgacgcccgtcgtcttaaagtccttcagctccaggaagtcggccagatccgtgcgcagccggggttcgtcctcgacgatcaggacatgggtcaaaccattgcctcctctgccggccgggcctgccgggcggcgttcgccgacagcggcacgcgaacgatggccactgttccgtgcgggctctcggggcggccattgagccgaccgttgatgtggccgttgggccggctgttgggaacgagttgcaatgtgccgccgtgataggcgagcagccggcgtgccgtgtagagcccgaggccggtgccggcgaccgccttggcgttggaggcccggaagaagcgccggccgatccgaccgcgctcggcgtcggggatgcctatgccgtgatccctgacctcgaccatgaagaacccgtgggccttgccgacgtcgatgaagacgggcgcgccgtcgggcgaatatttgagggcgttgtcgatcaggttgatgatgacggtcgcgagcatgtcgggatcgacatgaaagcaaaccgcgtcgtcttccaccctgaagcgcaggcggtcgccatgggccgtcatatcgaaatgcagccgcacgtcggcgaccagcgcgccgatccgcgtcgcctgcggctgaaaaccgctttcgcgatcaaccgtcatgaagcggttgatgagggaaaacaggcggtcgagcgcctcgccgatgccggagagccgctcgcgtgtcgcttgcggggatctgtcgccgacaaggccgatcatttcgaccgcgttgcggatcaccgccagcggcgtgcggaattcatggctgacgacgcgcatgaaatccgcctgctcgtcgcgcagcgcccgctcggcttcgaggctttcgttcaactggctttccagccgccgccgttcctcgacttcccgcatcagcgcctcatttttctcccgcaggtcggccgacaaccgcgaactgaccatgaagagcatgcaggcaaagaaggcgatcaggaacagcgtgccttgcagcagataccaggcgttccggtcggcgagcacgggggcgctctggaagtcgaccggcagccggaattcgatgaggctctgggcgaggctggcgatcatgtattcggcgaggacggcgacggtgacccagcgcagcagcggcggctgcgtccggtcgcggacaaggccgaggcacatcaccgacatcatgaccacggtgaagaaagtcgaggtgtggatgcggatggcgaggttgccggggtcgaagacgacggcggcgctccaggtgacgacctggaagatcagcagagagataccgatccaggtgtagcgcggctgccccaggaagcgggcaaggccttcggcaagcagcacgagacccagcttgatgacagtgttgtgcaggatgacggccaaggcagcaggctcagcgccacgcacgatcatcaggagaaggccgacagctatggccgcgaaacctgccgccaggaatttgagttcgtagagatggctccacgcccgccacacgaatatccaggcgaccgcctgcaagctcgccgtcgccaacgcgacaaccagtacggttctgagatcaagcatccccgcgctttcacaccgggcccccagccacgaccccaagcagattcgaaaccgaattttgcaggtgttggacgggtgcgcaagcgttgccggctcttgcaagaattggtcagaattcagtggaattgatcggtggaatggccgcgcgtcccgacattacacttgtcgggacttgatgcggtggctctttccgcatggtggcgcgcgccgccatgcgcgcaaagggctggagggaagctggcctgcgaagccacgaggggcatcgccggcgagcttcgtgtcgcttgccgccgcattgccgcgggccatccgatggccggcacagacatgcgggggcctcatgccggtcgtctcgagacgcaaattccacccgcaggcgcgcacgctggcgcttctgtgctcgaccgcgctgagcggaactgtggcgattttctttatcgtatctggattgggcgtcgggacgggcgctgcgtcggcaggcgagttcgccgccaatgacgacgtcagcctgcggcaggcgattcaagacgcgaatgcggatatcgaccccacctcgacgatcacgctgacggacaatattacgctcgatcccgccacgctcccgaccatcagtcattcgataaccatcgataccggcggctttgccctcaaggcccaggatggcgatatcccaggcggagacgggcgcactgtgaccctccccttcgatccgggagggttgcagatgacggtcatcggagacgggcacattaacggcggcgatggcgccaatggcgccaatggtgtcgtgggggccgatggcggcgacggaggctggggcggtgatgggctgcatatcgacagccttcagtcactcgagattgccgacggtttcgtggagggcggtattgccggatggggcggtgccgcaggcgctggcggcaacggagggaatggcggcattggcggaaacggcatctggctgggttccggcgacctggtcaatgacggcacgatctacggccagatcgggagcattggcaccggaggcgtcattggcggcaacggcggcaacggcggaaatggcgtcgttctcggctccggcacgctgaccaacaacaacatcatcagtgccggaaccgccgccgccgccggcgccggcgacgatagtggcggcaacggtggcttgggtggcatcggtgtcgctctcgggtccggcgcactgatcaacaacggcacgatctacggcagcaccggcggtaccggcggtaccggcatcagcggcgatggcggcatcggtggcgcgggcggtgccggcgttactatcgacgatggtcagttgaccaaccgcgggacgataaccgggggcttgggcggcaatggcggcgatagccgcagcaccagcggcggcatcgctggtgctggcggcatgggcggcatgggcgtctttttcggcacggaaagccaaggcgtagtcgatgccgatgtgaccggcggcgcgggcggaaatggcgggaatggccgcggtgctgatagcagcgacgccttcggcggtgcgggtggcgcgggcatcgtgtttcggggcggcggttcgatcaacgttaacgccgccgtggccggcggtgacggaggcaagggtgggagtgcggatgtcgccctcggcggcgcgggcggggtcggcatcgaaggcgccggcctgacaattacgatgggtgcaaccggcagcgtttcgggtggtataggcgcgggcgcggccagcaacggctttgccgtgaatctcacaagcggttcgaatgttataagcttgtccggcgtaacatctcagatgacgggcggcatcaatgttgccgctggagatctcgaattcgtcacgagcggggatgcgacgatctccaacgtcatttcgggcggcggcagcctgctgttcgacagcgccggcagaaagctgaccttgacgggcatcaacacttacactgggggcacgcaacttcttggcggcacgctttccgtctcctctaacgccaatcttggcgatgcgtccggcgacctgaccttcggtggcggtacgctgcggaacacggcagccctggcgactgcacgtgacgtcacgctggacgcgggcggcggcacgttccaggccgatgccgacctggcgctgaacggtatgatctccggcgcaggcagcctgaccaaggctggaactggtgtactgacgctgtcgaacgccaacagctatgacggaggcaccacgatctcgcagggacagctcacggcggccgccaccggcgcgctcggcaccggcgccgtggacgtgaaggatggcgctgcgctcgccttcatcgacgacaacaccagcgccgggaacctcgccatcacgctgggcgatcactcgaccatacgcttcaacgatgcttcttcggcgggaacggcaacgatcgccaatacgcaaggctatatcaatttctacgatagcgccgccgccggaagcgcgacgatcgtgaacgatttcggcggaacctcgttcaatgcccactcgtccgcaggcaatgccgacattacggccaagaataacggaacgatcgacttctacgacactgccacggccggcaccgcaacgctcaccagcatggccgatggcttgatccggttccacggcgacactacggcggatgacgccaccgtcgtgggcaaagccggcgggttgatcgacatttccgacctgacctccagcggcatcggcatcggttcgctgtcgagcgacggcgaggtcgttctcggctcgaaagccctgacgctgggcgggctcggcaaggacgacaccatcggcggcaccatcgaggacggaacggacggcactggcggttcgctcatcaagacgggtacgggcacgctgacactgaacgggatgaacacctatacggggctgaccacgatcactgacggcaagctcgtggtcggtgacgccggccacgcgacggcgagcctcgccggcggcgtccgggtcaacaagggcggcacgctcggcggcatcggcaccgtcggatcgacgacggtcgcgtccggcggcacgatcgcgccgggcaattcgatcggcacgctgaccgtcaagggcgacatcgctttcgacgccggctcgacctatctggcagagatcaatccggcgcacggcggcgatctgatcgacgcctcaggcaaggcgacgatcgccggcggcaccgtccatgcgctcaaggcggccggaatctatacgccgggcagccgttggaccattgtcggcgctggcggcggagtgacgggaaccttcgatgcgctcgaccagaacatgcccttcgtcgacctcgcgctcgcctatgacgccaaccacgtctacatcgacgccgcgcgcaacggggtggccttttgcgacgtggcgatgaccttcaaccagtgctcgaccggcaacggcctggaaagcaccggcggcggcaatcccgtctatgacgcggtcgcagcccttcccgatgccgggagtgcccgtgtcgcgctcgatgcgctgtcgggcgagatatacgcctccgccaagtcggccttgatcgaggacagccatttcgtccgcgatgcggtgaacgaccgcatccgctcggccttcggcgatctgtctgcatccaccatgccggtcatggcttatggcgagggcggtcggcgtctcgtcgcgccggacagtgtcggcccggtcgcctggggccacgccttcggctcatggggctccttcgacggcgacggaaacgcggccgcgatggacaccgccaccggaggcttcctcgccggcatcgacggtgaggtcgcttcgggcgcccgcctcggcttcctcgccggctacagccattccaccttcgacgtcgacgcccgagcctcttccggctccagcgacaattaccatctcggcctctatgcgagcggcaggtgggatgcgctgcgcttgagcggaggccttgcctatacatggcacgacatcgagacgggccgttcggtcgcctttcccggtttccgcgacagcctgacgggagactatagcgccggcaccttccaggccttcggcgaggccggctataagatcggcataggcgcgacctccctcgagcccttcgccaatcttgcctatgtcaatctcaccacagacggcttcaccgaaaagggtggtgcagcggcgctgactgtccgtggcgagaccacagagactactttcaccacgctcgggcttcatctgtcttcggccttcgatctcggcggcatcaaggcgacggcgcgcggcacgctcggctggcgccatgccttcggcaacctgacgccgatctccacccatgcctttgccgccggcgacgctttcaccgtcgccggcgtgccgattgcaaaggacgcagcactcgtccaggccgggcttgatcttgacctcagcgagaccgcgaccctcggcttcgcctatcagggccagttcggcagcggcgtcacgcagaacgggttcaaggctgatctcagcgtcaggttctaggaagtgcggactcttgggaaatccctagcgtccacgcttcctggtcgttgtgccggcgacaaaggctcttgtgattgcaccaacgaaggtcattaggtgcctggacggctgccgtggtaagcggcttgcgaaacagagaccgcaatcatgacgccgaccgacgacgcagcatccctgccgaccaccatccatcctgccctggcttccgccctggcggcgaagggttacagccagttgacgccggtccagacggagatggccaacggcggccatggcgaggccgaccttctggtctcggcgcagaccggctcgggcaagacggttgccttcggcatcgcgatcgcctcgacgctgctcggcaacgcggaacaattcgaagcggcggggcgaccgctcgggctggtcatcgcgccgacacgcgaactggcgatccaggtgcggcgggaactcgactggctctacgcggcaacgcaaatcgagaccgcgacctgcgtcggcggcatggacatgcgcaaggagcgtcgtgcgctggagcgtggtgcgcatcttgtcgtcggtacgccgggacggttgcgtgaccacatcaccaagggcgcgttggaccttggcgtgattcgcgccgtggtgctggacgaagccgacgagatgcttgacctcggtttccgcgaggatctcgaattcatcctcggcgctgcaccggccgggcgccggacgctgctgttctcggcgacggtgccgcgcggcatcgcggaactggccgggaatttccagagggacgcggtgcgcatcacggcgaccgcttccaccgaacagcacgccgacatcgaataccagatgatgctggtgcggcgcgacgaacgcgaacatgccgtcatcaatgcgctactcgattccgacagcggcggcgcgctggtgttctgccatacgcgcgaggcggtgcggcacctgaccgcgcggctggccaaccgcggcttctccgtcgtctcattgtcgggcgagatggcacagtccgagcgatcaaacgccctgcaggccatgcgggacggccgcgcgcatgtctgtgtagcgaccgacgtcgcagcgcgcggcatcgacctgccgaatctcgacctggtgatccatgcggacgtaccgagcaaccccgcgacgctgctccaccgttcgggccggacgggacgagccggacgcaaggggatttgcgtgctcatcgtgcccgagcacaggcgcggcgccgcccagcgcgtgttggcactcgccaagctttcggccgctgtgcgggccgctcccggcatagccgagatcgaggcacgttaccgcaggcagatcctcgacactgcccttgcggccgccgaaccagacggagcggaagcgacgttcgtggctgaactgctcgcgacggcaacgccggagcgtatcgccgccaccttcctgcgccaacaactagcggcgcgaccgatgccggaggacctttctccgctgcctgtcgccgacatgcaggcgagaaagcccaaacgcgacaggcggaccgaaggcgagcacggcgcgccgccaacgcgcgaggcgcgcaagcccgatatggagggcggcgtctggttcacgctgtcgctcggtcgcaagcagcgcgccgacccgaagtggctgctgccgatgatctgcaaggccggcggcgtgtcgaagcgcgacgtcggctcaatcaggatcgacgacaccgaaacccgcttcgaggtcgccgccgacaaggcggccggtttcgccgagcagatcaagcgaccgggcggcatcgagcggggtatcgtcatcgagcctgccgcggaggggcgcaaggcatcgtggcgggcgaggccgaagttccgcaaagacggaaagctcgaccagaagccgttcaggaagccgcaccgcaagggcggttcggctgagcatcacgcttccggcaaaccgaaaggcaaaaggccgaaacgcccggcgtaaccaagagtgacgcttccatggggtgaaagcggcggttgcggatgccggattccaaacgaacacgggttgctggcgtctcccgttcgatttctattcactttggcgcacggggagcgatgacgagggaacaaaggtgtccgccacgtttcattctcagccgcatttgttccggcgcgacatgacctttgtggtggcaatcgcaggtcctgctttctcctttgccagacgagcctgcctcggcggtgccgccagcccagaaggcattccacacctggtcgattttcgaacgaagatcgcctgcgagccctacgtccctcccagacaacgaaatcgctgtcggaggaactcgcagcccacgccggcgtcacgccagacgaaaaaggcggcgccggagcgccgcccttatctggtgcagactggctgcttgttaaccgccagaccacgatctctgaaacgatacaataacggctgatggacggccgtcaagcggaaggagatatggtccagcggcaactactaagcaatgggagaatgcaaacacagtgtcccaaaccatagtgccatctgcaataaggcgagtgcgcacccgcgtggcaaggtttggacccgttgcccggtcgagtttggaccccgacccaaatcacattgcgtctggggatatcagggtgtttcctgaacgtcaaatgcttagtagggaattttgacagcttaaattttgtgtcctataatttgaccgttcagcatcctgcggtaggatgtcgtggggcaaaacaatcagggcgggtatcatgcgctggaggcttggggccgatctcggcacgaattcacttggctgggcagtcatcgaactgaacgaagacgactcgcctatcggcatagtcaccgccggggcacgcatcttcagcgacggtcgcgacccgaaatcaggcgcctcgctcgccttcgaccggcgcgccgcgcgcgccatgcgccgccgccgcgatcgtttcaagcagagacaggcggcgcttctcaagtacctgaccgaagccggtttcctgtcggccgccgaggtggagcgcaaggcgctggaggggctcgacccgttcgaactgcgcgccagggcattgcgggaaaaactgccgttgcaccatctcgggcgcgcgctgttccacctcaaccagcggcgcggcttcaaaagcaacaggaaggccgatcgcggcaagaacgatgacagcggcaagatccgggtgggcgtggcccggctgcacgaggccatgcgcgatgccggcgccgagacttttggcgactacctgcacggcctgcgcgcggcctcgtccgatcccaacgcgattgcgagcgtgcgcacgcggcttcggcccgagacgggcgaaggcgcgcgcggcgacggctacgatttctatcccgaccgccagatgctggaggaggagttcaatctcatctggcagcggcaggcgcaatactatcccgagacgctgacgcccgagaacgaaaaacgcttcttcgagatcatcttccaccagcggccgctgaaggagccgaagatcggcacctgcacgctggttcctggcgagccgcgtctgccgaaggcgcatccgctgttccagcgccggcgacttttggaggagatcaatgcgctgaggatcgttaccgccggcgcgaacccggcgtcgctgaagctgcagcagcgcgaggtcctctatctcaagctgaaggacaagaaagccgtctcgttcgagacgctgcgcaaggcgttgaagctcgatcccgatgcgcggttcaacaaagagggcgagaaccgcaaggagctcaagggcgacgaggtcgcagccgaactcggcgctaagacgcgcttcggcacgctttggcagcatctatccgacgaagcgcaatgggaggtcgtctcgcacatccgcgaacaggaaagcgacgaggacgaggcgatgctggtcgcctggctggaggagacgcacaagctcacccctgagcaggcccacgccaccgctggcgcccgcctgccggaaggcttcggccgtttcggcgagacggcgacgaagaagctgatcgcggcgctgaaagcggcggtcgtcgtctacagcgaggcggtggagaaagccgggctcggccatcattcggatttccgaaccggcgaagtgctggacgaactgccctattacggcgccgtgctggagcgacacatcatgcccggcaccggcgatccggccgatccggaggagcagcgggttggccggctgaccaatcccaccgtgcatatcggcctcaaccagcttcgccgcgtgctgaaccggttgatcaagcgctacggcccgccggagcagatcgccatcgaactcgcgcgcgaactgaagctcgacgaggagcgcaagcgcgagatcaacgccaaaaaccggcagaaccgcgaggctgcggtcaagcggtccgaaaagctcggtgagatcggcattgccgacaagggcgccaaccgcgcgctgctgaagctgtgggaagaactcaatcccggcaatgtgctcgaccggcgctgcgtctacaccggcaagctaatttcggtcgacatgctgttctcgggcgcggtggaggtcgatcatattttgccgttcagcgccacgctcgacgattccaacggcaaccggcttctgtgcatgcgcgaagcgaaccgcgaaaagcgcaaacgctcgccctacgaagccttcggacaccgggacgattgggaggacattgccgcacgcgccgcgcggctgccgcgcgaaaagcgctggcgcttcgagccggacgccatgtcgcgtttcgacgcccagggcggcttcatcgcacgtcagttggtcgacacgcagtatctgtcgcgcctggcgcgggaatatctgagttcgctctatccgggctccggcgagggcagcggccatgtctgggtttcgcccggccggctgacggagatgctgcgtcgaagctggggcctgaacagcgcgctgccggatcacaatttcggcggcggcgccgaccagccgaagaaccgcaaggaccatcgccatcacgccgtcgatgcggtcgtgatcggcgtgaccgacaggcggctgctgatgaagatcgcgcgcgaagcgggcctgcgcgggcatgaggccgccaaccgcgtgacggccgaccttgccgagccgtgggaggatttcagcgacgacgtgcgcgacgtcgttcgcaccatcgtcgtcagccatcgcccggatcacggcacagcctccaaggccggtttgccaaagggccatgacgcaacggcgggacgcctgcacaacgaaaccgcctatggcctgaccggcgaaaaagacgagaaaggcaacgacctcgtcgtccaccgtattccgttccatgcgctgaaaaagaccgccgacattgatgccttgcgtgacgccgacctgcgcgcggccctgcacgaatggaccttcggcctcgacggcaaggatttcgaggcaaggctgcgcaagttcccggaactcggcccgcttcagtttcgtcgggtccgaagggcgcgcgtcatcgagccgctttcggtcatccccatccgcgaccgcagcggccgcgcctacaagggctacaagggcgattccaactaccgctatgacgtctgggaaatgaaggacggcaagtggcaggcggaagtggtatcgatgttcgacgcgcataagccgggctggacatcgaagatcaggaaggagaatccgatcgcgaagaaggtgctttcgctgcatcaggacgatgtattggcgatcgagcaggatgggggaacaaggaagttggtccgcgtcgtcaagttcggacaaaatgggcaaatcaccttggccgagcctcaagaagccggcgatcttaagaaaagggacgcagtctcgaccgatattgatcccttcaagtatttctcaccaacaccaggcggcttgaagcgcgccagggccaggcaggtgcgggtggacgaactgggccgcgtttccgatccgggatttcccgcgcgcaaggcggcgcggcgaaggccttccaagcgcgcggctgccgagtaggacgtcgcatgcgatggaacggattatcgacatcgccaccgacggccgtcatctttcagcgcatcgaggctttctcgtcgtcagcgaggatcgcgcggaggtcggccgcattcctctcgacgacgttgccgcggttatcatccatgcccatggcgtgacctggacaaccaatctggtagtggcgctcgcggaacgcggtgcgttgctggtgctgtgtggcgccaatcatgcgccggtcgccgtctgtctgccgctcgacgggcatcacgggcagaacgcgcgtatgcgcgcgcaatgggatgccggcaagcctctcgccaagcaactctggcgcgagatcgtggtcgccaagatccgctggcaggcggcggtactggaggcgcagggcatcgaatccggcgctttcgccatgctcgcccggcgggtgcgctccggtgatcccgacaatatcgaggcacaggcggcgcggcgctactggccgttgcttatgggggaagaatttcgccgtgatcgctcggcggagggtgtcaacgccttgctcaactacggctacaccgtgctgcgttcgctcgttgcgcgctcggtggtcgcggcagggctgcatccgtccatcggcatccaccacgccaatcgcggcaacgcgttcgcactggcagacgatctcatcgagccgtttcggccattggtcgacctggtaaccgtgaagcttgccgccaagggatgttcagaagtgtcctccgacgcaaaacgcgcctatgcgggcctgatcgcgctcgacctgccaggggaagacggaaccaccaccgtcacgatggcggcaacgtatctaagtcaatcgctggcgcgcagcttcgagacgggcaaggcgtccaaccttgcgccgccgcgccctccctcggcgatcgaactcgccgggctgggagccgtagtcacgtgagcgccactcaacttagcggatatcgactgatgtggattttcgtcatgttcgacctaccggtaatgacgaaggcgcaaagcaaggccgccaccaaatttcgccagttcctgctcgaccagggcttcgaaaagagtcagttttcagtctatgctcggttctgcaacggcaaggaacaattcgagacttacatgcggcggatcgaggaccatctgccggaccgtggagatgttcatgtccttacgtttacggacaagcaatatgaaaacatcgtccgattctcgggtcagcgacgcaggaagccgagaaaaaaccccgatcagcttgctcttttttgaagcttcagcgcttttccactacctgctgaagcaggtatctcattggttttcaacaagatacctgctcagggagtgtagccgttcagagatcgtggtccagcggcaacaacgggtcggacttcaacgcgactgacgaaagtgtagccgttcagagatcgtggtccagcggcaacgagagcgacgcgcagggcggaggcggcgacagtgtagccgttcagagatcgtggtccagcggcaaccctagaccagggcggtccgaacgatatggaagtgtagccgttcagagatcgtggtccagcggcaacaggatctgcgacttgatcgcctcggccgtaagtgtagccgttcagagatcgtggtccagcggcaacagagcgacgaccgctgggcgggatgggcaaagtgtagccgttcagagatcgtggtccagcggcaacatgatgccccacgtcgcctgcacgggttggagtgtagccgttcagagatcgtggtccagcggcaacgtgactgtcacttacccggatgccccattcagtgtagccgttcagagatcgtggtccagcggcaacccaccatccgcatgccagcggcaacaaccgagtgtagccgttcagagatcgtggtccagcggcaacgacggctggtacgcgattaacctgcacggaagtgtagccgttcagagatcgtggtccagcggcaacgtttcgtgggtcgtgcagggctatgacggcagtgtagccgttcagagatcgtggtccagcggcaacccatcctttccgcaccgtcgcgataaatctagtgtagccgttcagagatcgtggtccagcggcaaccgatgtgccgttcagcattcaggccggtgaagtgtagccgttcagagatcgtggtccagcggcaaccttctggattgacgatgcgaccttcctgcaagtgtagccgttcagagatcgtggtccagcggcaacgcgaaatgcaggcgctgcgtaatttcctgaagtgtagccgttcagagatcgtggtccagcggcaactgcgatttcgacttccatgggttcatccgcagtgtagccgttcagagatcgtggtccagcggcaacttgctggaatggcaaaagctgaatcggcttagtgtagccgttcagagatcgtggtccagcggcaaccagaaaaagcctgcgcaatgttgtgcgaaaagtgtagccgttcagagatcgtggtccagcggcaaccgttcccagcatggcgccaaccggcataggagtgtagccgttcagagatcgtggtccagcggcaaccgatagcgcatggtgggaatactacgcatgagtgtagccgttcagagatcgtggtccagcggcaaccttgcggggcttatcaacgccaagtctatcagtgtagccgttcagagatcgtggtccagcggcaacacgacgcgcgacgtatctgaatgcgcgcccagtgtagccgttcagagatcgtggtccagcggcaacccagaggggagcaacgtaatcccggtcgacagtgtagccgttcagagatcgtggtccagcggcaaccgcaaagcgcaatcatctgttccggattgtagtgtagccgttcagagatcgtggtccagcggcaacacgacgttgcagcgcgcggtgaaatcgccaagtgtagccgttcagagatcgtggtccagcggcaactcgccggccgcgccctcggcggatgaccgcagtgtagccgttcagagatcgtggtccagcggcaacacgcgctgctgatcgccgatgcggtcgaggagtgtagccgttcagagatcgtggtccagcggcaacccggcggtcatttccgacaccatcttgaccagtgtagccgttcagagatcgtggtccagcggcaacccggacgtccgccggacgaagccggcaaaagtgtagccgttcagagatcgtggtccagcggcaactgtgcggtcctcgggccgcaccgctcgtatagtgtagccgttcagagatcgtggtccagcggcaactggaacacccagtcaaagtcatcgtattccagtgtagccgttcagagatcgtggtccagcggcaaccgtatccgaagcggcttcgccgcacttcgcagtgtagccgttcagagatcgtggtccagcggcaacccgctgccgctgccgccgctgctgccgatgagtgtagccgttcagagatcgtggtccagcggcaactccatcgggtcgcggaccaattcgcctctgagtgtagccgttcagagatcgtggtccagcggcaacccattcactcggcacgtcgccgcgtggatcagtgtagccgttcagagatcgtggtccagcggcaacattccaaccgatggcgtatcacggcggctgagtgtagccgttcagagatcgtggtccagcggcaacgagaaatgtcaccggcggaactggctatgcagtgtagccgttcagagatcgtggtccagcggcaacctgccgctggcgcggctgagcagtcgccgcccgcagcgacgtcaggacggcgcggtctgccgcacgaaatgcgtcggcgagaccgcgttcatcggcagatggacgggcacgaaatccaccccgcgcacggcgctgggaatctcgtccgacatcggctcacggccgatcggccgcttcgtcgggtcggcgaccggaaccgtcgacagcaacttgcgcgtatagggatgctgcggattgccgaagacggagcggcggtcgccgatctcgacgatctcgccgagatgcatgacggcgacgcggtgcgcgatgcgctcgacgacggccatgtcgtggctgatgaaaaggatggcgatgccgatgtctcgctgcaggtccatcaagaggttgatgacctgcgcctggatggtcacgtcgagcgaggcgaccgcctcgtcggcgatgacgagacgcgggtcgagcgcgagcgcacgggcaatgcagatgcgctggcgctggccgccggagaaggcatgcgggtagcgctcgagatgctcggccggcaggttgaccttggccagcaggtccgccgcccgctgccgcaggtcgccgcgcgacgcgatgcggtgaacgcgcatcggatcggtcagcgcctgcgcgatcgtcatgcgcgggttgagcgaggagaacgggtcctggaacaccatctgcacctcgcggcgaaaggcggcgagggcggtccgccccgcgccaatgatctccttgccgtcgtagcggatggagccggacagcggtttgtcgagctgcatgatgctgcgcgccaccgtcgatttgccacagccggattcgccgaccagcgccagggtctcgccggggaagatgtcgaaagaaacgtgctcgacggcgtgtacacgtcctgaaatgccgccgaacgtcccacccttgagatcgaagcgggtgacgaggtcgcggacctcgatcagaggcttttttccggccgcgcttgatccggcggtcatagggcggcctccggctcggcggtttccgcatcgtagatgacgagcgggaatttctcgggcgcgtccttgtcggccatgctgccgagccgcggcacggccgagatgagggcgcgcgtgtagcggtgccggggcgcggcgaagatctggttcaccggacccgattcgacgatctcgcccttcagcatgacgcagacgcgatcggcgatctcggcgacgacacccatatcgtgggtgatgaagagcaccgacatgccgatctcgcgctgcagcgcgcgcaccagatccaggatctgcgcctggatggtgacgtcgagggcagtggtcggctcgtcgaggatcatcagcgaggggcgacaggccagcgccatcgctatcatgacgcgctggcgcatgccgccggaaagctggtgcgcatactggtcgagccggcgcgcggcgtccggcacgcgcaccagcttgagcacgttgagcgctatggcgcgcgcctcgcgggcggacttgccctgatgccgcatgacgacctccgaaatctggtcgcctatggtgaagacgggattgaggctcgacatcgggtcctgaaagacgatggagaactcaaagccgcgcaacgcctcgacgcgcttttccgaaagctgcgtcaggtcggtgatgccgccgtccttcagccgcatcaggatgcgcccgccggtgatcttggcgccgtcatactcggtcaggcgcatcaccgtcatggcggtgacggatttgccggagccggattcgccgaccagcgccagcgtctcgccgcgaccgatctggaacgacacgccacgaaccgcacgcaccggattcgccgcgctcgcggcaaaacagacttccaggttttcaaccgaaaggattacgccgtcgggaaggctcgcggtggcgacagattggacggacaatagcaactcccggcgcaacggatcgcgtctgccaccatcgaacgcaatgaccttgcggcttgtcaatagcggcggacgccgaaggtgcccatgcaaatccgccgaaatccgcccctgcgcgggcggtcgtcggcggttatgcaaactatgcatcgctgtctcggatttcgcataggcgatcaggcccgattggcgctcagcgcagggtgagggacggatcgacggtgctgcgggcgccgacctgttcggcgacccgcgccagatgcttccacaggatttcgccgtcgcggctgcgtgcgccgatgcgccggaagatcctgatctcgatctctagggtcatctgctgcccgccgatctgcaccagttcgccctgggcgatggatttctggacgcaaatctgtggcagccagaccacgccgcggccagcgatggccatctgtttcagcccctccgcgagggacgactgatagacgaggctgaggttgaggggccgccgccagcgcgactggatgagcgagaccagcttgccgagataaccgtcgctccaggaataggcgaggtacggtatgctggtgccctccggcgcatcgaggtcgtagagcggtactcctgtcgaatccacgccggagacaagaacaagacgatccttgccgatctgctgtgattcgaaggggcctgcacccagcacccggggcccgtcggggtggttgtaggtgatgatgaaatcgcatttgcccgaagagaggtgttccacgcattcgaggaaatcggccgtgtgcatgctgctgttgatgggcgcgctgggcatgtcgggattgctgatccagttggggaagaaatagatggccagcgtatgcagggcggcgaaggtcagcagctgcgaactggcgccggcggcgtttcggcagtcggtgcgcaggcgatagatgtcgcgcaccatctcctggcagcgcgggacgaacatgttgccggcgttggtcagatggaccggataggtgctgcggtcgatgagttcagccccgacccaggcctccagcgccttgatgcgccggctgaaggccggctgcgaaatgttgcgggatgccgcggcggtagagaagttgcgggtcgcgacgatctccagaaaatcttcgaaccacgccagttccatccgcttcctcatgcgtaacgcgcataaccgatcctatctacgcattggacagcaatgcaagcgtcctcctagcttcgaaggcaacgacaagaagactgctgtgtccatcgtaggggaatatttccatgaaacgtgctttggcattggctttgtgtctgggagtcggcacggcgatttcgcctgccgccgccgagaccaagaatcccggtaccttcgtctttctctggactgacgacgttcaatccttcgatcccgcctacattgccaacaccccgagttcctacggggtgttgaacgtctatagccggctgctcaactacaacggctcgcagatatccgaattcgtgccgtctctttcgaccgaggtgccgagccttgaaaacgggctgatcaagcagggggcggacggctcgatcagctacaccttcccgatccgcaagggcgtccacgcacacaaggtcggcgtcaagggcgacgacggcaagattacctgggagtactatgacgggctgagcgaggagcagaaggccaagatcgagccgggctacggcgagatcacccccgaggacgtgcgctattcgctgctgcgcgccatcctgatggggcagtcgtggatgtccaacgccatcaccgaggtggtgtcggccagcaagtacaccgatatcgccaagtgggccgagagcgtcggcaacgtgaaggacatcaacgaggccagccccgaggcgctgcgcaaggtctatgacgaactcgcctcgcagatcacggtcgagggcgacaccgtcaccttgaagctgccgaagtcgttccccgccacgctcggggttctcgccctgccgttcggcgcctcgatcgtcgacaaggaatgggtggcctcggtcggcggctgggacggcgacggcgatacctggaagaagtactatcgtcccgaagtcggggccgatccgttgttcgccgaggaaaacggcaccggccccttcatgctcgagcaatgggaccgcaccgaccgccgcatcacgctgaagcggttcgacaactatttcatgggtcccgcctcgctcgagcgggtggtcatccgcaccgtgccggaatggacgacgcggcgcctgcaactgctttcgggcgatgccgacttcgtgacgacgccggtcgagttcctcgacgaactcagcaagacggagggcgtgaaggtcatcgacggcctgcccaaggtcttcagccgcggcctctatttcgcctggccgctggacgaggccgacaattccgccatcggcagcggcaagctagacggcaacggcatcccgccggacttcttctccgatatcgacgtccgcaagggcttcaattacgcccagaactacgatgttctcctcaaggacgtggtgctcggcaagaccgtgcaggcgcgtggcccgacggtgcgcggcatcatgggctaccggccggattcgccgatctacacctatgatccggagaaggcggccgagcacttcaagaaggcgttcggcggcaagttgtgggacgtcggcttcaccttcacggcctatgtgcaggaaggcaccccgcttggcacggcagcgctgtcggcgctgcagcagggcctgcagcggatcaacccgaagttcaagatgaagatccagtcgttgccgtgggcatcggtttcggacaagctgaacaatcgcgaaaagcccgcctcgccgctgacctatatgggctggggtccggactattccgatccgggcgggccgctgggcgccgcgacctactacctgtccccgacgggccttgtcggcggcatgctgggccagggttaccgcgacctgatgacggagaagttcaagccgctgctggacgaggcgtgggcttcgagcgatccggccgtgcgcgagccgatctatgccaagctgcaggaaatgtcctacgaatacgccacgacccagttcctctgggaggacttctcctacatcgtcacgcgcagcaacatcgacggctacgtgcacaacatgatcctttacggtgcctgggacttctatcccatcaccaagaaggccgattgaccgacgtcgacgaagcgccgggcggaaatgccgcccggcagtccgaccaatccctcgctccgcgggtccggatgtgctgaattacgctctgcgacggctgctgatgcttcccgtcgtcctcttcgccctttcgctgatgctgttcgcgctgcagatgtcgctgtcgccgacgcagcggctcgccgcctacgcgccgtcgcccgacttcctcaaaggcgggcaggacagcatccgcaggatgatcgaacagtatgggctgaacgatccgttctacgtccagtacgggcgctggatcggcaatatcctgaccggcaatctgggttggtcagaaaccgcgcgccagccggtcgcccatgcgctggcctcgcttttgccggcgacgatggaactggtcctgctcgccttcattccgagcttcctgctggcagtctttctcggctcgcgcgccggcatccatctcaaccgctggcccgatcacgtcatccgcatcttcaccatcctgggctggtccttcccggtatacgtcttcggcctgctgatgctgctggtcttctattcggcactcgactggttcccgcccggccggctcagccagtgggcgcaggccgtcgtccggtcgcccgacttcacccgctacacgggggcgaacacggtggatgccctgctcaacggcaatctggcgatcttcttcgattcgctgcggcacctggcggcgccggtcatcacgctcacctatgtcaatatcgccaacatgacgcgcatcatgcgcacctcaatgcttgagacgctgcgccaggactatgtccgcacggcgcgtgccaagggcatgccgcggcgtgtcgtggaattgcatcacgcccgtcgcaacgcgcttttgccggtcgtcacgatcgccggtatggaactggccaccatgatgggcggcgtggtcatcaccgaaaccatcttcgactataccggcctcggccagttcgccgccaagaccgcagccaacctggactttccggccgtgctcggcttcggcctgtacttcgctgtcgtgctggtagtgatgaacctcatcgtcgacctcatctatccgctgctcgatccgagggtgaagacgcgatgaaggtgcttcgcta

SEQ ID NO: 3082 - DNA, 23258 bp, synthetic construct
  source 1..23258: mol_type = other DNA
  misc_feature 1..23258: note = Synthetic
tcgccggccccgccgacctttgtctgcagcgggtacagcgccgccaccgagacggtcgccatcgtcaacaatgccgatgtgacgacggaggcggatttcagcgtgaatgcggcggcgggccagggcctcaccatcaccggcgccggggccatcagcttcaccgacaattacgccaccacgagcatcgtggcgccgaccaatgcgctgttcgtgaccgcgaccggcgatgacggcgccattcccggctcgatcacgatcctgtcgagcggcacggtcaccggcggcgacaatgccatcgttgcgttcaatgtggggaccggtgacatcgacgtcaccgccaatggcgatgtcacggggcagggcttcaacggcatactcgccttcgataccgccaatggcgggagcatcaccatcaccaccggggcggacagcacggtcaccggcgacgacaacggcattcacgtccgtcacttcggctcaggcgacatcgacatcaccgccaatggcgaggtggagggcgagacccaggatggcataaccgcctacaatgccggcgccagctccggcactcccggcaacggcgtcaacctgaagatcaccaccggggcgggaagttctgtcaccggttacgactacggcatcagcgcctacaatgagggcagcggctatctcgccattaccgccaatggctatatccgtggcgagaccgccagcggcatatatgcccgcaactcggccgccggcaccgatctcacgatcactacggggccggggagcgagattctcggcgacgatggcggcatcaatgctagcaactatggcagcggcgatctcgagatcaccgccaatggcgcggtcacgggttatggttctgtcggcatcggcgtctacaactcggcgcagggcggcaagctcaccattaccaccggcgccgggagcgtgatcagaggcgccgaacgcggcatctccgccgagcaggaaggagcgggcgatgtcctcatcaccgcaaatggcgaggtgaccggcgaagccttctcaggcatcgaggtcgccaactcttcgggcggcaagctgacgatcatcactggtgcccagagcgtcgtcaccggcgggacccatggcatatttaccgacaatcacggctatggcgatctggtggtaacggccaatggcatcgtcactggtcgtgatggcgatggcatattcgcggacagctcgtccagcggcgacaacctcaagggagtgaaggtcacgaccggggccgcaagcatcatcaccggaagcgagaacggcattcacgcctacaatttcggtgatctcgatctcgaaatcacggtcaatggcgtcgtgacggggcaaggcgagtatggaatcgactcccgcaatgacggcaatggagacacgatcatcaagatcggcgccagcggtctcgtccagggcaacgtggccggaattttcgcttattcggggctcttcgcccccggcggccaggccatctccatcaccaatgacggcttggtgcgcaatgtttcgggcgagtcggatgaccgggcgatcaccgcgcgcggcggcccgaccacgatcgacaacaacggcgacctcgtcggtgccgtctggacaagcacctatggcgatgtgctgaacaatgccggccggtggttcatcaccggcagcatcaatgacttcggcggttcgtatgacggcgatgtcatcaacaacagcggtacgatcatcgccggcgacaatgcggcggtgggtgttctgacgatcatcgacaatgtcgaacaattcaacaattcaggccttgtctcgctggtcgacggcggggcgatcgacaccttgaacatatcggcgctgcccggcgatgtgttgtatgtcggaaacaacggccggcttgccgtcgatgccgagctcggcccgacaggagaagcggaccagctcgtgatctatggcgacagcagcgggaagacgctggtcgcggtcaatgtcgtcgacgtgaccggcatcaataccgatggcatcgccgtcgtccaggtctatggcgcgacggcggaggagcatttcgatctcgaaggcggggtgctcaatgccggcttcttcgcctggaatctcaggctcgacggcgacacgcatgagctctttaccgccggccttggcgccggctcatatgagttcgcggccggcatcacgggggcgcaggatatctggcaccagacgaccggaacgctgctgcagcgccaggcggagctcagggcgctgctcgccggcacgcaggtgacgccggtcgccgatttctccgaacccgtcgagccgacgccggtgggtcgtgtgacgcctggcctgtggttcaagggcgtgggcgcctatctggagcgcgaccaggacgaagccaacaatgtctcgaccgaccgcagccaagagatctatggcttcatggcgggcttcgatttcggctcggagagtgcgggcgaggcctggatgttcggcctgttcggcggctatgtcacgtccgacctcgacttcgaccagtcgggctcggagtggcattacgaaggcccctcggtcggtgtctatgcgacctatctgaatgacgccttctatgccgatgtgacggtgaaggccgacttcctcgatgtcgatatcgatgcctcggacatcgcgccgggcgaagacgatgccgacacggatgtgctcaatatcggcggcctcatcgatgccggctacaagatgccgctgaaccatggcctgttcgccgagccgcaggcctcgcttgcggttgtccataccgagatcgacgacatcgacgatgtcatgggtggtgccgtcgacttcgaggatgagacgagcgtcagaggacgtctcggcctgaggctcggccatgagctgaccgccagcaaccagctcatctattcctcggatgtgacggcaagcgtgtggcaggaattcgccggcgacaatgacgtcaccatcgcggcgccgggtttcccggtgagcgatgtgtcggacagcccgagcgagacctatggcgatgtggcattgggcttcagcgtgcagtcgccggaaggctggtcctcgttcctgcgcgccaattaccagttcgccgaggactatgacgccttcgccggaaatgccggggtgagattcgcctggtaggcatctcattcctccagccagacctgtggcgcgaaagctacttcggagacccattttcttcagtcgcgccgattttccttggattttccgttgcgttaggtaacctatcgtcaatctgtggtggcggagtcgacagggcagcggggaagtcatggggcagcggtcggattgggtgttgtcagccggcctgtcggcaaaaggcggctgtctcgatctgcgcagccggctcgccgtcaccacgatccttgccgtggtgccgttcctcggctatggccgccaggcctatgccgattgcattgcgggcacctctccggccttcacctgcagcggcacgaccgtcacgacgcagaccatcaacacccccgatgccgatgtatcgacggcgccgggattcaacctcacggcgccgaccggcgatggcgtccatatcgaggccgatggccatctgcaattcaacgacgtcaatgcctcgccgatcacggcgaccaatggcaccggcctcttcgtctattcgaccggcaacagcgccgacaatgccggcgcgatcaccatcgtcaccgatggcgacatcagcggtggagacggcgacggcatccatgcgtacagcgtctcgcaaagcggcggccctctgacgattgccgcgggccctggaggcgccattaccggcagcgatgacgggatagaggcgcgcaacctcagcggcgacctcacgatcatggccaatggtgtggtcaccggcgagacggatgacggcatcaatgcgttcaatgcgggcatttatgatccgaccggcaatggcagggacctgacgatcacgaccggggcgcaaagcgtcatcaccgggtatgacgacggcatttacgcccgcaacaatggcacgggcaacctcgtcatcacggccgatggcgaggtcaccggcaatggtctgggccccagcgccggctacggcatctttgccttcaactccaggaatggcggcgatctgcgtgttacgacgggagtcgacagtgtcgtctacggcgccagcggcggcatcgatgtcgagaataatgccgagagcgatctcatcctggagatcaacggccaggtgacctcgaacgacaccgccatagatgccaccaatgacgagggtttcgacctcaccatcaccacgggtgcccagagcgtgatcaggggtggaaccgatggcatcacggctggcaatcgaggggcgggctataccgagatcaccatccagggtcaggtcatcggtgaggatggtgacggcatggaattgcgcggcgccagcagtaccagggatttcacggtgatcacgggcgcccagagcacggtcaccggcagcgagaacggcatcgatgcgtataacaacggcgccggcgacctttccgtcaccatcaatggcgagcttgccggcgaaagcgaagacggcctgtatgccgccaacaacacctatttcggttcgggcaatgcccggaacctgacgatcagcaccggggctcagagcgacgtttccggtggcgacgacggcatcgaagcccgcaaccgcggcgagggcgatctcacgatcaccgtcgatggcgatgtcaccggcgtggatggcgatggcatattcgccgccaatgactattactttgacaactacagccaggtcggcacgggattcggccacaacctgaccatcaccgtcggcgcgcaaagcgtggtggcgggcgatgacgagggcatcgacgcgcgcaatcgtggcgacggcgatctcgcgatcatcgtcaatggcaccgtgaccggcgcgcggatcaatggcatttcggcgaccaacagcgggttggacgcgaccatcgagaccgctgcgggaagcgttgtcagggcccgccaaagaggcatcgatatcgatcagcgcggcaccggcacgctcaatatcctggtcgatggcgaggcgacgggtgagaatgaatacggcatatactcgaacaatttcgatgggatagagacgatcatcagggtcggctcgactggtctggcgcaaggcgccaggggcggcatatatgcctattcgggcgacggccagaacatcgcgatcaccaatgacggcgtggtgcgcaacctctcgggctcgtcgtccgaccaggcgatcaggacgcgcctcggccccgcgacggtcaacaacgacaacctgctcatcggcacggtctggctcggcgatctggaggatacgctcaacaatagcggcctgtggaacagcgccaacggattcagcgagttcggcggcggctacgacgtcgtgaacaacagcggcaccttgcgcgcggcggatgatccggcactgtccgaggaaatgatgctcagcaatgctgagcttgtgaacaattccggtctgatgacgctggttgacggggttgcaggcgacgcgttgcagatgggcggggcaacggaatatgtcggcttgaatggcaggcttgcggtcgatgctttccttgatcccgccggcacatcggaccggctgaccatcgccggcagcagcggcggtgtcaccagtctggtcgtcaatctcaccaatccgctgggcagcacacccaatttcgtcggcatcccggtgatcactgtcaccgacgggacggcggaagcggacttcaatgtcgagggcggcgtcctcaatgccggcttctttgcctgggatctgcagcttgacggcaatacccatgagctgatcacggtcggtcttggcgccggctcctatgagttcgccgccggcatcaccggcgcccaggatatctggcatcagacgaccggcacgctgctgcagcgccaggccgatctccgcgcgctgcttgccggcacgcaggtgacgccggtcgccgacttctccgaacccgtcgagccgacgccggtgggtcgtgtgacgcccgggctttggctcaaaggcgtgggcgcctatctcgaacgcgaccaggacgaagccaataatgtctcgaccgaccgcagccaagagatctatggcttcatggcgggcttcgatttcggctcggaaagcgctggtgaggcctggatgttcggcctgttcggcggctatgtcatgtccgacctcgatttcgaccagtcgggctcggagtggcattacgaagggccgtcggtcggcgcctatgcgacctatgtcgatcatgccttctatgccgacctgacggtgaaggccgacttcctcgatgtcgacatcgacgatggcgacatcgcgcccgatgccgatgatgtcgatacggatgtggtcaatctcggcggcctcatcgatgcgggctacaagatgccgctgaaccatggcctgttcgccgagccgcaagcctcgctcgccgtcgtccataccgagatcgacgacatcgatgatgtcatgggtggctccgtcgacttcgaggatgagacgagcatcaggggccgcctgggcctgaggctcggccatgagctgaccgccagcaaccagctcatctattcctcggatgtgacggcaagcgtgtggcaggaattcgccggcgacaatgacgtcaccatcgccgcgccgggtttcccggtgagcgatgtgtcggacagcccgagcgagacctatggcgatgtggcattgggcttcagcgtgcagtcgccggaaggctggtcctcgttcctgcgcgccaattaccagttcgccgaggactatgacgccttcgccggaaatgccggggtgagattcgcctggtagggcggaatgcccgaggctggagcaaaccctcacgtcgcacgggcgctgtgaggactgccggaggagctgccatgtcgggcggcggccgcggtctttggcgcatgcttcggacgcgcaatcaatcgccgacatgtcgaatatgttcagcgtgctgagactgaagcccggcccggtcctcgacactcgactttttgtcgccgggatttgatcacgatcaaatgcaagtgccgacgatcggagataatgggaaaaaatccaagctggcaaagccgggcatgaggagaagccatatgggtcagctcgctttcctggacgaggacaggctgtttgacgggcagtgtgtccgcttcaagggtttcgacggagaggatgaagtgctgtgcggcgtgacgatcgccgcgctcaaggaatgcgattcgagcctgcagcgccacggcctggttcccgcggaagccttccttgcgtcgttcgagaagcttgccatcgcgatccacgatgccgcgcgttgcaagcatgagcgcggcgaattcgaaagcgaaggtggtgtgcgggtcatggttcatcgccgtgatctgtcgccgtgaggccagggggatcggtcgatgatgatccacgaggaaagtgcgtgacggcttcgcccgacagttcggcaaggaccggtcccggagcgggagcaatcctggctgctgccgtctggctggtgctcggccccagggctgctctggccgatgacgcttcaggccccgcggacgccgcaccgacagtcgcgcaggatttccagtttcactgcgcggcatgtcatggcgccgatggacggggcgatggaccggtggcgcggaccttgaagatagagccgccggacctgacgcggatcgccgagcgcaggggtgggacatttcccgaagacgcaatcttcgagatgatcgccggaagcagcatgccgatctcgcatggcacgcgggaaatgccggtctggggcgatttgttcgtgggagaaactctcgattcctcggtatcgctcgaggaggcccaggaggccgccgcggaagtgaccgagcggatcaggcggctggtcaaatatctcgagaccattcagatccgcaaatgaaggccggtcggggctcccgcatcgccgggaaatattgcgctccaagcgcgacctatggcgatatggcgctgggcttcagcgcgcagtcaccggaaggctggtcgagctccctcagagccaattgccagtgcgccgaggactatgacgccttcgccggcaatgccggggtgagattcgcctggtaggccggatagtgttgagtcgggaggttttgcgggccgatgtatgattgcgggcggctctattttgcaacccaaattcaatcaaggattgtgttgtgtgtgacctggaagtcacagtggaggaattacttccaccaggtcatatgtcctcattgaggtgggggtgcggggcctcttataattcggggtgaggcattcgaattggggaaaatcatgaccggacttaaatctgccgtaagcagcctggcgctggctcttgtgatggctgggggaattgcaacctcgacggcgcgcgcggccgacgtggtggcggatccgggctgcatgctctccggttcggtgacagccggcttcatgtataactggcagtcctccgaatttgatgacggcgatgagtccatcgatggcaaggatgttgactggtcgacgcccttcggcgaaggcgccggcctcgtgacctgcggcggcttcaacatccaggccgatgtcgcctattacgcccattcggccgacctggaccaggttgatatcgatattgaccagaccaatacacatatcggcggcgcgctgttctatcgcgagccggcttcatgggcgggcggcctcagcgcttcctggatatcgcaggatatcgaagggcttgacctcgatatcttccgggttggcctgtttggcgaattctatctcgacgatgtcttcacgctcggcgcgtcggcgcattactacaatgccgattggcctgagggtaaggatgaggacgggttcgagctggccgcctggggcaagttctatgcgacgcccgaccttgccttcaccttgcgcggcgacgtcctgctggccgacctggaactaggcagcgacggtgccgatcttgacggcttcgccatcaccggcgacggcgaatatctcgtgtgggatcagggcctgtcgatctttgcaggcgcccgctatgccgatcgcgagttcgatcccgacgacagtgatttcagcttcgagatcgaggacttccaggtctttgccggcgtgaagttcaacttcggccatgacggcacgttgatcgagcgccagcgcaccggcacggtggacaacaccagcgtcttcaatgagaagctgcccaacgtgttcatctccgcggaagccgccgaccccgttctgtaatcgcggatcttgcctggcttcgtgactgcaaggcgcctgtcagacagcgccttgcagttttgttttgcggcgaggcatggcgatggctgccggcaatggccgggtccttctcggcggatttctctgctcataccagttgatcgccggcttccccgataagcgggggcaatcatgcgtacgaagatccacccattgatcgacacggtgcgtagcaacggttgccggtcctgagaatattgtcagagttttcggtggtgccaataaagtttcggcgccgcaacaaaaaaggcgacgccggagcgtcacccttatctggtgcagactggctgcttgttaaccgccagaccacgatctctgaagaatcaattgtagctcatcggcaactctggttcaagatcgcgactagctgcaactaagccatcttggggggcggccaaagccgtctcctgggagagcttacgagctgcgagtggcagacgcgttctgcgacgctcagactgtggaggtcgggcggcagttgagcttggaccctcaacccacttgcaacgtgaagtccaattaactatctctcttgattctgtcaaactccctaagccatcttacatctgaatgcctcagggcctgtggcttcccacttgcaggtgtcgtggggtaattctggggcgtaagttacgatagtatatgaaagggggaacaatgcgctggagatttggggccgatctgggtacaggctcacttggctgggcggcgatcgagctcgatgcggacaatgtccccatccggctcatcgcggcaggttctcggattttcggggccggtcgcgatccgaagtccggagcttcgctggcggtcgaccggcgcgccgcgcgcgccatgcggcgccggcgcgaccgtttcaagagacggcaggcagcactcctcaagcatctcgaaatggcgggactctttcctgccaacgcggccgagcgcgcagcgctggcgatcctcgatccgttcgagcttcgcgccaaggcgctgcgtgagcctttgccgccacatcatatcggtcgcgccttattccatctcaaccaacggcgtggcttcaaatccaaccgcaaggccgatcggggcaaggatgcggaagacggcaagatcaagctcggggtgaatcgcctctatgaggcgatgcgcgacaagggcgccgagacgctcggtgaattcctgcacgagcgcagagccgcggccagcgacgcgaataccattcctggcgtgcggacgcgcctgcgcccggagcccggcgaaggcaagcgcggcgatggctatgatttctatcccgatcgccgcatgctggaggaagaattcgatcttatctgggagcgacaggccgtgcatcatccggctgtactgactcttgagaacaggaagcgtctgttcgaggtcatctttcaccagcggccactgaaacaaccgaaggtcggcacctgcactctggtcgtcggcgaggagcgcctacccaaggcacatccgctgtttcagcgccggcggctgctggaagagttgaacgcattgcgggtcgtcaggccgggggcttcagccgagccattgacgcgcgagcagcgcgacctgctttatctcaaactcaaggacaagcgctccgtcacatttgagagcctgcggaagcttctcgggctcgagccggaggcacgcttcaacaaggagagcgagaatcgcagggaaatcaagggaaacgaggtggcggcggaactgggcgccaagacccgcttcggcaagcggtgggcctttttgtccgatgaggcgcagtgggagatcatctcaaaaatccgcgaactggagagcgatgaagatgaggcgaggctgctggcgtggctgcgcgatacatatgagcttgagcctgagcaatcgcgctcgacagccggggccaggcttccggagggcttcggccgtttcggcctgacagcgaccaccaggcttatcgccgctttgcagtctgatgtcaccatttacagcgaggcagtgaagaaggcgggttttgcccatcattcggatttccgcaccggggaagcattcgacgagcttccctattatggcgtcgtgctcgaacggcatatcatgccggggaccgccgatccgacggatccggaagagttgcgcatcggacgccttaccaatccgactgtgcatatcgggctgaatcagctgcgccatgtcatcaacaggctgatcaagtgctacggtcggccggagcaggtcgcgatcgagctggcgcgcgaactgaagcttgacgacgagcgcaagcgtgagatcaacaagcgcaatctacagaatcgggaggacgcgaccaagcgctcggaaaagctggtgaacatcggagtcgccgacaaggggggcaatcgagcactcctgaagctttgggaagagctcaatctcgacaatgcgctcgaccggcgctgtgtatacaccggacggcagatttcgatcgagatgctgttctcgggagcggtggaggtcgaccacatcctacccttcggcgccacgcttgacgattcgaatgacaatcgcctgctgtgcatgcgcgaggcgaatcgagagaagcgcaagcgttcgccctatgaggctttcggcaatcgtccggattgggcggagattgccgctcgcgcggcccgcctgccacgcggaaagcgctggcgcttcgagcccgatgcgatgtcacggtttgacaatcagggcggcttcatcgcccgccagcttgtcgacacgcaatatctgtcgcgactcgcgcgggagtatttggcgggactgttcccggatgtgggcgaaggcagcggtcgagtctgggtttcacccggccgtctcaccgagatgctgcgcaggagctggggcctcaacagtttgcttccggatcataatttcggtggcggtgccgaccagccgaagaaccggcgcgatcatcgccatcatgccatcgacgcaattgtcgtcgccgtgactgatcgtcatctgctgcagagcatctcccgcgaggcgggccggcgtggtgctgaagccgcaaaccggatgacagccgatctgccgatgccgtgggaggctttccgggatcaggtcggagaggtggtaagccgcatcgtcgtcagccatcgcgctgatcacggtacgaccgcaaagaaagccttgcccaaaggacgggatgcgacggcagggcggctgcacaacgacaccgcctatgggctcaccggtcagaaggatgcgaagcagaacgaccttgtcgttcaccgggtgccgctcgatggcctgacgaaggcggccgatatcgagagtgttcgtgatcctgaattgcgcaaggccctgcttgtttggactaggggcctggaaggaaaggccttcgaaacgaaactgttgaagttccccgaactcggccccctgcaatttcgcggcataaggcgatatcgcaaggtggagccactgtccgtcatagcgatccgcgacaaggatggccgcgcttataagggctataagggcgactccaactaccgctatgacgtctgggaattgaaggacggcaagtggatagcggaagtcgtatccatgttcgatgtgcatcagcccggttggtcatctaaggctaggcacgagaatcacaatgcaaagaaagttctctcattgcgccaggatgacatgctggcgatcgagccagatgcaaatggccgcaagctcgtccgggtcgtcaaattcgaccagaagggtcaagtcacgttggcggaagcgcatgaagccggggatctcaagaggcggaacgattcgccagtcgacatagatcccttcaagtatttcgccccgacgccgggtggcctgaagcgcatcaaagctcgccaggtgagggtggacgagctcggccgcgtcctcgaccctggcccgcgcgcatctcccgaggctgggggatgatggagcgtatcgtcgatatcgccaccgatgaccggcatctttctgcgtacaggggatttctggtcgtcagcgagaagcgggaggaggtgggacgtgttccgctcgacgatatcgccgccgtcgtcgtgcatgctcacggcataacctggagcaccaatctcatcgtggcgctggcggagcggggcgcgttgatggtggtttgcggctcgaaccatgcccccgtcgccgtctgcttgcccctcgatggccatcacggtcagaacgctcggctgaggtcgcaatgggaggcgggaaagccgcttgccaagcagctctggcgtgaagtcgtcgtggcgaagattcggtggcaggccgccgttctggaggcgcgcggggtcgaatccggtgccttcgacctgctggcacgccgggttcgttcgggcgatcccgacaatgtcgaggcgcaggcagcgcggcgctattggccgctgctgatgggtgaggaatttcgacgtgatcgctcagccgatggcgtcaacagtcttctcaactacggctacacgatcttgcgttcattgctggcgcgatctgtggtggcagccggattgcatccctcgatcggcattcatcatgccaatcgaggaaacgcttttgcgcttgccgatgaccttgtcgagcccttcaggccgctggtcgatgccatggccgtccagttggtcaagaagggacattcggagctgactcctgaatcgaagcaggcttttgccgggctgattgcgcttgatctcgcaggcgtgaacgggacgacgacagtgaccgtcgcggccaccagattggcgcagtccctgtcgcagtgctttgaaaccgggaagtcgtcggggctcctgctgccttcgccgccttcgcctctcgatctggcgggcctggaagccctcatacggtgaccctcacccaactcaacagctatcggctcatgtggatctttgtgatgttcgatctgccggtgaccaccagagcccaaagccgggccgcgaccaaatttcggcagtatctgctggacgaaggttttgaaaaaagccagttttctgtctatgctcgcttctgcagcgggaaagaacagttcgaagcctatatgcggcgaatcgaggacaaccttcccggcagcggggatgtgcatgtcctgaccttcacggacaagcagtatgagaatatcgttcgattttccgggcagcgccgaaagcggcaaaagaaaaatcccggccaactcgccttgttttaaggatcgggggcattttatttgcttcaaaagggcagatatccccattgttttcaatgggatatctgcctatctagaatagcgcttcagagatcgtggtccagcggcaactcttcgtcggcttcttcgatcgaccggatgagaatagcgcttcagagatcgtggtccagcggcaacatgccgataatggcggcagactacgctggcagaatagcgcttcagagatcgtggtccagcggcaacgcgtggcatcagtgggtggcggatcaacttagaatagcgcttcagagatcgtggtccagcggcaacacgccgatctcgatattcagatgctgactgagaatagcgcttcagagatcgtggtccagcggcaacgaaggccgttatccatccagtttcaatgtcagaatagcgcttcagagatcgtggtccagcggcaactccacaacagacgtgacggccggtgaatagagaatagcgcttcagagatcgtggtccagcggcaactgcaggcgggcgtcaatcgccagggtgtcggagaatagcgcttcagagatcgtggtccagcggcaacacgctctccgatctctacacgatcctcaacagaatagcgcttcagagatcgtggtccagcggcaactattcgcccgccggcgaaagaccctcgaaagaatagcgcttcagagatcgtggtccagcggcaactccgccggtgcagtcgacgccgacaggggcagaatagcgcttcagagatcgtggtccagcggcaacaacgtctataaggccatcaacatcgtgcagagaatagcgcttcagagatcgtggtccagcggcaacgcacggcaaacaacgtggcgcgcggcacgcagaatagcgcttcagagatcgtggtccagcggcaactcggcgcgccgcttgccgtggtcgataccgagaatagcgcttcagagatcgtggtccagcggcaactatggcgccggccggtcggtgcgccgctggagaatagcgcttcagagatcgtggtccagcggcaacgtcgcctggtagggctgcatggcgacttgcagaatagcgcttcagagatcgtggtccagcggcaacgccatgttgaagatgctctttccagcgttgtagaatagcgcttcagagatcgtggtccagcggcaacagtgccgggtgcttgccggtcgggcgaggtagaatagcgcttcagagatcgtggtccagcggcaactcattgcggggagggaggcgagcaagcctcagaatagcgcttcagagatcgtggtccagcggcaacttatgtcggtgccggggcgtattttcttgaagaatagcgcttcagagatcgtggtccagcggcaacccgagcgcgatgtattgcgcgctgaaaagagaatagcgcttcagagatcgtggtccagcggcaacggacagatcaacagtttatcccgtacccggagaatagcgcttcagagatcgtggtccagcggcaacgcgtgggctggcagatgatcgaggccgattagaatagcgcttcagagatcgtggtccagcggcaacctggcctaagaagaggcaattcaagttgagagaatagcgcttcagagatcgtggtccagcggcaaccttggggagcgcctcgaagcggttgagaagagaatagcgcttcagagatcgtggtccagcggcaacgcttggggagcgcctcgaagcggttgagaagagaatagcgcttcagagatcgtggtccagcggcaaccaaatatggagcgctgacccatgtccctatagaatagcgcttcagagatcgtggtccagcggcaaccagatgatctatccggcgttgcaggcgtacagaatagcgcttcagagatcgtggtccagcggcaactggccgctcgctatggcgctacgccacacgagaatagcgcttcagagatcgtggtccagcggcaactatgccggccaggggccgaagcgccagttcagaatagcgcttcagagatcgtggtccagcggcaaccaagcgccgcagctttgcccgtgctacccgagaatagcgcttcagagatcgtggtccagcggcaacgtcttctgacaggtatacatatcgcgcaacagaatagcgcttcagagatcgtggtccagcggcaactctcaggtggtatcggcgctgcgtccttctagaatagcgcttcagagatcgtggtccagcggcaactcaggtcacaaatgcatggttcgaatcctgagaatagcgcttcagagatcgtggtccagcggcaactgatagaagggaggtagctgcatgagcgagagaatagcgcttcagagatcgtggtccagcggcaactgccggcaatgggcaaggaagatttccagaagaatagcgcttcagagatcgtggtccagcggcaacatgcgggaaccaagcgggaagacttcgcggagaatagcgcttcagagatcgtggtccagcggcaacggcgctgctctcgtccgcctggggcaaggtagaatagcgcttcagagatcgtggtccagcggcaactgagttggtatctgccattcattggtatctagaatagcgcttcagagatcgtggtccagcggcaacgcatattccagtacctcgtgcagagccgccagaatagcgcttcagagatcgtggtccagcggcaaccggcacaagagaccatcgctatcatagcgcagaatagcgcttcagagatcgtggtccagcggcaacaagcattgggacaaggccgaggagcaatatagaatagcgcttcagagatcgtggtccagcggcaactcgatcagctttgcaaccgggcgcttgtcgagaatagcgcttcagagatcgtggtccagcggcaacatctggccgacatggcgaacgccaccacgaagaatagcgcttcagagatcgtggtccagcggcaacatgacggcgctcactttgttcaaggcggcgagaatagcgcttcagagatcgtggtccagcggcaacccgagtcgtcaacgccactggagaatgacaatatcgccaggagggcaacgacaggggcgatgtatgccgagcgcatggtgttctagatcggcctttccggcgcaatcaagccaatcatcgggtgtaccagcaaaagcaaaagcgcccccgcagccatcatcgcgaccccaccccatacggggcctttgccagtgttgtagtcgtaaatggccttccgcatgccacgcaggaggaggccgcctcccagcgctacctgcaatacgagcaaaacaagctgccaagacatgcgtgcttttagagcacgccaccccatactgcaacaagttgtcaccaacaggaatctttggccaccttggctacgagaatagcgcttcaaagatcgtggtccagcggcaaccgcgcgcgccgtgcgccgctcgacgcaggcgcaagaccttgatgtcatcgatggccggcgtgatcaactcgagggcaagatccaggagcgttacggaattgccagggatcaggctcgcagggatgtggacacgtggtacaacggtcaagtgtggtaaattcagaaaccgcgttaccatcgcgttgcccgctccatcgtcaaatggagcgggcagattttttagtgcgcatcgcggaacatgcctatgaaatcgcttccttgggctttgaccgttcctgttccgcttgccactcgtcgagaaccgccttctcctcttttgtccaggcgccgagcatgcgcaccgtcccttcctgcatgtcgatctggatatcgtccggatgcggaacggggtcgggaagctcgaggccgttggccttgcggcgcgcaagctccttttcccattgggtcttgtagtcgatcatggaatccaggaactcctcgtgaagctcttggttctggtcttccacggcgctgaccagccgcagcagcagcgtctgggcgtgaaacttgcctttaacggctgcaacggcgacggcgcgcagcgttgcctgcaccatcgaaacggtcattggcgttccgttttcatggatcacaatctgccggtaagcctcttccatgatgagatccttgagccgtcgttcgtgaagcgcgggcagcttgtttcgcgtacctttgggcttgccgccaggattgcccgattggcccttgacgaaacggttgtccttgggcgcacgcccgtagcccacgtcgtagccgcctcgcttgggttcgatggccggctcggtactgcatttgtcattcattctcgcaactccagatcaatctaaattcttccggccaatctcacggctttggaccgggaatgagattcccactgcgccaggatccggtcgcattgagtgaggtcaggttcagcgagcagaacggacctgcccattgcgccggcggcgaggatggtatctgtcttccatgcgcccggctctttcgacgaaccgtcaggatgagcgccttgcggcgtcaccacgatgatcatttcctcggcatgggcgccgaatccttcatagacagggctatgcagtttcccgctgcagcagaggcggtgcggccccaacagccagacatcacccggggcgcagcgggcagggggcgcgcgcagggatacctccgccgggctttccccttgctcggaatcgaaatcggcgccgccgctcgaatgcgtgatgtcgaggagagcgtccacttcgctgatcgaaaatccgatggctccaatgtcgaaattgatatcctcggcgcgaagcgtactcagctcctgcgtcagcttcttcctgtcccacgccgcattgagcgcgatcttgttgtcggcgatgacataggctcgtttctcgctctcgctcagatggtccagccggtggcagggcacttcggccagccccagctcgcacgccgcccgcactcggccatgcccggccaggatatggcccgcctcatcgacaaccaccggactcgcgaagccgaagcggcggatgctgtcgatcagctgtttgatctgcttgcgggagtgcctgcggctgttgcccggccagggcttgagattctgcaggggcagataatcaattctgggcaagctggtgctccatcattgcgccagccaaaaggcggccagcagggagcccttcttttgtgcccgttgtgtccgcaattgcaagaggaattttttgttctgaaatccgaattgcattgccttcagagaagggcacttcgaattaaatgctactgtcagggagtaatgccgccgacgatttcacccgttgtaaatgcaacaggtcaacccttcgggttgatgatccatgtcaatcgatgcggaaggcgtatccgccacaatgcccttcgccggcaagcacatgattttcggcggcttcgcgcgagttattaaagaataggctttaaatcctagtatcggcatctgtaacaggtgaatcaagccacatcaaaagtggggtggaattccctgaatttccctgaatccgcgaattactcccaagcattttggttacccgcggtggggtcggctagcgccgcttcacgccgggcagcacgcacagcatctcgaacaggagattggcgccggtgagcgcggtgttgccggtcgggtcatagggcggtgacacttcgacgaggtcgcagccgatgagatcgaggccccaggcgccgcggatgatctcgagcccctggatggtggtgaggccgccgatctcgggcgtgccggtgcccggcgcgaaagccggatcaaggctgtcgatgtcgaagctcagatagaccgggcccttgcccatctgccggcgcacctcgtccatcagggggacaagcgacttgtgccagcactcctcggcctggacgacgcggaagccctgctggcgcggccagtcgaagtcatcggcggcatagcccgtggcgcgcaggccgatctggatgcagcgcttggtgtcgagcagcctgtcctccaccgcgcgccggaaaggcgtgccatgggcgatcttctcgccgaacatgttctcgttgatgtcggcatgggcatcgacatggatgaggccgacgggcccgtatttctcggccatggctttgaggatcggataggtcagcgtgtggtcgccgccgagcgtcagcggccggcagcccttggcgatgatcttgcggtaggcctcggtgatgatgtcgatgcatttcggcaaattgaacgtgtcgatcgccacatcgccgatatcggcgaccatcaggctgtcgaagggggcggcgcgcgtcgccatgttgtaagggcggatgaggcaggattcggcccggatctggcgcggcccatggcgcgtgccggcacggttggaggccccgatatccatggggatgccgacgaagcaggcatctagcccgtcggtgcccgcctggcttggcagccgcatcatggtggccggccccccgaaacggggcatctggttgccgcccaggggctggttgagtgttcgtgtcatgctggttcctcccggtccggtccacaggtgacatgggtcttttggttaagcaagtggtgccattcccctcccccttgcggggagggctatcgcatatggaatttgcgcggctcttggaaaggagaaatcactccctccagttccccttctcccgtccgcaggatggggtggccgacaggccggatgagggctctttctcgaagctcgcgcaaccttcaaaagctgttcttgttgtaggcaaagagccctcacccgccctgttgggcaccctctcccattgcttcgcaacgggcgagggggaaaattggagacagcctgcctggctccagaattttcatatgcgattgccctgctgcaaggggggaggggaatcaagcgcttacactttcggtcgccccggttgaaacccatgcgataatcctctttcttggccgggcaggaggagtgcgaatggcgcggctcacgcaaagctatgtgcatggggtcagcgagacaccgctgatcggccagaccgtgggcgctttcttcgatgaagcggcgcggcgctggcctcgatgcgaggcgctggtggtgcgccatcagcaggtgcgctggacctatgaagagctcaagcgcaaggtcgatgcgttcgccgccggcctcctggcgctcggcctcaggccgggtgatcgcgtcggcatctggtcgcccaacaatgccgaatgggtgatcacccagttcgccaccgccagggccgggctgatcctggtcaatatcaatccggcctatcgcctggccgaggccgattacgcgctcaacaaggttgagtgcgcagcgctcgtcaccgcgagccagttcaagaccagcgactatgtcggcatgctgaaccaactcatcgccgagaagcgcctgccgcatctcaagaccatcatccggatcggcggttcggcgcccggcatgcggggcttcgatgagattgcgggcctcgcaggccctgatcatcatcgccagctccaagagatcgccggcgcgctgcagttcgacgatccgatcaacatccagttcaccagcggcaccaccggctatcccaagggcgccacgctcacccatcacaatatcctcaataacggcttcttcatcggcgagacgatgcggctcgacgagaaagaccgcatctgcatcccggtgccgctctatcactgcttcggcatggtgctgggcaacatggcctgcatcacccatggctcggccatggtctatccgggcgaaggcttcgatccgctggcggtgctgcagacggtcgaggccgagcgctgcaccggcctctatggcgtgcccaccatgttcatcgccgagctgggccatgccgatttcaagagcttcaatctctcctcgctcaggaccggtatcatggcgggctcgccctgtccgatcgaggtgatgaagcgcgtcgtcaacgagatgcatatgaacgaggtcacgatctgctacggcatgaccgagacgagcccggtgagcttccagacctcggccgatgatcccctggagaagcgcgtcggctcggtcgggcgcatccatccccatgtcgaggtcaagatcgtcgatgccgacgggcgcatcgtgccaccgggggcgacgggcgagctctgcacccgcggctattcggtgatgcggggctactggaacgatgcggagaagaccgcggaagcgatcgatgccgggcgctggatgcatacgggcgatctcgccacgatcgacggtgagggctattgcaacatcgtcgggcgcatcaaggacatggtgatcaggggcggcgagaacatctatccgcgcgagatcgaggagttcctctacaagcatcccaaggtgcaggatgtgcaggtgatcggcgtgcccgacgtcaaatatggcgaggaactgtgcgcctggatcaagctcaaagccggccaggcctgcacggatgaggaaatccgccagttctgccaggggcagatcgcccattacaagattccgcgctatgttaagtttgtcgacggtttcccgatgacggtgaccggcaagatccagaaatacctgatgcgcgaggaagcgcgcagggaactgggtctcaaggaagaaaagaccgcttgatgagacgagcatctgatatccacttaccgtcattccggcgaaagccgggacccactagattggcgcaatttcagcagcgctgcctgtgtggagcggacccaatggatcccggctttcgccgggatgacggatttggggtggcgcgatttctgtgattgaaggtt

SEQ ID NO: 3083 - DNA, 23249 bp, synthetic construct
  misc_feature 1..23249: note = Synthetic
  source 1..23249: mol_type = other DNA
aggtctccatgaacatgccgatgatgatgtagaagacgaccaccagcaggatcgtctccagcggcgtcagccccagggtgccgatgtaggccacggccgcctggatgactcccaggtagccgatcacaatgttgagcaccatcgcggcgaagatgatcagcatgatcatcgaggtggttcgcaccgtgccctcgaaggcctgcgagagcatggccagcgacaggcggcccctggcggcggcgagggcgagggcgaccaccacgccgatcgaggcggcctcggtgggcgtcgccaggcccaggtagatcgagcccaccacgccgaggaagaggatcgccggtggcagcaggtcgccgaggctgcgcaggcgctcgctccaggtgaccgtctcggtcgtgccgtccatgtcgggccgggcgaggcagatcgccaggatcgcgaaaccgaacagggccgtgaggataaggcccgggatcatgccggcgagatagagctcggggatcgaggtctccgtcaggacgccgtagacgatcaggttgatcgacggcgggatcaggatgccgagcgtgccgccggcggcgatggatccgaggaacagcggctcgttgtagccgccgcggcggatctccggataggcgaccgtgccgacggtcgcggcggtcgcgacgctcgatcccgaggtcgccgcgaagatggcagaggagccgacgttggcgtgcatcaggccgccgggaagccaggacagccagcgggcgacggcgcggtacatctggtcggcgatgccggcccgcaggatgatctcgccgagcaggatgaagagcggcaccgagacgagggtgaagtcgacgctcttgtcccagatgaagccgccgaaggtgagagtcagccggccgttgttgaaggcgaagtcgagcagcatgctcgacagccccagcaccgaggcgatgggcaggctgagggcgaccagcaccaccagcaccgcgacgaagaggaaggctgtcatgcgttcctctggttctctgcggcgtccggcgcctcgccctgcagcagcggaatgccggccacggcgttcgcccggacggtctgtccgcgcagcagcagggtcagcacgtagatcgccaggaaggcgcagttgaaggcgaagaagaccaggccgacggcccagacgagctgcgggatccacatgggagtctgcagcggggtgatggacaccgcctggaaatcccaggactcctggtaggtgcgccacgcgcgcagggcgatcaggctggagaacagcagcagggcgaccagcgacagcaggtcgagccaggcccgcagccgccgggccagggactggtaggccacgtcgatgcgcacgtgcgcgcgctcgtagaggcagaaggagaagccccaggcgacggcgacggcgaagacgtagccggcgatctcgtcggagccgatgtaggaggtggttacgttgcgcagcaccacctcgacgaagacgaagcaggccgacagcagaaagcccgtgccgcagacccagacgctgaggcgcgaaagccggtagagcagggtgtagagggtcgtcagcatggcctggacgtcgcggcggtcccggccgccggccgggaccgtgcggtcgttgcgtctactgtacgtgatagccgagcagcttgccgaccgtggcgttccagtcctccacgcagctgctgttgcgggcctcgcagcggtcggcccacttctggatgacgtcctgttcgaccgcctccttcatcgcggcctgtccctcgggggtgagggtcacggccttctctccgccgatcgtcgtctcgcagggtccactggtgttgcaggccatgccgcgctggtcgtcgcgggccgtcgcctcccacatctcgtcctcgagcttggcgatctggctggtcagcagcgcctgggcatcagggtccaggctgttccagacgtcgttgttcaccgccaggaaggaggccgtgtagccgacggggatgcgcacctcgtgggtggcgacctgccaccacttggcgtcataggcggaggtggtgccggagacgccgcagtcgatgacgcccttctgcaggctctgcagcacctcgccgaaggcgacgggcaccggggtggcctcgagggtgttgccgatgaagtcggccagggaggcgccgtagctgcggatcttcagccctgcgagcggcttcaggtcgatggcggccggcgtgtcggcgggcagcttgcagtagaggtagctgcgcggccaggcgtagagcatcaggatccgcgagttgtacttctgctcgaattccttgttcaggaccggcttgtaggcctccatcaccgcgcgggaggtcttcaggtcggggaccatgccggccaggtcggcgccctcgaacaccgggctgtcgccggcgatgtagaggaacacgccgtgggcgaagtcgaaggcgccggccttcacctcgcgcatcaccttgaagccgtcgaggccgagttcggtcaggggcttggcgttggccgtgagggcgccgccggaggcctccggcagcgtctggttccagaagacgctctcccgctcgcgccagtgggccagctgtccccaggtgccgacgacggcgaactcgcgcttctccatcgccgccgacggcgccggcgccagagccgccccggccagcagcgtgccgatggtcagaatggtaccgaagatccgcatgcccttcctcccggcttgtggacggccgcccttgccgaacccgcgcggcggccgattgcttgggcggataatgcccgagggggcaaattataccaatatcaaatctttccatatcgatgtatttttgcgtcgacgtcggtcccggcgtagggatggcgcaatcggcatccggctcgaaggaggatctcatggctgtggcaggcgaggcgcccgcggccaacggcaagaccacgcaggggcgtacggacgtaccgccggtggaggagcgggcgaccttcctggtgcaccgtgtgaacgccttgctggcgcaggtctgcaaccccgtcttcgccgcctacgaggtcgacctgctgtcctcgcggatcctggccgtggtggccgagcgcaacgagatccgcatgggcgagctggtcgccatcatggtgctgccgcagtcgaccctctcccatcaggtgcagcgcctggagcgccgggggctggtgacccgcacccgcctggccgaagacaaccgctcggtcagcgtggcactcacgcccaagggcaggcagacggcgatgatctgcagcaagcagagccggacgatctatcaggccctgaccgaacagttcgacgagcaggagctggacctcctggtcgcctccctgaagaagatgttcgtcgccttgcagaccatgcccgagttggacaccgaggggacgatgaaggccggcgagcgggtgcggcgggcggccccgccggccgggcaggagcggccggagcaggctcagcccgggccgccgcccaggtaggagcggacgacggcggggtcgcgggcgaggtcggcgctgcggcccgcggtggcgatccggccgagctccaggacgtaggccctgtcagagacctgcagggccttgcgggcattctgctccaccagcagcaccgtcaggccgagtgtgcgcagttcccctatgatctcgaagatctggctgacgatgatcggcgccagcccgagcgagggctcgtccagcatcagcaggcggggccgggccatcagcgcacgccccagcaccagcatctgctgctggccgccgctgagggtgcccgcgggctggtgctggcgctcccgcaggatcgggaagcgatcgaagacctgctgcaggtcggcggcgagatcctcgccggccggccggctgtgggcgcccaccagcaggttgtcgcgcaccgacatcttcttcaggaccatccgcccttccggcacctggacgacgccgccggcgacgatctcgtggcagggccgcccgaccaggtcgcggccgtcgtagcgcacggctcccctcgccgccggcagaaggcccgagaggaccttcagcagggtcgtcttgccggcgccgttggccccgatgatggtgacgatctcgccctcgccaacggtcaggtcgatgtcctgcagggcgaagatgcggtcgtagcgggcccacaggccgtcgacggcgagaagcggcgacgtcgtcacgcggggctcctcctcagtccgtgccaagataggcttcgatgacgcgcgggtcgccctgcaccgcggccggggtgccttcggcgatcacctcgccgaagttcagcacggtgatgcggtcgcagatccccatgaccaggttcatgttgtgctcgatcagcaggatcgccgtgccgcgtccgcggatcgccagcagggtgcccttcagcgcctcgatctcggcggggttcatgccgccggccggctcgtcgagcagcagcagtttcgggcgtggcgccagggcgcgggcgatctccagccgtttctggtcgccgaaggagaggttgcgggcgaggtcctgccggcgcgcctgcaggcccagctcgccgatcagccgcagccgctcctcctccagcgcgcgggcggaccgggtcgggaagacgttgagccaggccgccggcgagtggcagagcggggcctgcgccacccggacgttcgcctcgaccgtccgcgaagggaagaggcgcaggttctggaaggtccgcgagatgcccagacgcgtgacccggtgcggcggcagggcggtgatgtcccgcccgtcgaacaggacccgtccgccgttcggccggtagaggccggtgatcgagttgatggccgtggtcttgcccgacccgttcgggccgatcagcccgaggatctccccggcgcgcacctccagcgacagcgaggccagggcgcgcacgccgccgaaggacttctgcagggcttccagtcgcagcatggctcagccggccgggcgcttggccgggccgcgagacagcaggcgccgcagccgctccagcagggcgtcgtcgatcagacccttcgggcgcacgatcacgatggcgaccaccagcacgccgtagaagatcatccggtagtcctgcaggaagcggaagtattccgggatcaccgtcagcaccagggcgccgaggatcggaccccagaaggtctcgatgccgccgacggcgacgaagagcaccgccaccagggtcaggtggaagttgaagtcgtgggcgatgatgtaggaggcgtagttggcgtagaggccgccgccgacgccggcgatggccgcgccgatggagaaggccaggaccttcaccagcacgacgtcgacgcccacgcagtgggccgccgtctcgtcctcgcgcaccgccgccatggccgcccccagcagggagcggttcagccaggtcaggaggatcaccagcagcaggaggaagccgaagatctcgctcagcgtcgtctgcaccgggatgttgcggaagccgaggaggccgtcgggtccgacgatgcggccgtcgatcatctgctggaaggacacgttggcgaagaagacctgcaccgtctcgctgaagcccagggtggccagggcgagatagatcccgcggatccgcaagcagggatagcccaggatggcgccgatcaccgcgcagagcgcgccgccggccagcagggcgggcagcaggggcacgccgtagagggtcgtcagcaccgccgagctgtaggcgccgatcgcccagaagccgacctgcgccagggagaactgacccacggcgagggtggtatagaagctgagcgccaggatcatgttgagcccggcgatcgacaggatcgtctcgctatagcccatcgccgtcagtcccgcccttcggtgcggcgcgagagaatgccctccggccgcaggatcagcaccgcgaagagtacggcgaagagcaccgcctgcttgtaggaggcggagatcaggccgaccgccgtggtctcgaccgcgccgacgatgatcccgccgatcatggcgccgtagaggttgccgaggccgccgatgacgacgaccacgaaggagatgagcagcaggtgcacgcccaggaaggggctgaccgcaccggtcgaggcgccgatcaggcagcccgccgcgccggccaggccggaggcgaccacgaaggcgacgacttcggtgcgccgcacgtcgatgcccatcagcttggcgacctcgacgttctcttccaccacccgcatcgcccggccggtgcgcgagcgggtgacccaggcgtgcagcgccagcatcagcagcacggcgacgacgaagctgaccagatagacgccgcgcacgtagtagtcgcccagcaggaagccgaggttctccaggggcgaggggaagggcgtgtactcgggatagaagatcggcacggcccggccgagctgcaggaagacctcctcgagcacgatcgtcacgccgacggtggtggcgaagggagcgagataggaggcgccgcgcagcgggcggaaggccaccagctcgaccagccagcccagcgccgcgccggccgcgatcgaggcgacgaaggccagcgccagggccggataggagtccccgccgagcagcagcatgaccgtggcgccggcgtaggcggagaccatgatggtcgccccgtgcgccacgttaagccggtgcatcacgccgaagatgatggtgaagccgatcgccaccagcgaataggtgccgccgaagaggacgccgttgatcaggtactcgaacagcatggctgcggacgacgtcctccaggtggcgtgccggccggcgtcagtcgaagggcttctgatcccattcgacgtactgaccgtcctcgatggtcaggatgaagcccttcttgatggcgtcgccgtgctcgtcgaacttcacatgctcgcccgtcacgctgtcgatctcggtcttcgccagggcgtcgcgcaccttggcgcggtcttcctgcaggctctcgcgggtgttcttgatcccggcggtctcgatcgccttcttgaagaggtagacggcctcgtagccgtcgaccccgaacatgttgatgtcgttgccgaactgcttgcggtactcgtcgcgcagccgctgcaccgagggcaggttgggcgagtaggagctgcccatgatcatgcgctccaccgccttgccgccgatcttcggcacctcgggcgagatgttgccgatcatgccgacccagatcttcggcttcaggccgcggcgcgccgcctccttcatgatgttgacgccggagttgaccgccgaggcgaccaccacgatgtccgggtcggcggccttgagggcgttcacctggctcgacaggtcgaggtcggcgtccagcccctccacctcggccacgaccttcacgccgtgcttctccagggtgggtttcaccacgtacttggccatcacggccgggtaggtgttgtccttgaccacgtagagcccggccgtcttgtagccgaacttgtcggccaggatgccgatctcctggtcgatgatcttcgcctcggagaaggaattgcggaaggcccactcggagatggcgcccagccccggggcgccggcgagcgacgacagcagcacgatcgggtggccgtccttgtccagctcgttgaggtagccgaaggccacctcggtgttctgcgagcgcgaggtgcccttgatcatcaggacctcgtcgtcgaacaccagcttcttgatgagcgcgatggtgagcgcgctgtcggcgccggggtcgtagccgttcggctgcggcgtgagttgcagcttcacctgtttgccgtcgacggtgacgccgccggccgcgttgatctcgtcgatcgcgatcttggagccgttgagcgcctggatgccgtagggcgccggcacgccggtctgtgcctccagcgagccgatccgcaccgtcccctcgtcctggaaggcgagggccggcgtggccaggaggccgagggccgccagcatcacgccgaacttcaatcctgtcttcgtcatcgttcctcccatctgtctgcctgccgcccttggcggggcggtctttgccgaaaaagcgggttcagaagcgcgccagcacctgttccagcacgcggttgaaggcctcgggctgctcccagtgcgggatgtggccgatgccgtcgagcacgacgcagtcgctgtcgacgccgagggcgcgcagccgctcgctcgtctcctgcgccatggccggggtggtcgaccagtcgtcttcgcccatgatgtagtggaccggcctgcggacccggtgcaggtgctcgttgaggttcagcgaggtgtaggtcagcaggtcagagaactggacgtagggcgagcagcgggtggaatcgaaggccatctccttgcgccgggcctccgaggtcgtgcggccgagcaccgagtggaacatggtctccagccagtcggtgacgttgacctcggtgctgcgcaggatgtcggcgctgtagtgcacgccggtgggcccgcggaaggccgcaccgccgtcgaccgcgaccacgcccttcaccgcctccgggtgctcgaccgagagcatgatggagatgccggcacccatggagtggccgaccaggatcggctgttcgatgcccttggcctgcatgaattgccagatcgtgtcggcgtgctcctcgctcatgcgggtcggtcggccgtcgcgcagggcggatttgccgtggccgggcaggtcgacggcgtagacccggtgggtgccggcgaagtggcgcgccgtatcgtgccacgagagggtgtcctgcgtggcgccgtggatcatgatcagcggctgaccctcgccggcctcctcgtagtagagcctgagcggtccgagatagatgtaggccatggtgttcctctggtcgcggctctggggactcagccggcgccgtgccgtttcatgccgttggcgatgaagaacagcgccttccagttgcgcatcaggtcgatggtgtccgcgcggatctgcagcacgctggagcggtagaggcggttcagcccccagtcggtgtcgaacagcacggcccactggtcgcgggtgccgctcagcaggatgtccggcgcgtcgaggcccggtgccacctgcagcaccatggcgcggtcgacggtcaggctcaccgccgtctggtcgacccggaaggcgatctcggcgcgcagccagcggcagtgggtgttgaagtcctcgtcgccctccaggaaggcggcgaagccctggaaccactccaggctcgggaaggcggcggcgctccgcgccggctgtcccgccgccgtcgtccggccctggttggtctcggctgctgggctcacaggggcacctcctcggacaggaagaagagtcggacgtggccggcgatcttatcgcgggcgtcgtggaaggcgtgctgccactccggcgaggccatggcggccttggcggcttcgtgggaatcgaagcagagctcggccatgcggtagtaggccgagccctcggcctcctccggcgccacgcggttgatggtgtagcggcgcaggccggggatgcgccgggcgtcctccacgtggacccggcggtaccagtcctcgaactccgcctcggacaggcccggcgccacgttccacagggcgacgaacttaagcacggctgttctgcctgacctgcgcaggaacgctgatcggcacggaaaggggtgccgggcgtcccaggggggctcggggcatggcggtcctccggttttcctccgccgtgcgcgcggcgaaagtttctttatttgaaacaaggtttctacaaaaaagcctgcgccgcccctcgaacgaagtcaagcgccacacggccgcggaggttgcgcgggccacaaagaaaaaggcggcgccggagcgccgcccttatctggtgcagctgactgcttgttaacagccagaccacgatctctgagaatggcagaatagctcttcactcttcccggtcaagtggtattcgtcatttgagcgaaataagcgcctgaaaggggagggcgacatgaactggaggctgggactggatctgggggcgggctcgctgggctggtgcgctctggcgctgggggaggaggggcagccggccgggattcttgcggcaggctcgcggatcttcggcgacgggcgggccccggctcgcggcgagcaggcgggaacgccgctggcggtggagcggcggacggcccgggccatgcggcggcggcgggaccgctaccagcggcggcgcaccggcctgctgcggcagctcacgacggacgggctcttcccggaagagcctgaggcgcgcctcgccctgcaggggctcgacccctttgaactgcgggcgcgggcgctcgaccagccgctgtccccgcatgagatcggccgggccttctttcacctgaaccagcggcgcggcttcaagtcgaaccgcaaggcggatcgggggaccgacaaggagaccggcaagatcgccgtcggcatcgaccggctgcgcacggcgatcgaggcgagcggcgcccgcaccttcggggagttcctgcatctgcgccgccggaacgcgcccgaccagaaccgaatcccaagcgtgcgcacgcgcctgcgccccgagccgggggagggggcgaagggcgacggctacgacttctatccgggccgcgccctgatcgaggaggagttcgaggcgatctgggaggcgcagcggcagttccatcccgaccggctgaccgaagccgtgcacgaccggctgcacgagatcgtcttccaccagcgccccctcaaggagccgaaggtggggacctgcaccctggtgccgggtgagacccgcctgcgcaaggcgcacccgctgttccagaagcgccggctgctggaggaggtcaatgccctgctgctcgtgcgcaccggcgaaacggcccagcgcctgacgcgggagcagcgggacctgctctatctgcgcctcaaggacaagcagaaggtctccttcgagaccctgcgcaccagggttctcaagctcgatccgagcacccgcttcaacaaggagagcgagagccgcagcgacctgaagggcgacgaggtggccgccctgctgggcgaccggaagcgcttcggcaccgcctgggcgcaccttcccgccgaacggcagtgggcggtggtcgagcggctgctcgacgtggagacggacgaggaggccgcggcgctgcaggcctggctgcagcaggagcacgacctgccggcggagcgggcggcggccgtggtcgcggcggccggccggctgccccagggttacggccgtttcggcgagacggcgacccgcgggctgatcgccgccctggaggccgaggtgatcgtctacagcgaggccgtcgtgaaggccggctttgggcaccacagcgacttccgcgacggcgaggtccacgccgagctgccctactacggcgccatcctggagcggcacatcctgccgggcaccggcgatcctgccgaccccgaggaactgcgggtggggcggctgaccaatcccaccgtccacatcgggctcaaccagctccggcgggtggtcaacgcgctgatccgcacccacggccgacccgccgagatcgccatcgaactggcgcgcgagctgaagctcgacgccgacgagaaggcccggcgcagccgcgagaacgcgaagaaccggatcgaggcggagaagcgttcgcagaagctgcaggagatcggccagcgtgacaccggcgccaaccgcaacctgctgaagctgtgggaggagctgaatcccgacaacgtgctcgaccggcgctgcgtctactcgggcaggcagatctcgatcgacatgctgttcaacggcagcaccgaggtcgaccacatcctgccgttcgacgccaccctcgacgactccaacggcaatcgcatcctctgcctgcgggaggcgaaccgcgacaagcgcaagcgctcgcccttcgaggcctggggccacacggatcgctggccggagatcgccgaacgggcggcgcgcctgccgcgggagaagcgctggcgcttcgagcccgacgccatgaagcgcttcgcggacctgggcggcttccacgcccgccatctgaccgacacccagtacctctcgcgcctctcccgggagtacctgagcgccctctatcccgagaagggggagggcagcagccacgtctgggtctcccccggtcgtctgaccgagatggtccgccgcaagctggggctcaacgacctgctgccggaccacaacatcggcggtggggccgagcacgccaagaaccgcctggaccatcggcaccacacgatcgacgccgcggtcgtggcggtggtcgaccggggcctgctcaacgagatggcccgcgcctccggccaggaggggcgcgacggggcggagcgtgtgatcgtgcccgagccctggcccgggttccgcgaggacctgcggcgggcggtgaacgcgatcgtcgtcagccaccggcccgaccatggcacggcctccaaggccggcctgccccggggccgcgaccagacggcgggcaagctgcacaacgacacggcctacggcctgacgggggaggccgacggccgggacaaccagctcgtcgtccaccgggtgcctctgggtgcgctgaagcccggggaccttgaccgcgtccgggactgcaagttgcgcaaggcgctacaggccttcaccgccggccgcgaaggcaaggagttcgagcgggcggtggcgcgcttcgccgaggtggcgccgccgcccttccgcggcctgcggcgcgtgcgcgtcctggagccgttgtcggtgatcccgatccgcgacgccgacggccgggcctacaagggctacaagggcgactccaactaccgctacgacgtctgggaactgccggacggccggtgggtggcggaggtcgtctccatgttcgacgcccaccagcccggctggacctcggccatccgcgccgactgccccaccgcccgcaaggtgctgcgcctgcaccgcgacgatgtcctcgcgatcgagaggacgggcgagcgggaactcgtgcgggtcgtgaagtttcgacagaccggccaactgacgcttgctgctcccgaggaagcgggagatctgaagaaacgagacgcggcttcggaccagtctgatcccttcaaatacttgtatgctgcggcaggtaccctgagggcgtggaaggcccgccaagtccgtctcgacgaactggggcgggtcttcgaccccgggccgcgcagccgcgtcgagaccgcctgatggacaggatcgtcgacatcgccaccgacggccggcacctctccgcctaccgcggcttcctgctggtctcccgggagcgggaggaggtggggcgggtgccgctggatgacgtggcggcggtgatcgtccacgcgcacggcgtcacctggtccaccaacctgatcgccgccctggcggagcggggggccctgatgctgctgtgcgggccgaaccacgcgccggtggcggtttgcctgccgatcgaggggcaccatgcccagaacgcccgcatgcgcgcccagtgggaggcggggcggccgctgcacaagcagctctggcggcgggtggtggtccagaagatccgttggcaggcggcggtgctgcagggctgcggccgcccggcggaggccttcgacctgctggctcgcaaggtgggctccggcgatcccgagaacgtcgaggcccaggcggcacgccgctactggccgttgctcatgggcgacgacttccgccgtgaccgggcggcgccgggcctgaacgccatgctgaactatggttacacggtgatgcgggcgctctgtgcccgcgcggcgatcgccagcggcttgcatccctccatcggcattcaccacgccaaccgaggcaaccccttcgccctggccgacgatctggtggagccgctgcgcccgatcgtcgacatcctggccttgcgcctcgtcgagagagggacggacagactgacaccggaggcgaagcgtgccttcgcaggcctgaccaccgtcgacctgccgacggagggcggcaccacgaccgtcggcggcgcggccctgcgggcggctcagtcgctcgccgccgccttcgtcagcggcagggccgccgacctcgacctgccccgcccgccgtcggcgctggagctggcggcggtcgaagcggtgctccagtgagcctcacccggctcagcggctatcggctcatgtggatcttcgtcatgttcgacctgccggtgggcagccgggagcagtcgcgtgccgccacgaagttccgggagttcctgctggaccagggcttcgagaagagccagttctcggtctatgctcgcttctgcaacggcaaggagcagttcgaggcctacatgcgacgcatcgaggccaacctgccgagcagcggagaggtccatgtgctcagcttcaccgacaggcagtacgagaacatcgtccgcttttccggccaacggcgacgccggccgcggaaaaaccccgatcaactcgccctcttctgagaaggcgatgcatttcgcggccccccggaacagcgctatcccgttgcggaacaacgggatagcggctgatcgaggatagccgctcagagatcgtggtctagcggcaacgcagcgcctcccgctccagcgcggcgatggaggatagccgctcagagatcgtggtctagcggcaacacggccggctcatcaccgcgccggacagcgaggatagccgctcagagatcgtggtctagcggcaaccggatcgggtcgttcagcgccttgccaaccaggatagccgctcagagatcgtggtctagcggcaacggtttggagggctccctatgaccctgcttcaggatagccgctcagagatcgtggtctagcggcaacgacccgcaggtagttgtcgagctgcggggcaggatagccgctcagagatcgtggtctagcggcaactcaacagccacgcgaagttcgcgactgtgcaggatagccgctcagagatcgtggtctagcggcaactcgcccggccgtcgccgagggaatcggtcaaggatagccgctcagagatcgtggtctagcggcaactccaggctcgtaatagagcgtcatcggcctaggatagccgctcagagatcgtggtctagcggcaacagcgcctttccggacacggcggtcgcaagaggatagccgctcagagatcgtggtctagcggcaacagaccagggcgtctacacgatccggagacaaggatagccgctcagagatcgtggtctagcggcaacctgcagcgagcgcgcggcgtcagccatggtaggatagccgctcagagatcgtggtctagcggcaacttggtctagctctgacaggaggccgacatgaggatagccgctcagagatcgtggtctagcggcaacaggctctgcgctgccgcaaggccgaggccgaggatagccgctcagagatcgtggtctagcggcaactcatgggtgaggcgccagacggagttgaggaggatagccgctcagagatcgtggtctagcggcaactcttggcgttggtgatgaagatcccgcggtaggatagccgctcagagatcgtggtctagcggcaacgatgcctcgcgccgctcgacccctatggaaggatagccgctcagagatcgtggtctagcggcaactgtcagccatgggaggccttccgcgccaggaggatagccgctcagagatcgtggtctagcggcaacgccgacgcagagcgtgaccagcctgtcctaaggatagccgctcagagatcgtggtctagcggcaacccaccgtcccggcggccgttggcagcggcgaggatagccgctcagagatcgtggtctagcggcaacagcgccttggcgtagaactcggcccggtcgaggatagccgctcagagatcgtggtctagcggcaacgaaacggtcgcgccctgctccgccggcacgaggatagccgctcagagatcgtggtctagcggcaacccagtgcttacggaacaggtgctcgtcgtaaggatagccgctcagagatcgtggtctagcggcaacggtgctggacttcccagagatcgccggcgcaggatagccgctcagagatcgtggtctagcggcaaccggccgagcgtgatgccgtggcgctgcggcaggatagccgctcagagatcgtggtctagcggcaacgtagctgcggccgccgagacggccttcgccaggatagccgctcagagatcgtggtctagcggcaacgatccgcttggacgcctccgcggcggacagaggatagccgctcagagatcgtggtctagcggcaacggacgtgacgtcgtcgtccttgacgccggcaggatagccgctcagagatcgtggtctagcggcaaccggacgcgccgctggcagcgaacgacggcaaggatagccgctcagagatcgtggtctagcggcaacatagtcgtcgctgagcgccgcataggtcggaggatagccgctcagagatcgtggtctagcggcaacgaaggctacgacacggtcgacctgcgcccgaggatagccgctcagagatcgtggtctagcggcaactcggcgggcggatcgtccagctcgacgcgcaggatagccgctcagagatcgtggtctagcggcaactgccgctcaacgcaggcacggccggcggcaaggatagccgctcagagatcgtggtctagcggcaaccacccagcggtcctcgcgctcgtcggcccgaggatagccgctcagagatcgtggtctagcggcaaccgcgacgcggtcggcctcgtccttcttggcaggatagccgctcagagatcgtggtctagcggcaacctagcgggaaggctgtccaccagcgatagcaggatagccgctcagagatcgtggtctagcggcaacaggcgatcgccagcagcgtcgatccccagcaggatagccgctcagagatcgtggtctagcggcaacagagcggccagagcaccgcggcgaggccgaaggatagccgctcagagatcgtggtctagcggcaaccggcggcgggcgtgccgtcggtgtcgccggaggatagccgctcagagatcgtggtctagcggcaacgccgacacgctgcgcgacgtcatcgagcggaggatagccgctcagagatcgtggtctagcggcaacgcgcgccagagcaaggagccgacgagccgaaggatagccgctcagagatcgtggtctagcggcaaccgctctcccatcgaccccggcgcgatccgcgaggatagccgctcagagatcgtggtctagcggcaactggaagtcgaccgttaccaagtccgtcttcaggatagccgctcagagatcgtggtctagcggcaacggcacgttgggcaggatcgtgccgttgcgaaggatagccgctcagagatcgtggtctagcggcaacacctacgacatcgcgggcgcttgtcctgataggatagccgctcagagatcgtggtctagcggcaacgcacgcagaacgagctggacctatgccagaaggatagccgctcagagatcgtggtctagcggcaactcgccgctctggtgggcggcaatcggctggaggatagccgctcagagatcgtggtctagcggcaacgcgcagggccacccgagatcgcgggcctcaaggatagccgctcagagatcgtggtctagcggcaacgcaccgccgccatgacaatcctgatcatcgaggatagccgctcagagatcgtggtctagcggcaactgatcggcgcccgtgtgttgacgacggcggaggatagccgctcagagatcgtggtctagcggcaaccagagctggccgcccctctcggcgccgaaaaggatagccgctcagagatcgtggtctagcggcaactaggcttggagcgatatccaggcggcgagcgaggatagccgctcagagatcgtggtctagcggcaacacccgctggcgccgggaactgatcctgcgcaggatagccgctcagagatcgtggtctagcggcaacgagatcgcagccgaggcgggcggctgctggaggatagccgctcagagatcgtggtctagcggcaacagcttggacaacgtctcgacgacgcgggcgaggatagccgctcagagatcgtggtctagcggcaacataccggctcacgcgggtgcgatggcgcccaggatagccgctcagagatcgtggtctagcggcaacccaagatcccgccggccctgtcgcgcggcgaggatagccgctcagagatcgtggtctagcggcaacgggtcggcgggagagcgcggggtcatgagcaggatagccgctcagagatcgtggtctagcggcgacccgtacgccatctggtggttgtgtagggtcaggcaggcccgaagcttgcgtccgtgccgcaggccgcgctatccgggaacggacacccgagtcatctgcagccggtcttgggccgtggcggcgtcagggccgcccgggtgtcgccgcggcccgggtgtcgccgcggccctgcccgcagcggaggatggacaggctgcggctcgcggccggactgacacggctcctccggcacagggcacccaaaggctatcagcgggagcgccgccggcaaggcccgccccgggacggcgggggccgcagggcggcccaacccccgctcaaggcgtgatcgccaccttgaggacgccgtcgcgctggttggcgaagaggtcgtaggcctcctcgatgcggtccagcgggaagcggtgggtgaccagcgggcgcgtgtccaggcggcccgaggcgatcacctgcatcagccggcgcatgcgctccttgccgccggggcagagggtggtgacgatcgtgtggtcgcccagtccggcgaggaaggggccgagcgggatcttcaggtcgctcgagtagacgcccagggacgacagggtgccgcccggccgcagcacgctcagcgcggcctcgaaggtcgcctgccgccccagcgcctcgatcgccacgtcgacgccgcgcccgtcggtcaggcgcaggatctcctccaccgggtcgcccttggtgaagtcgacgacgtggtcggcgcccatgcggcgggaaatctccatgcgcgcgggcacggcctcgacgccgatgatcgtcgtcgcccccatcagccgggcgccggcggtcgcgcagaggccgatcgggccctgggcgaagacggcgaccgtgtcgccgatccgcacccgcccgctctcggcgcccgaaaaaccggtcgacatgatgtcggggcacatcagcacctgctcgtcggccagcccgtccgggatgggcgcgagattggccatggcgtcgggcaccagcaggtactccgcctgggcgccgtcgatggtgttgccgaagcgccagccgcccagcggcttgaagccgtgccgggtgccggcgccgtcctgggagaggcagccgcacaggcaggcggcgctgtggccgctcggcgtgatggcgccggcgatgacccgctgcccctcggcgaagccctccaccgccgagccgagcttctcgatcacccccaccggctcgtggccgacggtcaggccgcgggcgacggggtactcgcccttcaggatgtggacgtcggtgccgcagatcgtggtggtcgtcacccggatcagggcgtcgagggggccgacgtcggggaccggcttctcgtcgaggacgatgcggttcggctcgacgaagatcgccgccttcatcttctgcgccatggcctcgattccttccgtgggcgtcgctcagtcgatgcgaccctagcggaagcggttcggcctggccttgatcccgatcaagccaagcgacgcccgacgccgatcacggcatgcggtcgggggcggtgccgacccgggcggcgccgctgcgcgcctccagccacagcagcagggcggcatggtcggtgcggcccaggtccatgcccttcatcagctcggcgtagccgtcgcgggcctgccgggtgaagggcaggtcgaggcccagcccttcggccacctgcagcaccgtctccatgtccttcagcatgatgcgcgagctgccgccgggcacccagttgcgttcgagcatcttctggccgtgcagctcgaggatccggctggtggcgaagccgccggtgatggcctcgcgcaccgccgccgggtcggcgccgccggccgcggccagcagcagcccctcggccacggccccgatggtgatgccgacgatcgcctggttggccagcttggcgatctgcccggcgccggcggggcccacccaggtcggccggcccatggcgcggaaggcgggcagcgcccgctcgaagtcctgccgtccgccgccggccatgatcgccagcgtggcggcgatggcaccgggttcgccgccgctgaccggcgcgtccagggcgctgcagccgttggcggcgtgcagcgtggcgtggtcgcgggcgagggccggcgggatcgacgacatgtcgacgaagagcgtgccgggccgcgcgcccttggccgcgccggtgccgccgaacagcacctcggtcaccaccgggccgttctccagcatggtgatgaccaggtcggcgccggccacggcctccagcgcgctgtcggcgatcctcgcgccggcggcggccagcggttcggccttggcccgggtgcggttccaggcggtgacgggaaagcccgcctgcagcaggttggcggccatgggccggcccatgatgccggtgccgagcagggcgatgcgcggggtgtcggtcatggggcggctcccttctcttgcttgtcttgcggcaggttcgacagggcgacggccacctgcccggccagccgggcgttggcgaccagcagggcgcggttggcgtccagggtgcggccggcgctggcctggtgcagccggccgagcaggaagggggtgaccgccggcccggcgacgccctgggcggcggcctccacctccgcctcggtcagcaggcgctccacctcgtcgtgctccagcgccgtctccgcgggcggcgggttggccagcaccagcccgcagcccaaggccagcgcacgctgggcgtcgatcagggcggccgcctcggccgggctctccacccggtggggcagcggcaggccgctgtcgcggctgtagaaggcggggaagccgccggtgccgtagccgaccaccggcacgcccaggccctccagcagctccagggtgcgcggcaggtcgaggatcgacttggcgccggagcagaccaccgccaccggcgtgcgcgccagctcggcgaggtcggaggagatgtcgaaggtctcgatcgcgttgcggtgcacgccgcccaggccgccggtcgccatcagcgggatgcccgcgaggcgggcgccgatcatcgtgccggcgacggtggtggcgcccagggcccggcgcgccagcaccggcgccaggtcgcggcggctcaccttggccaccgcccggccgccgcgggcgaagcgctccagttcggcgtcggagaggccggcgacgatccggccgtcgaccagcccgatggtggccggcacggccccggcctcgcgcaccgccgcctgcagggcgtgggccacctccaggttctccggccagggcaggccgtgggcgacgacggtcgattccagggcgacgaccggcccccccttggcgagggcggcggcgaccggcgggcggacgtcgaggggcgtcattccgggaagaggccctcgcccagcgccgccgtcagggcctgcagccgctcgttgcggacaagctggtcgtagggccgggccggcaccttgccccagaccggggcgggccaggcggcgtcggtcgtgaagcgggcgatgacgtggacgtgcagctgcggcgtcacgttgcccagggcggcgacgttgatcttgtcggccttgaacaggctctgcagcgcctgtgaacagtggctgatctcgtcgcagaggcggtgctggtgctcccggtccaggtcatggaagtccttcaggcccggccggcggggcaccaggatcagccagggatagctcgcgtcgtccatcagcaggacccgcgacaggggcaggtcgagcaccggcaggccgtcgcgctgcaggtcggggtgcaactcgaagctgtcggtcatgcctctctcctgcgggttcgcccgctgtcaaagctagacagcgggccggctccgggcaaccacccgtggcgccacaggggcggacggctgcgcccggggcgacgcctccggagccggcgcggagagaggcggccgatctcagccttcgctcatggcttccgcgggcatcggcgccgcggcgccccgcaccttcgcttcgatccgccggccggtctcggcgtcgatgctcttccagtaatcgaaagcgcgctcgagcaccggcgagtgcacaccggcgagcagggcgccggcaaccgtctcgaccagcgcgtcgcgctgccggtcattgaagacctcgcgcaccagcgcgcccgcctgggagaagtcgtcgtcgcccgggcgcagcgtataggcgctacggaccatctcgccgtcgctttcccagctgtcctccacagggccggtctcgtcggcccagcttctgccgccgctgttgggggcgtagaccggcgcgttgccgctgtgatggtaggccatgtgaccgttgatcatgtaggtgttcaccgggaccttgggctggttgaccggcagctggtggaagttggcgccgatgcggttgcgctgcgcgtcgttgtaggcgaaggcgcgtcccagcagcatcttgtccggggacagcccggtgccgggcaccgtgttgcccggcgagaaggccgcctgctcgatctgggcgaagaagttctccggattgcggttcagcgtcatcctgccgacctcgatccgcgggtagtcggcgtgcggccagaccttcgtcaggtcgaaggggttgatccggtaggtcttcgcctcggcatagggcatcacctggacggacagcgtccagctcggatagtcgccgcgggcgatcgcctcgaacaggtcgcgccggtggaagtcggcatcggcgccggccatggccgcggcttcggcgttggtgaagttctcgacgccctggtcgctgatgaagtgatacttcacccagaacttctcgccctgggcattgatccacatgtaggtgtgggagctgtagccgttcatgttccgccaggtgcgcggcaggccccgatcccccatca

SEQ ID NO: 3084 - DNA, 23249 bp, synthetic construct
  source 1..23249: mol_type = other DNA
  misc_feature 1..23249: note = Synthetic
gcgcccgcatacgctcgactatatcgccaagctgatcgaggacttcacgccgctcgccggcgaccgcgtgttcggcgaggacgaggcgatcgtcggcggcttcggccgcttccggggccagagcgtctgcattctcggccatgagcgcggcgacacgaccgaaacgcgcatccggcacaatttcggcatggcccggcccgagggctaccgcaaggcggcgcgcctgatggagaccgccgagcgcttcggcattccggtgatctcgctggtcgatacggccggcgcctatcccggcatcggcgcggaggagcgcggccaggccgaggccatcgcgcgctcgaccgaccgcagcctaatgctcggcgtgcccaacctggccgtggtgatcggcgagggcggctcgggcggggcgatcgcgatcgccgcgaccaaccgcgtgctcatgctggaacacgcgatctacagcgtcatttcgcccgagggcgccgcatcgatcctctggcgcgacaccgccaaggcccaggacgcggcgaccaacatgaagatcaccgcccaggaccttctgcgcttcggcgtgatcgaccagatcgtcgccgagccggtcggtggcgcccatcgcgaccccgattcgaccattctgcgggtcggcgacgcgctggaacagggcctgaagcagctggccggccagtctcccgaggagatccggcggctccggcgcgagaagttcctggccatcggccgcacggcctgagccgcgcggagcgccacgcccggcctgttgcctcggccgccgtttcacgtagaattcattaaccgttcgtcgcgtttcaggcatcttgcggtaaccgcgggttgacgctaacggtctccgataagggtcccttaaggatcacaggcgtcagactgacaccgcaattgggcggatttgccctcagtcgggagcagagcattgcgtcacatggctcgagccgcctcggtggcatcgcggaccaggggcttgaggctgttcgcttcggcggccgtgatggcgctcgctctggccgcctgccaggacagcaccatgtcccggtccaatcccaaccgtggcaatatcgcgctgtcccaggccgtgctggccgagctgcaggccaagggcatgaccagcacctcgccggtgctgatgcgcatcttcaagcaggaagccgagctcgaggtctggaagcgcgacgccacgggccgctatgcgctcttcaagatctacccgatctgccagtattccggtgagctggggccgaaggtgcgcgagggcgaccgccagtcgccggagggcttctacaatatcactccgggcctgatgaacccgaactcgtcctattatctcgccttcaacatgggcttcccgaacaatttcgatcgggcccatggccggaccggctcgcatctcatggtccatggcgactgctcgtcacgcggctgctacgccatgaccgacgaagcgatcgccgaggtctatgcgctggcgcgcgacgcgctgcgcggtggccaggagaccttccaggtccaggcctatccgttccgcatgacgccgcgcaatcttgcccgccaccgcaacaacccgaacatggccttctggcgcaacctgaaggaaggctacgatcatttcgaggtgacgcggcaggagccgcaggtcgacgtctgcgagcgccgctacgtgttcaatgcggtttcgccgaactcctcgctcgcccagggcggcacccgcgaaatgatcggcaccgatccctgggccggcacgcgcgccggccggtcggcgaccgccgcggtctcgacctccgcggccgtgccggtgtcgatcaacgatccggcccagccggttgcggcttcggccgcgccgagcagcattccagcccgcagcgtgcgcagccgtctgaccgcggtgagcggcgatggcgtcgcccggccgtcgttccaggccgcctccgcctgcccgccgcatgtcgtaccggcggcgatccgccaggcggtcgcggccaagaacgcccgcgacatggcgcaggtcgcaagcctcaccggccaggtcgaggctgctcccgcccgttccggcatcgacggcggcaccaaccagcgctttgccgaccgcttcgccaatcggcgcatccgcatcggctccagcgagccgagcttctcgctggcgagccaggattcgacccccgtgaccctgccgaccgcaggcgcgccgccgtcgccgaggcggcgccggccaccaccggcacgcccgcctcgccatggctgcggcgcccgtgccggtcgcctcgccgctgcgcgcgaccaccgtcattgcccagacgggctcggccgcgacaccggtccaggcctcggctttcgccccggtggaggcgcccgcgccgcagcagtccggcaactggttcacgcgtctgctcggccagggccaggcggccggcccggcccccgccgtggaagccccggcgccgacggcgacgcccgccaccggcgcgccggttcctgcctcccgcccgcaggcttcggtcgcaacgccggcccgcgtgaactgacgcctttcggtttcctggctgtatgcgacagtcatgtcgtgcggaggcgtgctgcacgaaagtcgaccgtggttcgatgctcgctgcgctcgcacctcaccatgaggcttgtcgagtatcgcacccagatctgcgcaataaaacgcagtccattacgccgcataaacagccgagatacagctctctacactcttgatcctgaggtgtgagcgtagcggccgcaaaggacggctagcctttgtgcaggcttgctttaaaaggccagatcaacgcgtcaggcggccaggggataggtctcttcgaccagatagggcccgccgccgaccgattccttggccgagaacagcgcgaattccggcaccaggaaggtgcggctcatgaacaggccgcgcagcgcgatccagtcggcgacatcgcgcgaacgggcgttgcggccgagccgcgccagggtgacgtgcggcgtgaacttgcgcgtttccggcggcatgccgacgcgccgcatgatccgctcgtgctcggcctgcagctccatcagcggcgggctcggcttcacggcgatgtagagggtgtgcggtttgtcgccgccgaacgagccgagcccggtcagggtcacttccagcggccgcttgcgcaccgcatagagcatgtcggcaatgtcgttggccacccgctcgccgacatcgccgatgaagcgcaaggtgatgtggaagtcttccgggtcgatccagcgggcggacccgaggccgccctgcagcctggagaggtcgtctgccatgctctccgggacgtcgaggccggtgaagaggcggggcatgggcaacctccctgctatcaggatcccgaatcgctccaggatcgatcaaggatgacgctgaccggtcccgatgtcacgcccgtgacatgcgccgcgcagtgcggcgatttcaggcggctttcagggcggtccagtggtcgagaaaggcatccagccagcggcgcactgccggatcgtgcgcgaaccggccgtcgaaatgctcctggcggctcctggcgttgggggccgacagacgctcgccggaccgcgtggtccagcggcacatcatccagtgggtgacctccgggtggaactgaatgccgtaggcggcgcgcccgacccggatcgcctggttggggaaacagtcgccggtggcgagcagttcggcaccgcggggctgttcgaagccctcgccgtgccactgatagacatggtcgggccagggcagctccgccttcgccgcctcggtcgcccgcaagggatagtagccgatctcgacatgcccctgcggatggctcgccaccgtcgcgccgagatgccgcgccagcatctgcgcgccgaggcaaatgccgagaaagggcaggttttccttcagcgcgacaccgatccagtcggtttcgcgccggatgtagtcgtcggaatcgttggcgctcatcggcccgccgaagatgacggcgccggccaggtcggccgtcgtccgcggcagcggatcgccgaagcgcggccggcggatgtcgaggcggtagccgcgctcctgaagcagccggcccacccgtcccggggtcgactgctcctggtgcagcacgatcagcatggtgtcgggctgcggccggccgggccgcggcggaccgggacgtttcggttcggaaggaagctgcgaaggtacgagcatcgcctcagaatcaccaggcgcggacatctgtccttcatctgatgaaaaacgcggcgtgctgaaagattggttaatcgaatggcagccttgcgcgccggatcttaaccttcggacgtcagccggcgatcgccttggcgagcacggtcgcctcgaccggcttctgcagcacgacgtcgaacagccccggcagcatgtccgcgggatcgtcgcccgagagcgccaccaggcgcggatgagcgccatgcgatttcagcgccagggccaccgcaacgccgtccatgtcgggcatccggcggtcgatcacggcgacatcgaaatgggcggtggatgcggcgtcgagcgcggcctggccgccgtccaccgtcgtcacgctgtggccgagcgccgtcgcgatccgcgccacgacgtcgcgggagaacgggtgatcgtcggcgatcaggacggacagcggcatggcgggcatgcgcgagggttaacgccgaatagacaagaaagtgtttattgcccccattcttttcgcggaacccgccgccccatgctcgatctcgtctcgctcgtcgcaccggttttcggcctggtggcgctcggctatgtcgcggcgctcaccgggctgctcggcgagcgcgccaacgagggcatcaccgcctatctgttcgcggtcggcgcgccggccctgctgttcaagctgatcaccgccgcggtgttcccgggcgccttcccctggggcttctggatcgcctactacgccggcgtgggcgtggtctggctcgcctccacggtgctcgcggccaagctgttccgcacctcgcatggcgacgcggtcattgccggcctcgccgctggccaggccaacacggtgctgatcggcattccgatcatcctgaaggcctatggcgaggaagccggctttccgatcgccatgctgctttcggtcaatcttccgatcaccatgacggtggcgacgctgatgctggaggggacacgctcggccaatggcgcgggcgtcgccggcaagctcgtgcgcggccttgccagccatccgctgctgatcgccatggccgcgggcatcctctgccagtttgtcggcttccggccgtccgggccgttcggcacgacgctcggcatgcttgccgacacgaccgtgccgctgtcgctgttcgcgctcggcctgtcgctgaaggcctatggcgtgagggccgacctgccggtcgcgctgatgatcagcctcctgaagctggtcgtgcacccggcgatcgcctacgtggtcgcgacgcgcatcttcgccctgccgccggtctggaccggcacggtcgtcctgttcgccgccatgccggccggcatcaacgcctatctgttcgcggcccgctacggccagggcgtcggcatcgcctccacggcggtggcgctctccaccatcctgtccgtcgccacctccatcctctggctctggatgctcggcatcggctgagccgctccgccggcttccgcatggcacgaaccaattgtgcgtcctcggggacttggcgtcgggcacgcccgcgctatttgccgcagtctcacggccctgccgttcacctggggttcaccggatggccgggagagtcgttcacgaattcgtgttcaggctgatggctcttccggcctctccccgggccgacaggtgggttggtagttcatggccccttccgcgcccggcgccagcgcccagtccggcagcgtccaaagcgcccatgacgggctcgaccacaaggtcgtgcgcgacttcttcgcgctcgcctgcggctggtggagcggcaccaccgcccgccgggcctggttcctgaccgcggcgctcgccgcgctcctcgtcgtcaatgtcggcatcaacttcctggtcaatgcctggaaccggcgcttcttcgacgcgctggaggcgaccgagacggcgaccgtcgcctgggccgtcgtcgccttcgtcggcctcgtcctcggcgccgcggcggtcggcgtcggcgtcgtcatgtcgcgcgagacgctgcaggtgcgctggcgcgaatggctggtggcgaccctgctcgaccgctggatcggccgccagcgctactatcgcatgggccttgccggcaccgagccggccaatcccgaatatcggattgccgacgacacccgcatggcgaccgagccgatcgtcgacttcgccatcggcctcctgtcctcgctcgtttcggcgctgaccttcgtcggcgtgctgtggatggtcggcggctcgctcaccatccatgtcggcgacggccgcttcgtcgtgcccggctacatggtgctggccgccatcgtctacggcgtcgccatgtccggcctcatgctgtggatcggccggtcgctgccgggcgccgtggcgcgccgcaacgagggcgaggcgaagctgcgcttcgagctgacgcgtctgcgcgagaacagcgagagcgtcgcgctgatccggggcgaggccgacgagcggcgggcgctgggtgcgacctatgccgatctcgtcgggcgctggctcggtgtcgtcgcccgccacggccggatcacctggctgaccaattccaacggcgtgttcatcccggtcctgccgctgctgctggccgcgccgaaatatctgtcgggcgacttcaccctcggccaggtgacccaacttgccggcgccttcatgcaggtgcagctcgccattgcctggctcgtcgacaattaccgcgccatcgcccagtgctatgcctcgatgcagcgcgtcacggatctcacccgcgccatcgacgagatcgacgacggcttcggtgagggcgagaccggcggcgtcaggctgacgcccagcatgtcgggtgcggtgcgcctggaggcgctgaccattgccggccgctccggccggccgctgatcgacacggtcaccctggcgatcgcccccggcgagcgcgtgatgatctcgggcgagagcggcgccggcaagtcgaccctggtgcgcgcgctcgccgggctctggccctggggctctggcaccatcgcgctgccggccggcggggccgtcgccttcgtgccgcagcgggcctatctgccggtcggcacgctgcgcgccgcgctcacctatcccgcccagtccgcggcgctcgacgatgccgtgctcgccgaggcgctcgccgaggtcggcctcggctatctcgccggccggctcgacgacgccgagcgctgggaccagatcctctccaatggcgagcgccagcgcctggccgtggcgcgtctcctggtgcagaagcccgacctcgtcattctcgacggcgcgaccagcgcgctcgacgaggcgggcgaagcccggctgatggccgtgctgacccgcgcgctcgacggcgcgacgctgatcagcgtcggcctgcggccgggtctcgaggcgctgcacgaccgcaagctggtgctcgcccgcggcgatggcggggccatattaagctcggcgccgctcgccgcccgttcacccgccccgacatcctgatctgtccgcgccgctgctgccgcgcccgaaggagccctgccgatgaccttgcatatctgggaccatttctgggacctgcgcgtgaaggaatgtccctgcgacgcgcatttctgcgactggctggaggagaccggcacgcgcggcaaggcgatcttccatttcggcaccggcggccaccacctgctcggcctgcacaacgccgagaaggggctcggcaatgccattctcggcattaccgcctcgcccggcgagatccgcacctatgagaccatgatcaccgagaatcccgagctcggctggggctacaaggcctatttcggcgacatctaccagctcgacgcgcggcttctgccggtcttcgacatcgtcacgctgtttcatgtcggcgagttccgcaccgagaagaacgacgcctatggcggcctcacggacgatgccatggtgcggctgctggccgggcggacccggccgggcggcaccatcgccttctatgcgggctcctatgcctacgacaaggcgaaggaggtgcacgaccggctggtggccgaggggatcctgatcccgaagggccagtacaagacgctgccgatgttcgagcgcagcgacaagccggtctgagcggtcgggggccggcgggccttccttttcgggcgcggccttcctacctgccgccttgccaagcggcgcgggccggtcgatcatgaccggatcgtgacgcgaagatggagcgctggaaggagcctcatgtccgacgccgagacgagttacctgggcactgtcgtttccctgaacgccggtgccgccgccccgcgtgtcgccttcgaccggcgtgaactcgacgagatcctcaatctctacggccgcatggtggccgccggcgaatggcgcgactacgccatcgacttcttcaaggacaaggcggtgttctcggtgttccgccgggcgtcggaaatgccgctctaccggatcgtcaaggatccgaagctggcgagccggcagggcgcctatgcggcgatcgccgcgaccggcctcatcctgaagcgcgggcacgacctgaggcgcgtgctcgcggtcctggaaaagccgctgcgcgtggtgcaatagggccgcaaggcccttccggcgtcaccccttgaagcggcgccaggtgagcgcgacggcaatcgagagcacaaccagcacgccgagcgtcatcagcagcgccgactggtcgagccaggcgatcgccggcacgctcagcgccatgacgacgccgttgaagcacatgtgccaggacggcgtgtgcacgcccgctgtgaaggtgccgagcgccagcagcaagaggatggtgaggctcgtcgcatcggcattggtgatggcctgaacgctcggcaggaagacgaggttcatcacgaccaggaaggcgccccagtgcaggcactgggtccagatcacgtgccagcgctcgccggcggtctcggcgcgccgccacccgatggcgatcgcgaccacagcgatgaacacggcaaggccctgccagtagaagggaatggcatgccgcgtcatcgcgacatagcccacccccagcacggtcaggaccaggatggcgacgaaggggatttcgcggatcaccaggccgccggcgcggaccttgccgccgtcggtggaggccgtcggctctgcaacctcggacatggcctgcctttcctggcactgcaccgcgcctggcgcgcgtcatgacggcgacaggataggccatgtcgcgccggcgggccacaatggtgcgggcaaggccacctcatcaatgctttgtctcgggcataggatggagaacgccatatcctgtttcgaccgtcctctcccgtgagtgccggccgggacgctcgccgcctgtaagcgctcttcgacacagatgcgagccattgggcatatggcgccaatcggcttgatcgagctccgcggacgcgtcggattaaacgtgccatcgcaacaaaaaaggcggcgccggagcgccgcccttatctggtgcagactggctacttgttaaccgccagaccacgatctctgaaggcgcaaccattgcgcgaaaccttatggccgtcaagctcgtcgagagactggcgcgctcgggcgcgaaacgtcgcccgcggatgaacaacgaaaagccgatcggtacgggcgcaccgaccggtctgccctgtcggttgccaatcggtaggctcctcagatcagttgtgactcgacacttcagcgtgttcggataggctgttgcagctaggggggcgtgcatggctttgaattatcgtatcggcgttgatcttggaaccgcatctcttggatgggcgatcgttgaactcaatcgcgacgatgtaccgatcaggctcattgctgctggctctcgtattttcagcgatggaagagatccgaaatctgaggcttccctagctgtcgatcgtcgtgcggcgcgcgccatgcgtcggcgacgtgatcgtttcaagcagcgccaagcagcgctgctgaaacacttggcaggtgtcgggctgttccccgccgacgaagcggcgcggcgggaactcgcagggctagacccctatgagctgcgtgcccgggcgttgcacgaggccttgccgctcaaccatattgggcgtgcgctttttcatctcaaccagcggcgcggcttcaaatcgaaccgtaagaccgatcgtggcaaggcggatgacgaaggcaagatccggctcggtgtcgctcgacttcaggaagcgatgcacgagaagggatctgcgaccctcggcgaattcctccatggccggcgggctgcagcaactgatccgaaccagatccccagcgtgcgcacgcgcttgcgcgctgaaagcggcgagggcgcgcggggggacggctatgacttctatcccgaccggcgcatgctggaagacgaattcgaggcgatctgggagagccagcaggttcaccacccggccgttctcacggacgagatcaagcaacgcttcttcgaggtgatcttttatcagcggccgctgaaacagccggagattggcacctgcaccctcgtggcaggtgaaaggcggctgcccaaggcccatcccctgtttcagaagcgtcggcttttggaggagctgaacgcattgcgcatcgtgtggcctggtgtgcaggccgagctgctgtctcgggaacagcgggaccttgcctatctcaagctcaaggacaagcgggccgttcgtttcgagagcctgcgcaaggcgcttaagctcgacccggatgcgcgcttcaacaaggaaagcgagaacaggagcgagttgaagggcgacgaggttgcggccgagcttggagccaagagtcgcttcggagggcggtggggccataccgcaccggcagatcagtgggagatcgtctcccggatccaggctttggaaagcgacgacgacgaagcgcagttttgcgtctggctgtccgaacgctacggcctggattccgagcaggcccgcgcggttgcggcggctcgcttgccgcaaggtttcggccggttcggcctgaccgcgacgacgcgtctcatcaaggcgctgcaagatgaggtgatcgtctacagcgaagcggtccagaagacagggctcggccaccactcggattttcgcaacggcgaggtcttggccgaactgccctattacggcatcgccctggagcgccacatcatgccgggcacgggcgatcccggcgacagcgacgaaatgcgggtcgggcgcgtcaccaatccgaccgtccatatcgggctcaatcagctccgccgcgtcgtcaatcggctgatcaagcgttatgggccgccgcgccagattgccgtggaactcgcgcgcgagctgaagctcgacgatcagcacaaacgcgagatcaacggccgcaacaggcagaaccgcgaggctgccgaacggcgttcgcagaagctcgtcgacatcggcatcgccgacaagggtgccaaccgcgccctgctgaagctttgggaggaactcaatcccgacaatgcgctcgatcggcgctgtgtctataccggccggcaaatctccatcgaaatgttgttttcgggcgcggtcgaagtcgaccacatcttgcctttcgccgcgacactcgacgattccaacgcaaacaagctcctttgcctgcgcgaggccaatcgcaacaagcgccgccgttcgccgttcgaggcattcgggcagggggccgattgggaggagatcgcagcccgggctgcccgcctaccgcgcgagaagcgctggcgtttcgagcccgatgcgatggcgcgattcgatacggaggagaagttcctcgcccgacaattggtcgatactcaatatttgtcccggcttgcgcgcgagtatcttggcgtgctgtttcccgataagggcgagggcagcggccgggtctgggtttccccgggccggctgaccgagatgctgcggcgcagctggggactgaaccatctcctgccggatcataatctcggcggaggtgcggaccagccgaagaatcggcgtgaccatcgtcatcatgccatcgatgcgatcgtcgtcgccgtcaccgaccggcatctccttcaggcgatcgcacgcgaggcggggcagcgcggccatgaggcggcgaaccggatgaccgcggatttgcccgtgccatggccggacttcgatcgggatgtcgggcaggtgatccggcaggttgtcgtcagtcaccgggctgaccatggcacggtatccaaggccggggctgccaaggggcaggactcgacggctggccgtctgcacaacgatacggcctatgggttgactggccagaccgacgagaagggcaacacgatcgtggttcgccgtgtccctctgacggcgctgaaaaagccgaccagcatcgaggccgtgcgtgacgatgaactgcgtaaggcactttctgtctggacacggggttatgacggcaaggcgtttgaggcgcgcttgtcgcggttcccggagttgggaccgctccaattccgaggcatcaggcgggtacgggtggtcgagccgctgacggtcattccgatccgcgacagcagcgggcgcgtctacaagggttacaagggtgactcgaattatcgctacgacgtctgggagctgaaggacggcaaatgggtggccgaggtggtatcgatgttcgatgcccatcaatcgtcctggacctcgccggtcagacgcgagaaccccacggcaaggaaggtcttgtcgctgcagcagaacgacattgtggccatcgagcccgagggcaaggaacgagaattgatgcgcgtcgcgcagcttcgccaaggcggccagatcacccttgccgcctgccatgaggccggtgatctgaaacggcgggacgccgaatcgaatgaagtcgacccgttcaagtatttttcgccgaccgccggcgggctcaagcgggtccgcgcacggcaggtgcgggtcgacgaactcggccgcgtcctcgaccccgggtcacgggaccgcgaacgcggcgctgcctgatggagcgcatcgtcgatattgccaccgatggccggcacctctcggcgcatcgcggttttctcgtcgtcagcgaggcacgcgaggaggttggccgcatcccgctcgacgatgtcgcagccgtcatcattcatgcccatgggataacctggagcaccagcctcgtggtggctctcgccgagcgtggctccgtcatggttctgtgcggggccaatcacgcgccgatggcggtgtgcctgccactggagggtcatcatgggcaaaacgcgcgcatgcgtgcccagtgggaggccggcaagcctctggcaaagcagctctggcgcgagatcgtcgttgctaagatccgttggcaggcggcggtcctcgcgtcgcgcggcctatcgaccgatgccttcgatctgctggcgcggcgcgtgcgttccggagatcccgacaatgtcgaggcgcaagtggcgcgccgctattggccacttctgatgggcgaggcattccggcgcgaccgcgacgccggtggcgccaatggtctgctcaactacggctataccgtgctgcgatcgctggtcgcgcggtcgatcgtcgccgccggccttcatccctccatcggcattcaccatgccaatcgcggcaatgccttcgccctggccgacgacctcatcgagccattcaggccgcttgtcgatgcgatgacggttctgcttatggcgcggggctgcacggaggtgacacccgaggcaaaacgcgcttttgccggactcatcgcgctcgatctggcaagcgatgaaggtacgacgaccgtgaccgtggctgccgggcggctggcgcagtcccttgcgcgctgcttcgagctaggcaatgcgtcaaaccttgttctgccacggccgccgacagccatcgagctcgccggcctcggcgcacttgcgacatgattccgacccagctcaacggataccggctgatgtggatcttcgtcatgttcgacctgccggttaccaccaaggtgcaaaaccgcgcggcgacgaaatttcgtgagtttctgctcgatcaaggcttcgagaagagccagttttcggtctacgctcgcttttgcaacggcaaggaacagttcgagacctatatgcggcgcatcgaggcgaatctgcccgatcgcggcgagatccacatcctcactttcaccgacaagcaatatgaaaatattgtccgattctccgggcaacgccggaaacgcccgaagaaaaatcccgaccagctcgcgcttttctaatctggacgcttgttttgaggttcgcagagaaggcgatatcccgtttgatttcaacgggatatcgcttcatctacgatagcggttcagagatcgcggtccagcggcaacttgtcaatggagcgctgcagcacagccaagacgatagcggttcagagatcgcggtccagcggcaacctcgactgcgacgcggccaacaacacctggacgatagcggttcagagatcgcggtccagcggcaacaaagcggagggccgctgacatgaaccgcgaacgatagcggttcagagatcgcggtccagcggcaactcaaccaagccacggccgtcggaccccggaacgatagcggttcagagatcgcggtccagcggcaacgcatcgtcggcccggtacatgctgccgtggacgatagcggttcagagatcgcggtccagcggcaaccgtggactccaagaggtgccgcaccttgatacgatagcggttcagagatcgcggtccagcggcaacgaggcgctggcgctccacgcggcgaaccacacgatagcggttcagagatcgcggtccagcggcaacgatccggaggatgcggttgatctcggcattacgatagcggttcagagatcgcggtccagcggcaacatggccgcctcgcgcccggccgcggcgttgacgatagcggttcagagatcgcggtccagcggcaacgtcgaccaccagccacgacggccaggtcgaacgatagcggttcagagatcgcggtccagcggcaactcatgacgacgggtgcctgtttcgcatggcacgatagcggttcagagatcgcggtccagcggcaacgccgcgctggccctggaggcggagaccgggacgatagcggttcagagatcgcggtccagcggcaacgccttgcgcgccaagacccaggccgccgggacgatagcggttcagagatcgcggtccagcggcaaccgcggcggcggccgacatgacctggatctgacgatagcggttcagagatcgcggtccagcggcaacaccgcccggcccggctccatttgtatcgccacgatagcggttcagagatcgcggtccagcggcaacaagaaggagttgggcctcgacgaaccgcaacgatagcggttcagagatcgcggtccagcggcaactccgccggcgccgcgccatcggccggcgctacgatagcggttcagagatcgcggtccagcggcaacttccggagacgcacatggccactcagacgcacgatagcggttcagagatcgcggtccagcggcaacgcaggccgcctgttcgagggcgacgatcggacgatagcggttcagagatcgcggtccagcggcaactcagagccaggtgctgcgcgcgatcggcgaacgatagcggttcagagatcgcggtccagcggcaacaagggcgaggaggtgttcgaccatatcgccacgatagcggttcagagatcgcggtccagcggcaacctgatggagcggcccgtgaccgagcagcgcacgatagcggttcagagatcgcggtccagcggcaacaatttcgacctcgcctacgacagcatgacgacgatagcggttcagagatcgcggtccagcggcaacctcaccgtgttcgcgccctatgcgaccggcacgatagcggttcagagatcgcggtccagcggcaaccgacaacgaccactgcaactcgagcgaagaacgatagcggttcagagatcgcggtccagcggcaacgtctcgccgacgctaaagcacacccgaagaacgatagcggttcagagatcgcggtccagcggcaacatatcgccctgtcgatatgccttggccatgacgatagcggttcagagatcgcggtccagcggcaacaccgcgccagtgacgataaatccggcgattacgatagcggttcagagatcgcggtccagcggcaacctcgacgtcatctgccaggcaaagccgtcgacgatagcggttcagagatcgcggtccagcggcaacagcggtgggttcgcaccgaacctcatctatacgatagcggttcagagatcgcggtccagcggcaacatgtcgcagaggtgagctatgacggcggcacgatagcggttcagagatcgcggtccagcggcaactggccattgcgccgatcgaggcggccgggacgatagcggttcagagatcgcggtccagcggcaaccagcacgccaagcacacagtggcacgtggtacgatagcggttcagagatcgcggtccagcggcaactgccaccgggaccgttcggcgcaattctggacgatagcggttcagagatcgcggtccagcggcaaccctgatggcaagccggtgatgaaacccaccacgatagcggttcagagatcgcggtccagcggcaacaacgcggcaaagttcgacgatgccggcgagacgatagcggttcagagatcgcggtccagcggcaaccgcagcaggtgactgtctgcgtgccgcctaacgatagcggttcagagatcgcggtccagcggcaactgaggcgacggcgccgtacaatgccggcagacgatagcggttcagagatcgcggtccagcggcaaccagcggacccgccaggaatacgcggcgacgacgatagcggttcagagatcgcggtccagcggcaacgcggcaacgtgcctgaccgcatcacctatcacgatagcggttcagagatcgcggtccagcggcaacgccggacggagacactacgatttcgtccgcacgatagcggttcagagatcgcggtccagcggcaacgagatgaagggcgaggacacaacaccgggaacgatagcggttcagagatcgcggtccagcggcaacctgcccgacggcgtgctcacgatcgtatcgacgatagcggttcagagatcgcggtccagcggcaacttgcgccgcagtgcgggtgtccttaggagtacgatagcggttcagagatcgcggtccagcggcaaccaggaagatggtgcgacggaagctcgcatggacgatagcggttcagagatcgcggtccagcggcaactagtactcaccgggctggctgtcgccctgcacgatagcggttcagagatcgcggtccagcggcaacactgacgacgttcctgacgacgtttcttgcacgatagcggttcagagatcgcggtccagcggcaacaaggtttgcaggtgggcgttcgccggcatgacgatagcggttcagagatcgcggtccagcggcaacgcggccttcggccgggtctatgtgccctgcacgatagcggttcagagatcgcggtccagcggcaacttgagctggccgcagtattgtcccgcccggacgatagcggttcagagatcgcggtccagcggcaacctgcgcagcgtcgtactgcgcccacgcaacacgatagcggttcagagatcgcggtccagcggcaaccagccaggcgcgcctgcgctcctcgcggccacgatagcggttcagagatcgcggtccagcggcaactgtggcacgatgtggtcaacgacggtcgcgacgatagcggttcagagatcgcggtccagcggcaacgagctaaagggcgaggacgcaacgccaaggacgatagcggttcagagatcgcggtccagcggcaactagatgattgcggcaacgccattgccagcgacgatagcggttcagagatcgcggtccagcggcaacaagccacggactgggtgcgtcaagagccacacgatagcggttcagagatcgcggtccagcggcaacttggcgtagcgctgcgcgacgcccgcgccgacgatagcggttcagagatcgcggtccagcggcaacaaactcgctcgccgagatccgcgccgattcacgatagcggttcagagatcgcggtccagcggcaacaacgaccgccctgaacgtgaatttgatcgaacgatagcggttcagagatcgcggtccagcggcaactgcgcggctcgctgctgattgccgctcgcgacgatagcggttcagagatcgcggtccagcggcaacgtgcatcacatcgttgacgcggatgtcgtcacgatagcggttcagagatcgcggtccagcggcaacttttcgaggctatgcagcgtcttcatgtgaacgatagcggttcagagatcgcggtccagcggcaacatggcgcgcgcccgagaccttgtccatcgcacgatagcggttcagagatcgcggtccagcggcaaccgacgcttcgtcctcgtcttggccttctcgacgatagcggttcagagatcgcggtccagcggcaacgtaccggtgagacttgcgcctagcaagccgacgatagcggttcagagatcgcggtccagcggcaaccgccacctcgcggcgctggtcctcgacctgacgatagcggttcagagatcgcggtccagcggcaacgaggacggcgcccgcatcgccgccgagcgcacgatagcggttcagagatcgcggtccagcggcaacctggcgagcatgtgcctgaactcttgccacacgatagcggttcagagatcgcggtccagcggcaacatgacgcgcggcttcgcctcatcgcccttgacgatagcggttcagagatcgcggtccagcggcaactacatgctgcaccagatgctgcaggcccacacgatagcggttcagagatcgcggtccagcggcaacaccaagagagtgctcacgccgcagccgaaaacgatagcggttcagagatcgcggtccagcggcaacactgcttgtatggacccgcgcaccccgagcacgatagcggttcagagatcgcggtccagcggcaaccgagcgtgtcgtcaagcgcgccgatgcgatacgatagcggttcagagatcgcggtccagcggcaacacgggtgagcagggtgcggccagcgccacgacgatagcggttcagagatcgcggtccagcggcaacatggcttttccgtagccatcggctggccgacgatagcggttcagagatcgcggtccagcggcaacggcgcggtcggcgatgccatccggccgacgacgatagcggttcagagatcgcggtccagcggcaacggcgcgacgagggccaacgtctccggatcgacgatagcggttcagagatcgcggtccagcggcaacacgggctaccagggtgcggccagcgccacgacgatagcggttcagagatcgcggtccagcggcaactcggccatcagggaggccgcgcgatgacgcacgatagcggttcagagatcgcggtccagcggcaacatggcggtcgccggagtcatagaaacacccacgatagcggttcagagatcgcggtccagcggcaaccatttcatcggccgccaagcgcctgccgagacgatagcggttcagagatcgcggtccagcggcaaccacccaacaacagcaaacgcgccaacaaggacgatagcggttcagagatcgcggtccagcggcaacatatcgccctgtcgatatgccttggccatgacgatagcggttcagagatcgcggtccagcggcaactgggcaaggacattcgacatagagcatataacgatagcggttcagagatcgcggtccagcggcaaccgaatgcgcttcgacagcgcgtccgggctgacgatagcggttcagagatcgcggtccagcggcaacgttgcagaggacttcaaggcatgagcgaccacgatagcggttcagagatcgcggtccagcggcaacccgacctgcgcatcgccggagacaagaccaacgatagcggttcagagatcgcggtccagcggcaactcatcacaaactggctcgcgggaggagcagacgatagcggttcagagatcgcggtccagcggcaacagagatcgcggtccagcggcaacgtgttacgcgccgcgcgatcaccctatatcacgatagcggttcagagatcgcggtccagcggcaactcctgaaggatcaggtgaccaccggcgacgacgatagcggttcagagatcgcggtccagcggcaacccacgcaaccctcgctccactggccgggcacgatagcggttcagagatcgcggtccagcggcaaccaagacggttaggtagcgcgacgacgacaaacgatagcggttcagagatcgcggtccagcggcaacaggggtcgcgtccttgtcgagcgaaatcgctacgatagcggttcagagatcgcggtccagcggcaactgaagcagcagtatggcacgacggaaaatgacgatagcggttcagagatcgcggtccagcggcaactacggccccggcgttccggacaattcgaccacgatagcggttcagagatcgcggtccagcggcaacatggccgggattgtagacgaggccgatatgacgatagcggttcagagatcgcggtccagcggcaactctaacctacaattgggccaatcaattttcacgatagcggttcagagatcgcggtccagcggcaaccccgtgagcgcagtcatgatcgtgatcctcacgatagcggttcagagatcgcggtccagcggcaacgggccgccgtgggggcgggtgcctgcattaacgatagcggttcagagatcgcggtccagcggcaaccccaatgagggcgtccaggtggccggcgatacgatagcggttcagagatcgcggtccagcggcaaccgtgcgaaccatgtccaactcatgggccagacgatagcggttcagagatcgcggtccagcggcaacaagttcgcgatcgagggcctgaagtccaaaacgatagcggttcagagatcgcggtccagcggcaacatgccgggcaggcggtggtggctccagtcgacgatagcggttcagagatcgcggtccagcggcaactgccccgcgaggctcgcatcgagctccgctacgatagcggttcagagatcgcggtccagcggcaacgcgacccgcgcccggtcaacgatccgacgtacgatagcggttcagagatcgcggtccagcggcaacaataccgtgcgcggccgcggtgcctggacgacgatagcggttcagagatcgcggtccagcggcaacagcatggtcaacagcggcacgccggttctcacgatagcggttcagagatcgcggtccagcggcaaccgccatgcatcggtgggcgtgtcgaagtggacgatagcggttcagagatcgcggtccagcggcaacatggcgttcgacggcaccatcatggccctgacgatagcggttcagagatcgcggtccagcggcaaccgtgttcgtcctgcaggccggcaagcactgcacgatagcggttcagagatcgcggtccagcggcaacctgccgtcgatcgagccgcgctcggcctggacgatagcggttcagagatcgcggtccagcggcaactgctgggcgcgccgtccgtcaccggccggcacgatagcggttcagagatcgcggtccagcggcaacggtggcggcccaggcggcggccttgtggcatgatcacaccgcagagacgacacggagggaagaggaatgggacaaaaccgcaatccgcccttgcagcctcattggtatccggctggtcctccgtcgaggattgactggcctctcctgcgcgacgtctcgctgtgctattctccattccggtctatcggtgaggggcgcaaatgaaagacctcgcgaccaaagatgatttgaacgcgatgctgaaccgcgtgaccatcgacgttagcttgctgatggcggggctgctgttcttcttcgtcgctctcgctgtcccttcgcggggtcataaagctccgccccgtctcccaatctgtgcgacgcaaaatgctccgcttacggccgcaatgattgcaaaagccgacaagcttgcctcatgccgctagatggtttgggcgtaggtctcgatcttgccgcgtccgctgcgaaaagctcacgtttgggccggagatcggcgaggcacgtggatgcgcgccgcatctgacatcacttcgcgcgcctcttcgggatccggatacgccccaacaggtgcgcccaacgggtcgaattatcggtcagccgcgcaacgatgtcgacgatcgatcgtggtttggagatctctgtccagcagcaaccggaacgacttggctttagctatcgcgagggccgctcaaagatcgaaggtgctgcgcattgtggcgatgccgagcaaaacgctgcgcccgcctgggcggcctcacgaaacccggatgaaccgcttcacgcgggcgcgcggcttcagggtgcggcgggtaacggtgacgccgcgggcggcgatctcgatgcgccggcccggagcgggcagaaagaagcgggcggtttcggtggatccgtcgacgcgcacgaaatcgccatcgacggctcggatgagcgacttcacggaaccgaacgtcatgacgaaaatctccggaagtccggctggcggctgtcgcgaatggaagacaaattggagcgggagaagggattcgaaccctcgaccccaaccttggcaaggttgtgctctacccctgagctactcccgcatcaacttgtctctcgaccgccgaagcatcgaagagggcggttctatgccaaaggacgcggacgattgcaatggcctcctcgcacttttttcgcgtcatgtggatgagcccgcccgcagtccccaggcaagatgaaaaaatcggc

SEQ ID NO: 3085 - DNA, 23249 bp, synthetic construct
  misc_feature 1..23249: note = Synthetic
  source 1..23249: mol_type = other DNA
catggccatctccttgcacgcatcccagccctcctgccgcataggccctcttgtggctgatgaacgaataagtctatcctaaacacagtcacatactgcccccgatcgccattccggcaaagaccgttccagacgacaagatcatgacagccccaaaggacgacagtttcccacgcggatcagagagcctgctcggccctctgttgtcgcccatgatcggcagcgccgcctttctgggcgcgggcgccctgtggctggcggtgggccgccgtctgccggaaacgcccctgccctggggggcgctggggggcgccacggccctggtctacgcggcgctggccctgaagcgccgccgccgccgccccgcccccaccctcgacgatctgcccgaggccgccttcctgctggacggcgacggcctgttgcaggcctggaaccgcaccgccgaggactgggtgggcgacagcctgttcgaacgcggccaggccttcacccaggcggtcatgatggaggcgcagccggcgctggccgatgccctgacacaggccacccgcagcggccgcgccgccttcgaaacccggctggcgggcgccgacggcctctcggtgccctgccaggggcaggcccgcctgctggacaagggccgcggcctgctgttaaccctgcgccgccgccaggccgatccgcactccaccgaaaccgacgacagcttccgccgcatggccgatctgtcgtcctgcctgctggccatcctggtggatggccgcattcgctggatcaaccgggcgggcgccatgctgctgggcgccgaaacccccacccagctgatgggcctggcctgggccgccctgcatctgcccgcccaggacgaccgcctggcccggctctgccgcctggacggcctggaaaccgaagccgccatcacctacggcgccagcctgcacggcgaacatcccgccaccctggtggaggcgctggatctgtccggcctgtcctcgggggcgcaggaactggagcagacgcagcgccgcctgcgcgccctgatggaagccgtggacgacgccgtggtggtgatcgatcaggacggggcgatcgaagcgatgaacggcatggcggaaagcctgttcggccatgcggcccccgagcttgtgggcagcgatatctggctgctgatgccgcccgaccattgcgaacgcttcctgaccgccttcaagaaacgggtgacgggcggcgaaaccggcttgcggcggcgctacgacatccgtggccagcggcgcgacggcaccacctttccggcgcagatgaccctggccgagggccgcggcggcccgcatcgcctgttcaccctggtgatccgcgatctgtccgagcgcaaagccctttattcccgcctgtcgatgaccgaaaaggtcctcgaagccacctcggaaggggtgatcctggccgatctcaagggccgcatcctgtgggtcaataccggcttcacccgcatttccggctatagccgcgacgaggccatcggccagaccaccaacctgctgaaatcggggctgcaaagcccctctttttacaaaagcatgtggggcgaactgagcaaaaccggcgaatgggccggcgagatctggaaccgccgcaaggatggcgaggcctatccggaatggctgagcatcaaaaccatctacgacgagctgggccagcccgaacgcttcatcggggtgttttcggatatttccaagcataagcgcgcccaggaaaccatccgccatctcacctattacgatgccgtgacccggctgcccaaccgctacctgttccaggatcgcttcaaccagtcgctggaacgggccaagcgcgccaaccgccaggtggcgctggtgctggtcagcctcgaccgcttcaagaccatcaacgaaaccctgggccaccaaaccggcgacgccctgctgcgcgacgtggcgcagcgcctgaccaattcggtgcgcggcgaggataccgtcagccgcctgcggggcgacaccttctgctgcatcctggccgaactgggccagacccacgacgccaacccggtgatcaaccgtattctcgatgccttctccctgcccttccagatcggcgggcacgagcttttcatcaccgccagcctgggcatcagcctgttcccgctggatggcggcgaaatggacgatctgctgcaaaaggcggaatcggcggtcaaccgcagcaaggaacgggcggaaaacagctattatttctacaccccggaaatgaacgccaattccatggagcggctgcgcctggaaaccgatctgcgcaaggccatcaaccggggcgagctggtgctttactaccagcccaaggtggatgcccgaagcggccggctggtgggcgccgaggccctggtgcgctggcatcatcccgaatacggcatggtgccgcccggccgcttcattcccatcgccgaggataccggcctgatcctgcccatcggcgcctcggtgatgaagcaggcctgccagcagatccaggattggatggcccacggcttaacgccggtgccggtggcggtgaacctttcggcccatcagttccgccagcccgacatggtgcaatcggtgacccgcatcctggatgattaccgggtgccgcagggtctgatcgaactggagctgacggaaagcgcggtgatgcgcaacgccgattccgccatcgacgtgctgatggaactgcaccatatggggctgtccatcgccatcgacgatttcggcaccggctattcctcgttcagctacctgaagcgcttccccatcgaccgcctgaagatcgaccgctccttcgtgcaggatctgggccgggaccagaccggcgaggagatcgtgggcgccatcatcgccatggcccactccctcaagatgtcggtgatcgccgaaggggtggaaagcgcccagcagttggacatgctgcgcgacatgggctgcgaggaaatccagggcttctattacagccgcccggtgcccgccgccgagttcgcccgctttttgcaggcgggcgaactctccggccgcgacgacatcactccctgatagcaaccggccaccccgtcacgtcaacggctggccgctctgatctaccggccatcggcgcgggcggccaggcagatgggggcgtacaccaccaggaacagcacgaaggccagggtccacaacaggcccgataccatcagccccaggcgcatatcgatcaggcagcccgccacccgggccagcgccgccgcctgcaccagggcataggccgccaccgtcagggcgtgcggcttcaaggggcgccccgcatgccccagggcggcgcgggtcatcacccccaggatcatgctggcgatggtgcccgccgtcagggcgtgcagggcgatggtcatgggcagaagatcgggcgcgaaatccgaaaccgccagcagccccagccccagcggcagccaggcatagcccagatgcaggatccacagcagcggcaggcgcgccgtatggcgtccgccccagccggccagccgcaccgcatgcagcagcgccgccaccgccagcaccaggcccgccaccggcggcgacagcggcaccaccgtcagcaggccgccggccagcagcgtcagcagcgccgccttgtcgaggccgggacggggcctggcctcgaacgaaaccccgatcatatgcaggccgttgcgggtgaagccgggaatgatgcgcccgccgatcaccgcgatcatgaacagcagaatgaaaatggccgccagcaggccgttcaggccaaagccgccatgcccggccatatcggccagaaccacggcatcggccacgtccagcagggccagcagccccagaaacatcatgttgcgcggcttgccggcccggatcagcggccgcgccagggccagccccagggccggcaggaacaacagatcgggcaccgccgtgaccgcaaccggcagcccggcccaaaagccgatgcgcgccgccagccacaacgccgccagcagcgccaggggcaggccgcgcaccgtggccgccccggtccagttgggaaccgccgtcagcagaaagcccgccaccgccgccgtggcgaacccgaacaccatctcgtggccgtgccataacagcggcggcaccgtcagcgccgcccgccagcccagcaccacctgcgccagccacagcggcaccatcagcgccgccgccagcccggccagcaggaaaaacggccggaaccccgcctggagcagcaccggcccccgatcggagtatggatgatttcctatttgaatcagcatattagagaccgcttatcctgaagtgatgaccgcccccacctggcgtcattgtgaaagttcgccaaaggaagaccttgatattggtcaatccgccgtcagcggcgacgcatagaaacaacctcaaaattagatcaaattgcatttaattctttgacaaatcgaggacagaccgcttaaatttttatcaccagattaatgtggagcggtaaaccgtggacaagacagcgactctgcgtaaacgccttccccgcgacgaacgtgagcggcttattctggaggaggctatccgctttttcgcggaagtgggcttcgaggggcaaacccgcgccctggcgcagcgcctgggcgtgacccagcccctgctgtaccgctactttcccgataaggacaccctgatcgagcgggtgtacgaagaggtgtatctgaagcgctggaacccggagtgggaacagctgctgaaggaccgcgcccgcccgctggaagatcgcctgagcgccttctaccgcgattactgcgccgccattttccgccccgaatgggtgcgcatcttcatgtttgccgggctgaagcgggaaggcatcaacagccggttcctggagaccgtgcaaaaccacctgctggtgccgctgtgcgccgagctgcgccacagccacggcctgcccggcctggacgaggtgccgctgtcggacatggagctgaacatggcctgggccatgcacggcgccgtgttccatatcgccatgcgcaagtggatctacgatctgcccatgcccgacaatctggaggagatgaccctccttaccgtgcgctgctatctgagcggctgcggcgaaaccctgcgcagcctggtgggaaagcagcgcgccgccgcctgatcccccgccgccccgaacaaaaccccctcgccgtttccggcggagggggttttttcatgccccgatgggacgatagccccgccaggcgggcggcagggccggcggccgcggcgccggggtcagatgcagatgccagcccggcaccgcctgcagcagcacctcggccacggcgcgcacggcgtcggcatgctgctgttcggccccggccagcaggctttgcttggcgcggcgcttggcctcctcggccgaggcggccacgaacaggccatcggcatgcagttcgccgtccgtgccctcggcataggcgcccatatgcacgaaataaagccccagcggcgcggcggccgctgcgggccgcagggtaacggcgtggccatcggcccacaccacggggcgatagccgtcgagatgcaggcttttagcatcgccgaaccagcgccgccgcaacagcggcaccgcctcgtccacatccgccgccgccacgaactgcacatcgtgcagctccagattggcgccctgggccgaaccgccgagagacaccatgaagagatgcggcgtttccatgcctacccctcctggcggcgggccaggaagggcaccgccatcaccagctgcatcaccgcccacagcaccatttcgcggttatcgatcatgccccgcagcaccaggggaatgcgggcgccaagggccggatggttcttggcgaaatcctcgcccatggccagggccaggccttcactgcccaccgacatcagggcgcccagcaccagcccccaggccagcagccgcagcagcgtggcgcggcggcgggtgggcaccgggattgggctgaacaggccatcgaaggccagggcggcgcccagaccgccgccgtggcgccgggcctggacggcgcggatcagcagcagcagcagggtggccaggcagggggcggaaaaatcgatatcgggaatatcgcggtagcggccatccaccagcagcagcaggctccacaccacgccataaaggccggagacgatcatcaggctttcggcgttgcccagcaccccgccccggccgacccggcggccgaaggcggcgggcggcggggcgccaccactcacggcctgatggccgtcttgcaggaaggcctgggcccggcgcagggcgatccacgatgcccccagccccaaggcggcgcgcagcggcgcccacagatcctgccaccagcggaagctgaccgcctcggcatggaaggcggtggtcacggtggcccaggccaggatctgcgccatcagggcgaaggccaggcgggcgggaaagccctggatcttgcgcccccaggccagggtggcggccagccccagcagcagggccagggcggcgcggcttttccagtcgcgcacctgctccaccggccccgacatggcgaatttggggcggcgatcaatgtcgagaatgccccaggcggcgcccacggtgttttccagggccgatttccacggctgatcgaaggcttcgacgatgttgtaatcgaagtggtatttggcggccacattggccattttgcgcacgaagcgggcctcgttcaccacatccaccaccgccgggccgcgatcacgccccagcgacggccagcccgcctcgccgatcaggatcggcttgccgggaaaggcggcgcgcatcttatcgacgattttcacgatgtagtcgtccacatggtcgatggacaccggctcgtcctcccagaacggcaggatgtggatggtgatgaaatccacttccttggccacctggggatatttcagataaaaggcccagacatcggcataagacaccggctgcttcaccgccgccttgacctggcggatataggcgatgagctgatcgggggtcagatcgcggcgcagcagcacctcgttgcccacgatcacccgctcgatctccttggggtgggcgttggcggccttgatcagggcggcgatttcctgatggttgcgcaggcggcccttggcctcggtctcgttggtcagccaggccccgaaggtcaccttcaggcccagcttggccgccagttccggcaccacctccatgccctcctcggaggtgtaggtgcgcacgccgcgcgccagccccaccagggatttcagatcctcgccgatctgggccggcgtgggataaaccttggtcagcgggctttgcccgcgccggaacggcgcgaaggacacgctttgcaccggccccgaccaggagtcggccaccggtaccggacgatcgcaccccacccacagcgcggccgccaaccccgcggccagcgcggccgccaccaatagcgaaagaaaacgcatcattccccacccatgaccggccttgcggcccggttgcaaaagccatgaacggcggaccttagacgttccggcgcggtcaggcaatagatcgctcaacatgtggtatgcaggggggttgccgccccctgcccgcccccctataatgccgccccatgtctgatctcttccaacaaaccgcccccaaaagcaccgaatattccgccaaggatatcgaggttctggagggtttggagcccgtgcgccgccgccccggcatgtatatcggcggcaccgacgacaaagccctgcatcatctggtggcggaagtgctggacaacgccatggacgaggcggtggccgggcatgccagctggatcgagctggagctgaaggccgacggcaccgccctggtgcgcgacaacggccgcggcattccggtggatccccaccccaaatatcccgacaaatcggcgctggaggtgatcctcaccaccctgcattccggcggcaagttcggcggcgacgcctacaaggtgtcgggcggcctgcacggcgtgggcatttcggtggtcaacgccctgtccgacagcctggtggtggaggtggcgcgcgaccgccagctgtggacgcaaagctattcgcgcggcctgcccctggggccgctgaccctggtgggccccacccagaaccggcgcggcaccaccgtgctgttccaccccgatgcccagatcttcggcgaacaggcgaaactgcgccccggtccgctttaccgcatggcccgcgccaaggcctatctctatcgcggcgtggaaatccgctggtcgtgcgataccgccctgctgaaggagggcgacgccaccccggcgaaagaggtgctgaagttccccaacggcctgcgggattttctcgattcggtgctggacagccggccgctgctgggcggccagatcttttccggcagcgcccccctggccgacgatatgggccaggtggaatgggcggtggcctggcccgaggacgaggacggcttttgcaactccttctgcaacaccgtgcccaccccggacggcggcacccacgaagccgggatgcgcaacagcctgacccgcggcctgaaacagtatggcgacatgctgaacaaccgccgcgccgggcagatcaccgccgatgatgtgatgggcggcgccgccatcgtggtatcgctgttcatccgcgagccgcagttccagggccagaccaaggaaaagctggcctcgccggaagccacccggctggtggaaaacgccctgaaagaccatttcgaccattggctgtcggccgatcccgccgccgccaaggcgctgctggagcgcatggtggaacgggccgaggaccgggcgcgcaagaaacaggccaaggaactctcgcgcaagaccgccaccaagaaactgcgcctgcccggcaaactcaccgactgcacccgctcgcaggccgaaggttcggaactgttcctggtggagggcgattccgccggcggctcggccaagcagggccgctcgcgcgagcatcaggcggtgttgcccttgcgcggcaaaatcctcaacgtggcctcggccagcctcgacaaaatgcgcgccaaccaggaaatccgcgacctgatcgaagccctgggctgcggcatccgcgacaattacgacgacgacaagctgcgctacgaaaaagtcatcatcatgaccgacgccgacgtcgacggcgctcatatcgcctcgctgctgatgaccttcttctaccaggaaatgcccggcctgatcgaaaacggccacctgttcctggcctgcccgccgctctaccgcatcagcgccgggcaaaccgtggtctatggccgcgacgacgcccataaggaaaccctgatgcgcaccaccttcgccaacaagaaggtggagatcagccgcttcaaaggcctgggcgaaatgccgccgcagcagttgaaggaaaccaccatggaccccaaaacccgcaccctgctgaaggtgatggtgcccctggtcaaaccccaccattcggaagacgaacaggccgaggcccgcgaacaaatccgcctgaccaacgaacgggtggaccaactgatgggaaaacgcccggaattgcgcttccaattcatccaggaacgcgccaaattcgcccgcgacctcgacgtttaaccccctgccccaaaagccctcgccccaccggggagagggttgggtgaggggagcgatcgaaagacggggagccttgctccccgcgcccctggcgcgagaggccgggcctctcgcactctcccttcgcaaacataaaaaaggcggcgccggagcgccgcccttatctggtgcagacgagctgcttgttaacagccagaccgcattctctgtaaagtcacattaatcgcaacaaccaaggatcgcaagaaaaaataagccacaacttccattgacaacatcctgcaatagagaaaaatcgcagggtcacacacgtggaagggttatcttatggcttggcgattggggtgcgatctgggaaccaactccctgggctggtgcgcgttgcggctggaaaacggcaagcccgtgggcattctggccatgggctcgcgtatttttaatgatggacgcgatccgaaatcgaaagactccctggcggtggaccgccggacggcgcgctccatgcggcggcggcgtgatcgtttcgtgcaacgccaggaagccctgctgaagcacctggcccaggatggcctgtttcccgccacgccggaagaagcccaggcgctgcaaagccttgatccctacctgctgcgcgccgcggcattggacgtgaaaatcccgccacaccatctgggccgggctttttttcatctgaaccagcggcgggggtttaaatccaaccgcaagaccgaccgccgcgccggtgacgataccggcaagatcgccatcggggtggaccgcctgcgcgacgccattggcgccagcggcgcccgcacctatggcgaattcctgcatctgcgccgcagcgcggcccgcgacgccaacaccattcccagcgtgcgcgcccgcctgcgcccggaaagcggcgaaaccgccaaaggcgacggctacgacttttatcctggccgcgccctgatcgaagaggaatttgaagccctgtggcaggcccagcgcccccattatcccgaaatcctgaccccagaggtgcacaaccgcctttacgagatcatcttcaatcagcgcaagctgaaggcgccccgcatcggcacctgcaccctggtggccggcgaacagcggctggccaaggcgcacccgctgtttcagcgccgccgcctgctggaagaggtgaacgccctgctgatcgccccgccgggagaggagccgaaacgcctgaccctggagcagcgcaatctgctgctgctgaaattgcaggacaaacgcaaggttggcttcgccagcctgcgtaaagccttgcgcctgcccgaagaaacccgtttcaacaaggaacgggaccatcgcgccgacatgccgggcgacgaggtgacggcggaactgggaggaaaaacccgcttcggcaacctttggcggcatttttcctgggaacgccaatgggagatcgtgcaaaagctgaaggaagaggaagatcctgccaccctgcgccactggctggaggaacagttccccgatctgagtgacgatcagaaaaccgctatcgccgccgcccgcctgccggaaggttatgggcgctttggtctgaccgccaccctcaaactgatcgaagccttgcaaagcggcgtgcgtgtttacagcgaggctgtggccgccgccggattggggcatcacagcgatcgccgtaccggcgagattttcaccgataaaaagggccgcatcgccctgccctattatggcgtggcgctggaacagcacatcatgcccggcaccgccaatcccgatgaccccgaagaactggccatcggccgtctgaccaatcccacggtgcatatcggcctcaatcagctgcgccgggtggtcaacagcctgatccgcgcgcacggtttgccggaggaaatctgcatcgagctggcccgcgacctgaaattcaccgaggaacgcaaaaaggaactgacggcccagaatgccaaaaatcagcaagaagccatccggcgcggcgagaaactacgggaaatagggcaggccgataccggtgccaaccgcgccctgctgcggctgtgggaagaactgaaccccaacgttctggatcgccgctgcatctataccgggtggcagatcagtatcgacatgctgttcaacggcagcgtcgaggtggatcacatcctgccgttcgccgccaccctggatgattccaacgacaacaagatcctttgcctgcgcgaggccaaccgcttcaaacgcaaacgctctccctacgaggcctggggcagcacgccggaatgggaggggattgcgcaacgggcggcgcatctgccgcggggcaaacagtggcgtttccagcccaatgccttgcaacagttcgaggaaagcggcggctttcaagcccgccaactggtggatacgcaatatctctcgaaactggcgcatgaatatttgcaggtattgtatccggagaaaggcgtgggcagccggcatgtgcgggtttcccccggacggctgaccgaactggtgcgccgcaagctggggctgaacaccctgttgcccgatcataattttgccggcggcgccgatcatcccaagaaccgcctggatcatcgccaccatgccatcgatgccgccgtggtggccgttatcgatacagccctgttgaacgaaatgtcgcgcgcctcggcccaggatggtacggaagggcgcgaacgggtgatcgtacccgacccctggcccacgttccgcgatgatctgcgccaggcggtggaaaaaatcatcgtcagccaccgccccgatcatggcagcactggcaaaagcggattgaaaccggggcaggatcagacggctggtaaactgcacaacgataccgcctacggcctgaccggacagaaggacgccaagggcaaggaacaggtggtgcatcgcgtgcccctgaccagcctggaggcgaaggattttccgcaagtccgcgatgaaaaactgcgccaggccctggaaagcttcaccaggggcctgaccgataaaaaagcgtttgaagcccgcctgcgtgatttttcacggctgggccccctgccctatcgcggcatccgccgtgtacgccttttggaaaccctgacggtgatcccggttcgcgatgcgcaaggccgggcctacaagggctataagggggattccaacaaccgctacgaggtttgggaattgcccaatggcaaatgggtttcagaggtggtttccatgttccaggcccaccagcaggattaccaatcccccatccgtgccgcccgccccaccgcgcgcaaaatcctgcgcctgcatcagaacgacctgctggccgtggaacaggacagcggaacgcggcagttgatgcgggtggtgaaattctctcaaaaaggcgagttaatcctggctccccctcatgagggcggtgccctgaaagcccgcgatgcggaccaggacgatcccttcaaatatctcaacacctcggccagtggcctgaaaaagctgaaggcccggcaagtgcgtatcgatgaagtggggcgggtgtgcgatccaggctttccgccccgcacggcgcggcgcaaaacccgcacagcgtaattaaggagcgccgcccatggagcgtatcgttgatatcgccaccgatgggcggcatctttccgcccatcgcggctttctcatcgtcagcgaggaacgggccgaggtgggacgggtgccgctggacgatatcgccgccgtcatcgttcatgcccatggcgtgacctggaccaccagtttagccgtggccctggccgaacgcggggccttgctgctgctttgcgcccgcaaccacgccccggtggcggtctgccagcccctggatggccaccatgcccaaaatgcccgcatccgggcccaatgggaagccggcaagcctctgatgaaacaggtatggaaacagatcatcgtggccaagatccactggcagaaagcggttctggaggcctttggccatcgccacgatgccttcgacctgctggcccgcaaggtgggatcgggcgatccggccaatatcgaggcccaggcggcccgccgctattggccgttgttgatgggcaccgatttccggcgcgaccgcgaagccgaagggatcaacgccatgctcaattacggctataccgtggttcgcgccatcgtggcccgcgccgtggtggccgccggcctgcatccctccatcggcgtacaccacgcccatcgcggcaatgccctggccctggccgacgatctgatggaacccttccgccccttggtggatgccctcaccctcaccttgtgccgccaggacatctgctcggtcacgcccccggcgaaactggcctacgcccgcctgaccacactggatttgccgcaaaacgccgttaccaccaccgtttccggcgccgcccagaaggtggcgcaaagtctggccgcctgcttcgaaagcggacaatcatcgagcctgattctgcccatcccgccgccaagcgcccagctgaccggcctggacggcttattgccatgaccgccaccactttaagcgggtttcgcctgatgtggatcttcgtgatgttcgacttgccggtaggcacgcgggaacaatcccgcaaagccacgcaattccgcgaattccttctggacgagggcttcgagaaaagccaattttccgtctatgcccgcttttgcggcggtaaggaacaattcgaaagccatatgcgccgcatcgaggccaatctgcccgatcgtggcgaggtgcatgtgctgacttttaccgataaacaatacgaaaacatgatccgcttttccggccaacgtaaaaaacgccgccgcaaaaaccccgatcaattggcgctcttttagggaaaaatcatggttttaagccaccatagggccggatatccattctatttcaaacagatatccggacacctattgtagccgttcagagaatgcggtccagcggcaacgacaccgcggtggaggcggagcccttcagcattgtagccgttcagagaatgcggtccagcggcaacgttggagtgcaggtaaaatgtcgaatgtgaattgtagccgttcagagaatgcggtccagcggcaacacattcagtgaggttgatcccgaaattaaaattgtagccgttcagagaatgcggtccagcggcaacactcttgatccgcgggaatgagagcgggcaattgtagccgttcagagaatgcggtccagcggcaacgacagcacggcggtgatgtcggagagctggattgtagccgttcagagaatgcggtccagcggcaacatcgcaccaggctatcgctgctggccgtgtattgtagccgttcagagaatgcggtccagcggcaacagcggtgcagcagccacgcctcgcctgaggattgtagccgttcagagaatgcggtccagcggcaacaaactgaaggcgcggttgtcgccaacttgaattgtagccgttcagagaatgcggtccagcggcaacgatatagccatcgcgtgtcttgctagtcggattgtagccgttcagagaatgcggtccagcggcaactcttcggcgcggcagggatcggcatccagtattgtagccgttcagagaatgcggtccagcggcaactctgtggcgttcgaaatgcggccaacgagcattgtagccgttcagagaatgcggtccagcggcaacttaaaaattattttatctaagtatatattaaattgtagccgttcagagaatgcggtccagcggcaacttcctgaggggtggggtgctcctgtcgctgattgtagccgttcagagaatgcggtccagcggcaacataaataggtgtaataaaaggaagtcttacattgtagccgttcagagaatgcggtccagcggcaacaggttcgtgatctgcgcctattattcggtcattgtagccgttcagagaatgcggtccagcggcaacggcccatgccgaggcccgcagcgtagtgttattgtagccgttcagagaatgcggtccagcggcaacaaccaggagatcgccgcgtgacccagaacaattgtagccgttcagagaatgcggtccagcggcaactgggattggtctcggacccttctgagagggattgtagccgttcagagaatgcggtccagcggcaactagctcaaagtctgatacgattttactgaaattgtagccgttcagagaatgcggtccagcggcaacttatggtcgcgaactgcatagccggtcacgattgtagccgttcagagaatgcggtccagcggcaacttggttcaaccctcgccgccgcgcccccggattgtagccgttcagagaatgcggtccagcggcaactatgacctggttggctggaaccctcataccattgtagccgttcagagaatgcggtccagcggcaacagatctgagatttcgccctcgatgaagggattgtagccgttcagagaatgcggtccagcggcaacggccccggccgtggccagcgacaggccgtgattgtagccgttcagagaatgcggtccagcggcaacgcaaccgccgcgcatatgatcgcggctttgattgtagccgttcagagaatgcggtccagcggcaactgcttcgtgatcggatcgttgctgggggtgattgtagccgttcagagaatgcggtccagcggcaacgatgccaataccgaacaacgttttcccattgattgtagccgttcagagaatgcggtccagcggcaacagcccgccgcgttgccttgccgcgccgccgattgtagccgttcagagaatgcggtccagcggcaacttccacgcagaacgagcgagattccgggctattgtagccgttcagagaatgcggtccagcggcaacgacgcttcggccgaactgaggcgtatccggattgtagccgttcagagaatgcggtccagcggcaacgtttctgtgcctttatgttgcatcgatccgattgtagccgttcagagaatgcggtccagcggcaacaggcacgccacctgtgcttgctgccttggattgtagccgttcagagaatgcggtccagcggcaactggtgccctgcagcaccgccgccggccagcattgtagccgttcagagaatgcggtccagcggcaacacaccaactatcggcgcactttcgatcccgattgtagccgttcagagaatgcggtccagcggcaacagtgtccaaactcttctggtcgatcacgtaattgtagccgttcagagaatgcggtccagcggcaacgatgattttattgcggatatcgtggccccggattgtagccgttcagagaatgcggtccagcggcaacaataggttccgtcacccgccgttggcgcctattgtagccgttcagagaatgcggtccagcggcaactcgccgccgttcgtcgtcgacgcagacgatattgtagccgttcagagaatgcggtccagcggcaacaatggcttacgcgcatcaatgagagatagattgtagccgttcagagaatgcggtccagcggcaacctctatgacgccgggcgtcttgagcgtcgaattgtagccgttcagagaatgcggtccagcggcaactgttgccccccccctgccagcccaaacgattgattgagaaggcatgcccaagaagcgcgatttccggcagactcaggaaaagcttaatgatggaaatcagcgaacgctaaaaaggcgcattataatgctcaccttcccttgcgccagccccttcaaatgcgcataataatacgcattcggaagggtgatgccgcagtttgaaaccaattcacgagatcatagcccggcttgaggctgagggctggatcaatgtcggcggttccaaacacgacaaattccacaacccggcgcggccagggataaagatcatcgtcccccgccatcgggagcaatcccctggtgtcgccaagtcgatttccgacgccgccgggtggtaacaagaggatcattccatgttctactatgggattttggacggaacggatgatgtttggggtgtgcgcatccccgatcttcccggctgccatggcggcggcgaaacgccggatgccgccatggccgatgcgatgagcgccgccgccgaatggctgggcaatgatgaggcccccaccgcacgccccatggccgagattttcaaactggttggagagggcgaggcgcttgttgtcattccccttgaacgggatagcgggcgcgttgtgcgcgcgaacatcaccgttgactccggcttgctggccgatattgaccgggccgcaaaaatgcgggggctaacccgctcggcttttctggccagcgcggccagggaaaaaatctccgcgatggccggcggacggcgctagccactcaaagtggctgttcatcccatccaacgcccgccccgctgtcaggcgccgtcgaagccgccgacgtcgaggaggatctcctggagtttcagcatcaggcccaggtccagttgcgcgctcatttcttcggtcatcagggtcagggcggcggcggaggacaggctgggtttatgggggcggtggtcggtcagggcgcagaagacatcgatgatgccggccatgcgcgacagttggttgaggtctttgccggtcaggccgcgggggtagcccgagccgtccagccgttcgtggtggtgcgaaacgatcaggttaacgcccttgggcacatcgtcgcaggtggagaggatgcgttcggccacctgcacgtgattgcgcaccgcatcccattcctgggggcttagggcgccggccttgtgcagcaccgtgcggggcaccgtcatcatgcccacattggccagcatgccgccgatggccagcaccacctgctgatcctcgggcaggccgatggccgagccgaacagcgacatcatcgaggcgaagcgcagcgaatgcacgtaggtgacgttatcgtgccgccgcacctgttccagcaggccgttcaggtcgcggttctgcaccgcctccaccacgatttggcacgatttccccacatcggcgaagggcagcggccgcccgcgcgacagatcctcgacaatgcggttgaaggcctgcagcgagctttccagcgccttgcgctggccgcccggcaggcgctgccagccctgttccacccggccgttgatctggcgcgacagcagcgacagcagcgcctggggggcgtagggctgcaccagtttttcgcggatgccggcatcgcgcagctggtcgatggtgcggaaatcctcgttgtcggcaatatagatggtgggaatccaggccagcgcccggtccttgcgcagatcgcggatcagattggtgccgctgccggcccccacctgcggccccaccagaatcacatcggggcggcgggcgcgcatgccgctgaaggccgccccctcgttatcgtaatcctgcacgtcgtagtaaagggacaacagcgtaacgacatcgttccgatgggtggaattcgaatcgatgatggcgatggaatgtttcatctgcgcaaggcgccagtgctgatcctgctaatcccttcattcacaaaccacaccgcctgatcaatgtaaaaccaaaactgcggcgccgggtcgagtgatcatctgaacacttttggggcgccgccgcctttcaggcaaaggcgtagttatccatggcgatcactccatattccacgctggcgtgcaggcgggtggccttgttgtcggccgaggcgccaagggcggtgaagaagggcagcagatgttcgtcggtggggtggttttcgcgggcatagggggcctgggcgcggtagtccagcagcgcctccacatcgccttcggcgcctttttcggccagccagccggtaaaatcgctcacccagtcctgcgggccggaccggccggcgccgctcatataggcgcgcaggttatgggtggcgcagccggtggccagaatcagggcgccatcgtccagcagcggcttcaggctttgccccaggcggtaatggtggcggggatcctggcgcggctgcacggcgatgggcaccaccggaatatcggcctggggccacagcaggctcatcaccgtccagatgccgtgatcgaggccgcgctcggggtcgagatcggcgcccatcagatcggcggccttatgggccagggcgctatcgccgggggccggataggtcattttgtagagaaaatcgggaaagccgtagaaatcgtaaatggtttcgggggccggggcggcgcccacggcgggggcgcgggtggtccaatgcgccgaaaccgccagcaccgccttgggacgcggcaggcttttgcttaaggacagcaaaaaatcgcgggccgggctctcctcgaagcaggacagcggcgaaccgtgcgacaaaaacaggctgcggggcgaacgtgcggtcatggggatctctccttgctgttcaggagaatggcccccgggcgcggcgggaacaatccggcggaagggaaattcactgttgcggcataaggaacaaaagaatcccgtggccgtcgcggcgcgatcgcggcatcatccgcccccgaaccgcccccgcccgccgcgaaaggaaggcccgtgaccgagtatcgtttttatgccgccatcctgcgtttcgtggccggaaaaacaggccgcgacgatgcccgcgttgccgccatgatggacagcctgaacaccgtggccgccgaggttgaggcccggggcggctttcaggtggcgcccgaccggctggagctgacggcgcgcgccctggccggggtggcggcctttctgcaaaagcggatcctgcccgaggtggtggccgaggccaacagcgccggggaggcccaggtgcgctgggccatcgacaccgccatggagggcgtgaaccgcctgctgagccaggccgcccaggccgctcaaggcggaacggcgggcgaagcggtgcggatcgcgctgccgcccccgcccgcccctcatgacaagtgattgaccgccttcccggccccttgcattctaagaccggccaaccgttgacgtggctcgttggccggtttccagcgagcattgagcgagcggccaaggcggcggatgccgccgcccggcgagggacgatacaaccgggcaattcattggccggttggtacaccgtgtgttgcaatgacgaagacggcccggcccaacccggcgccgcacaagggggagcataatgagcgacaaggttaaatacctgctggatgaaagccggattcccaaagcctggtacaatatcgtggccgatctgccggcgccgccgccgccgcccctgcatcccggcaccctgcggcccatcggccccgatgatctggcccccatcttctgcccggccatcatcgaacaggaggtttccaccgagcgctggatcgaaatccccgagccggtgcgcgagatctacaagctgtggcgcccctcgccgctgatccgcgcccgccgcctggaacaggccctgggcacccccgccaagatcttcttcaagtacgaaggggtaagcccggcgggcagccacaagcccaacagctcggtggcccaggcctattacaaccagcaggccggcatcaagaagctcaccaccgaaaccggcgccggccagtggggctcgtcgctggcctatgccggggcgctgttcggcatcgatgtcgaagtctacatggtcaaggtcagctatcagcagaagccctaccgccgcgccctgatggaaacctacggcgcccgctgcattcccagcccctcgccgctcaccgcctcgggccgggccattctggagcaatcgcccgacagcaccggctcgctgggcatcgccatttccgaggcggtggaactggccgcccagcgcgacgacaccaaatacgccctgggctcggtgctgaaccatgtgctgctgcaccagaccatcatcggcgaggaggccatgctgcagatggccgatgccgaggccgcgcccgatatcgtcatcggctgcgccggcggcggttccaacttcgccggcatcgccttcccctacctgcgggaaaagctggccgggcgggccaatcccaaggtcatcgccgtggagccggcctcctgccccaccatgacccggggccgctacgcctacgatttcggcgataccggccatctgaccccgctggtgaagatgcacaccctgggctccaccttcattccgccgggcttccatgccgggggcctgcgctaccacggcatggcgccgctggtcagccatgtgctcaatctgggcctggtcgaaccgcgcgcctatgcccaaaccgaatgcttcgccgccgccgtgcagctggcccgcgccgaaggcatcgtgccggcgccggaatccagccatgccgtcaaggccgccatcgacgaggccctgcgctgcaaggccgagggcaaggcggaaaccattctgttctgcctgtcgggccacggccatttcgatatgcaggcctataccgactatttcgccgggaaactgcaagacgtgccgttcgatcagcaagccctcgacaaggccctgagcgaactgccgcaggtggatgaaagcagtttctaaatccgtttcatcgtcccatccggaaacaccagggggagcgttcgcacgctcccctttttgcttgcggttgtccccacacgaacaaaggattagcatcatcggaacagaatcataacaggggggaacgttcatgagattgggcactgctctgattgcgccggccattgttctggcgattggcggttttgccgccggcgccctgacggcggcgggaacggccgccctgtccgccgccggagtgtggctggggctggcggcgatggccgccgtggccgccgccgtggccctggcggcgcgcaacgccgccctgggcggcttgcgggcctttgccgccacggcggaacgcatcgccgccggtgatgcccaggcggttccgccccatttcggcggccaagacgacctgggacggctggccgccgccatcgaacgcatgcgcgccaatctgcgccaggtggaggaagacgagcgccagcgcctggccgaacaggaaaagggcctggagaaatcgcgcaagcgcatgaagctgcttctggatttcgattccatggtcgggcgtcagctgcaggagctgggcagcgcctcgggcaccgtgaccaccctgacccgcgatctctccgacgcggtgcgccgcaccgatcagcacgccgccagcgtggccgaagccgcccgccaggccagcgccgacgtgcagggcgtggtgagcgccaccgaacagctcaacgcctccacccaggagatcgcccgcagcatccaaagcaccagcgccatcgccaacgaggcggtggagggcatcgcccgcaccggcgaaaccatcggctcgctggccgaggcggcacagaagatcggcgccgtggtcagcctgatcaacgatatcgccagccagaccaacctgctggccctgaacgccaccatcgaggcggcccgcgccggcgaggccggcaaaggctttgccgtggtggccggcgaggtgaagaacctggccaaccagacggcccgcg

SEQ ID NO: 3086 - DNA, 22595 bp, synthetic construct
  misc_feature 1..22595: note = Synthetic
  source 1..22595: mol_type = other DNA
tcgccctgccgcccgatggcgaccgccgcctcgatccggaaacgctccggcacggccagttcggcgcgcgccttgtcgaaatccaccccggtcatgccatgggtatgatagccgagccgcgtcgcctgcaatgccagcaatgcccaggcggcaccggcatcgaagctgtggctgtgcgacggtttgaaatcgtccgatccgggcgccgccatcaacgtgtcggacaggacgaagaccagcgcgccggcattcttcacccagccctgattgaaaggcagcagcagatccagaaaacgctgccagtcggcatcgtcgcgatgggcgtaaagaaagcgccagggctggtagttgaaggccgacggcgcccagcgcgccgcgtcgaaaatggtgtcgaggtcggcctgcgggatagccgaactgtcgaaggcgcggggcgaccagcgatcgaggaacaggctgtcgacggcgcgcgtggtggtgcgtggattggtggccatgctatctccgggaaaagggaagaagattgaaccgcctatgtaggcgatcgccggcgcttgcgaaggggtcagttgaccgtttcgcctgccggcatctggtcggcgggaacggtcagggcaaacagggaatcggcatcccggtcgatcagcacaaccgacggttcgcgcaacagggcctgcgccagccgtacgcgccagcgcccgaacaggccatcggcctcgccctgctcctgcctgtcctgcatagattctccgcgccgactcatccagcttatctagcgatcttatagagaagcgccttgcaagcaatgctggcagacaggacagaaaaatttgcgggacgggcgggcgcgacgccatgaaagcggcgacgccgctgcgcacaaggacatgaaaagggcgcggaccgtggccggccgcgccctttcccgatcgttacagcttgccgctgagcgacacgccgatgatgcggggttcgttgaacaccggcgccatgtaattttcgatcacgcccttcacattcttctcgcccgtgatgttgcgggcgaaggcggcgatctcgtacttgccgtccggcgcggtatagccgatcttcaggccaccctcgaagtcgcccttcgaatagaactccttcgtcttgtagagaacgaagttggtatagccctgaatgttccagtcggttgccgcgaacagcttgccgccattgcccagcggcacgtcgtagcgggccgcgatgttcgcggtatatttcggcgcgttgggcagcgggttgccgtcgatctgggcgaaggtgccgcggccggcgacgatcacggtcggatcttccaccgtgcagaccaccacgccgttcagcgtgcagacctgcgcatagacattcctgtcgttgatttcgctgtgcagcaggctgagaccggccgacagcgtcaaattctcgaaaggacgggcttcgaggtcggcttccagaccataggccttggccgcgtcggcgttgaacaggacgccgttgccgttgacgtcgttgccgttcaactggatgtccttcaccttccaggcgaagcccgacatgttgaagcgcaggcggttacccagcaggctggtcttgatgccgccttcgtacgacatgatcgtttccgaatccgccgtggtgaaatcgctgttgaagacagccgaacggccctgaatggtcgggccacggaagccacgcgcgacgcgggcatagaggctgacttcggggctgacttcatacaaggcgctgacgtcccagctcggttccttgccggtcagcttgacatagcgacggccggcataggtggagacgccggctgcattggcggtcgcgcggaccagacgggtttccttcgtgtccttggtgtagcggccgccggcggtgatggtcaggcccggcacgacttcgtagctcgcctggccgaacaggccccagctttcattcttgttgcgcaaacgcacccagttgttgggattgttggcggcaccggtcaggaaataggcgcgctggtagaagtcggtggtgtcgcggctgtcgaaatacatgccgccgacctgccacttgaaggcgctgtcgccattgctggcaaggcggacttcctggctgagctggtcgaggtcgcggacattgccctggctctggccgaagccgttcgccacgccaccgaccggatagtcggcgccagcgccgccatcggtatcaccacggctgtagccgctggtggtttcataggcggtgatcgaggtcagcgtgaccggccccatgtcgatcgcgatattttccgacgcgccgtaggtcttgtaagcctgcggattgctcatcgcttcgtcgagggcgatcttcgaccggggttcgcccgttacgctgttgctgcccttggtgagaccggcgcggtggaagatggtggatgtgccgtcatagtcgcgcgcatggacgctggtcagcatcgagacattttcggtcggcgtcatgagcagctgaaggcgcaggtccttctcattatagccgcccatcgcgtccttcttgggggacacggtgccgtcggcgctggggccttcatacgtgttgtcgacccagtcgtcgcgatgctggtagagggccgatacgcggaaggcgagcttgtccgcgacgatcgggccgccgatgccgccatcgaaggtgacggtgttatagctgccatagctggcctgggcgcgcccctgccagtccatcgaggggcggatggtgtcgaacttgatgatgcccgccgtggtgttgcggccgaacagcgaaccctgcgggccgcgcagcacttccacctgattgacgtcgaacaccgggttcgacttcagcacgacatgctccagcacgacatcgtcctggatgatcgacaccggctgcgaggcaccgagatagaagtcgatattgccaaggccgcgaatgtagaagcgcgggaagatgcggccggtggtggtttcggcatagaggccgggcacgcgggcggcgagttcgaggatatcgccgccgccggcggtcaggttgcgcagcgcgtcgccctgcacgacgccgaccgagacgggcactttctgaagattttccgagcggcgttcggcggtgacgacgatttcgtccagttggtcggcgccggcggcttcctgcgcccgtgcggcctgcatggtggtcagggcgccgagcgcggcggtcagcatcagtgccgaccgggtgaagaaggtcttggacaaggtcgttccccgtaatattgttttgcaaaggctcgtggcctccatggccgccgcggctagggttcgatcatgtccttattgtgacataatgttgctgggtcgcggcggctgatcgcaaagtgcggcgctgtgacaatcgcgccacaaatgggcgcttgtgccgcccgttggaaataccgagcatgcaccgcgccggatggccatggacgccgcatcgggttatgcgtgccgcccctgacatccgcaaccggacgccccacccccatgagcatgcaactcctgctggtcgaggacgacaagcatctgcaacggcaactggtcgaacaattgtcccggttcggccatgacgtggaaacggccgacgacggcctggccgcgctggcgatcgtgggccagaggtcgttcgacgtcatcattctggactggatgatgccatcagtcgacggcatcaccctgttgcgccaattgcgcgaggccggaatgaacgtcccggtgctgatgctgaccgcgctgggccagacattcgacaaggtggaagggttcgaggccggcgccgacgattatgtcgtaaagcccgtcgatccgctggaactgaatgcccgtatcaaagcgctggtgcgtgcgcgccaagtgaaagacagtccggccgacacgatcagcgcgggcgatatcgtcatcagtccgtcgcgcctgcgcgcctggcgcgacgggcggccgctcaacctgtcgcaaacggaattcaagctgctgctggaactggcgcgccatgccggcacggtcgtcacccggccgatgctgatcgagcgcatatggggccatgacttcgcgcccacgaccaatatcgtcgaagcgcatatccggcatctacgcgtgaagctgctggaacatggggacgatccgatcaatacgcagcgcggcatgggctattccctgcgcacatgacccgccacctccaatcgctgcgcggactgaccatcgcgtttctggccctgttcctgctggtcaccacggctgcgggtctgggaaccttcttcgccacgctctcgatgatcaatgcgctggtggacgagcgggtggaggcggaaagccatgccatcgccccgaccggcgcggatttcgaccagacggaatggcaggagcggatcagccagatggcgcaggagcgcgaaacggcagaccttggcatgttgctgaccgacgcgcggggacacccgatcgccggcaatgtgcgcttttcccggccgctgccgctgggcttttcttcgctcgaccggcgcgaccggatcgaggggttgagcgccgggcgggtgctggtccgcgatctgggccggggcgtgcgtctggcggtctttgccgaaaccgagccgatcgacgattatttcgcggtccgccagcgcatctatattgctggcttcggcgccatcatctgcgtcgtgctggctggcctactgatgttccgccggctgatcggggagcggatcgaacagacgcgacggacggcggagtcgatcgtcgaaggcgacctgtcgcggcgcgtgccgctgctgggcgatggcggcgagtttgatcggcaggccgctgccttcaaccatatgctcgaccggatgaacatgctgatggcggaaatccgcaatgtctcgaacgacatatcgcatgaattgcggacgccgctggcgaaactgcgcaacgaactggccctgatcgaatataaggacgaggccgcaccggtccgtgaaagcctgcaacgcacgaccgcacaggccgacgaactgctggccatgttcagcgcgatgctgcggatcgcggacttagagagcgggtcgcggcgggccgggttccagccactcgatgtcgatctgatcgcgcaggacatggttgagatggcccggccgctggccgacgagcggcagcagccgatcatcctgcaaccaagcggccgggggcagatgaccggcgaccgccagttgctgtcgcaaatgctgctcaacctgatcgaaaacgccatccgtcatacgccggaaggcacacgcatcactatcgccgttatgcggcgggtcgatgccatcaccttgaccgtcacggataacggccccggtatcgcaccggcgcagcgtccgctggtgatgcggcgtttcggccggctggacaagagccggtctcgcggcggccatggcctgggcctgccgctggccgacgccatcgcgcggctgcaccatggcagcctgatgctggaggatgccgcaccgggcctgcggatcgtcctgaccctgccattttgacggacatgaaaaaaccggcgtgacgccaaaagcgacacgccggtcgatcaatgcgtcagcgcaggatcagaatttgaagctggcttccacgccataggtacgtggcgcgttgaagttgccatagtcgcccagcacgttggcgatgctgcccgtggacacgctgctggtcggggcggatggcaggctgttcgacggatcgcggcggaacacatattgctcgttgaacaggttgcggccccacaggctgagcgtcaggttgcggccgttgccggtgccgatgtccgccagcgagatgcgaccgttgaagatcagcgaactgtcattcttggtggcgaactgatcgaaggcctgggtggcctgcgaatagttgccgtcgaagtggaatttcagcttcgtgtcgccaccgccgaccggcacggcatagtcgatcgacccgctcgcggcgttgcgcggcgtgaacacgatgtagaaattctgatagacgctggtggatgcgcccgacgtatccgtggcggtgatgagcaccggcgggatcttcgtgtaggtataggcataggaagcgttcagcgtcagcccttcgaccgggttcagcgtcaggtccgcctcgatcccgcggatcttggtggtgccgggtgcattgatcgtgacgaggttgttgaagctgctggaaccgacgaactggatggagctgatgtccacctggctgtccttgcggtccatgatgtagccggccaggttgaagcgggcgcggttgttccagaagtctgacttcaggccgatttcgtaggacttcacatcttcaggatcgaacgcctgatagttggacgtgcgcgagctggcgccgcctgctcgatagccggtcgcatatttcgcgtagacgtgcaggtcgtcgctgacgtcataggcgagcgttgccatcgggttgaagcggttccaactggcgtccagcggcttgtagccgacgctgacggcgggcgggttggtgtcgtaattcacgttgcgcgaataatgcagcacgcccttcttctggtcatgcgtgtagcggccgcccacggtgatgtgcagcgcgtcggtcgcgttccaggtcaactgaccataaccggcatagcttttcgaccagacttccgacgcacggtcgatcgcgcagccattgaccgccgatccggcgaaggccggggttgaggcggtgcagaagggaatggtcacatagtccgcgccggtcacgatgccattggtgtaggtggccaccgcccccatcgaactgggtgtcgcggcgtcatcgctcacatgttcgttgaaatagaacagcccggcgacataatcgatattgccgaaggtgccgacagcctggaattcctgactgaactggcgctggcgcagatcggccaggctgtaacggctgaaggcgcagggtgcggccgcggtacaggcgctggtagcggtgccaaggccgagattcaccagcggcggacggtgggcgccgccgctattgtcccactgggtcgcatcgacgccgcgccatgcggtgatggagcgcagttcgatctgcggcgagacttcccacttcagcgagttggtgaagccatgggtcttgtcgacgctgacctgctgcggcacgccgatatcggcttcgctcatgcggctgctgccgttcacggtgacaccgggcaggagcggcttgaccgggccaccggtcaagttggtataggcggtgccaggcagggtgcaggcgggctgcgacgcctgcgtgccggtgccgcaaccattggggttgtagttcagcaactggctgtagaagggcgtattttcgtccttcgcgacatcataggagaagtcgttggtgatgctgctggtcggctgccagcggacagccgcgcgcaggcccttgcgattataatagttccagccggcctgaccctccatcgggttctttgttgtggcgtcctgatgctggatcacgccgtccagcttgatcgagaagccggcgatcgagggcaggttgatatgggcattggcggtgcggctgccataattgccggcgccagcttcgacgctgccgccccattcgccggttggcgccttgctgacgatgctgagtgcgccaccttcggtattgcggccgaacagggtgccctgcggacctttcagcacttcgacgcgctcgatgtcgaacagcgccgcgttcaggccgtgctggcgacccatgtaaacgccgtcgacatagatgccgacgccctgttcgcgggcgggctggttggcgtcgagcggcacgatgccgcgaatgccgatggtcagcgcggactggcgcgcttcgaaggtcgcgatgcgcagcgagggcacggcgccgtcggctaggtcatagagactggtgacgtggcggtccttgagcgcctccgtgctcatcaccgccatggagatcggcgtttcctgaagattggtttcgcgcttggtcgcggtgacgacgatttcgccaaggccggcatcgccgggcgtttcggcggcggcggtggcgtcgggcgtggcggtctgggcgaaggcggccggcgcgaccaggctcgtcaaagcggagccggcaagcaaagtcgcccgcacgaatcgatttaacatcatgaaattcaacccctttgtgatttgattctgttcaccggggcgctgatatggcgtaatcaagacagtaagatttaagattgaagacagtccgggcggatgatcttcattttcatgtcatattgtttccaaacgcatggaatcgcgtaacttattgcatgcagccaaggcgcgggaaattttgcctgtcggcaatcggatgctgctcgatggcacaggacgggcgcccggaccagcggctcactacgccggcagggtaccggggcgcagataggggaacatgtgcgcgacataatcggccttgcccagatcgacaccctgggcgcgcaggatcgcataggctgtcatgacatgaaaataaaattgcggcagcgcccagtcgcgaacatattgttcggcggtcaggtcgaatatcatgccctgcggcaggctgtgcgcgatcggcgtggccggatcgaggacgggcgcgtccgttgcagcggcctccacgattgcgatggtttccgcaatccgcgcacgcgcgtcggcgacggtgccgggctgcgcggcggcatgacgcccctcctccagcaacagggctatcgatgggggaaacgcctcttggcgcaaccggaacagcccttcctgcgcctgtacgcaggcaaagcggatctgggtcgagagcggaaacatgtcgggcgccagccgggccgtcataatcgcctgcgccttgtcgcccagcgccgcctcatcgaccttgccgagccaggccgaaagcgcccccaacatctggacataggtcggtgcgagaatgtctgtcagcgtcatgatggtctttccgtttcggccatggtgtggcggacatgcacggcccggcgccgtggagcaagcgccgccaacgatcggcatggtcagcctatcgtcagagggccgaacgaaaagatcaccgggaggcttgtccgatcgagcaagcacaaaaaaggcgacgccggagcgtcgcccttatctggtgcgtactgacacttgttaactgccagaccgcgatctctgatgcttgacttaaagcgtgacggggccagcggtcaagccccccgaaccatgacaaaatatgttacgcccgaatacgacttgatcatctgaccatagatttcattgttccctgactatcggggggatgatcgactgatgggcgaacataaaatctggcgtctgggtgctgatctgggcgcgaactcactgggctgggccgcgatagaactcgacgcccctgtaaacggcaagccgatagccatcctcgctgcgggttcgcgcattttcagtgatggccgagatcccaagtccggcgcgtcgctggccgtggaccggcgcgatgcgcgggcgatgcggcggcggcgggaccgcttccagcaacggcaaaaggcgttgatcaaatatctgatcgccgacggcctcttccccgccgacgaagcggcccgcaaggcgatggccgcgatcgatccctatgcggtgcgggcacgggcgctggacgaagcgctgaccctgccggaactgggccgggcgctgttccacctcaaccagcggcgcggtttcaaatccaaccgcaaggccgatcgcaaggcggatgacgacgcggggaagatcgcagccggtgtggaagagctgggaaggaaaattcgggcagccgaagagcaggcgggtgcagagccgggcagttggaccttcggcaaatggctgcacatgcgccgcatcggagcgaccgacgccaataatattccgcgcgttcgcacccggctggacaccgagaaagatgaagcgggaaaggagcgtggctatgatttctatcccggccgcgcgctgatggaggaagagttcggcgccatctgggccgcgtaggcgccgcaccatcctgatgtgctgaccaacgacgtccatgaccggctgcatgagatcattttctaccagcgccccttgaaagcgccgcagatcggcatgtgcacgctgatcgcgggcgatccgcgtttgcccaaggcacatcccctgtttcagcgccgccgcctgctggaggaactcaacgcgctgatgatcgtgcgaaccggcgaagtcgcgcagcggttgacgcgggaagaacgggacattctgttcctgaagctcaaggacaagggcaaggtgagtttcgcgaccctgcgcaagacgctcaagcttgatcccgacgcgcgattcaacaaggaaagcgagaatcggaccgacctgaaaggggatgaagtagcggcggcgatgggcgccaagacccggttcggcaatcgctgggcccatctgtcggcagaagagcaatgggaggtcatcgctcggctggaggaggtcgagagcgatgccgatgatgcgacattccgcgcatggctgaccgaagcctatgcgttgacaccggaacaggcgcgcgctgtcgccaatgcgcccttgccgcccggctatggccggttcggcgaggtggcgacccggcggctggtcgacgcgctgcgtgatggcgaaaaggacgggcgcgtgcttgtgtatagcgaggcggtcatcgcagcaggcttcgaccatcatagcgatctgcgcaccggcgagattttcgaggatgcgcaaggccgcccgcaacttccctattatggcgtcgcattggagcggcacatcatgccggggacgggagatccatcccattcggatgagatgcgggtcggccgcctgaccaatccgaccgtccatatcgggctgaaccagctacgccgcatcgtgaacaccctgatccgcgcctatggtccgcccgccgaaatcgcgatcgaactggcgcgcgaactgaagctgaccgacgacgacaagaaacggatcaataaggaaaataatgacaaccggctagcggcggaacggcgcgggctgaagctcgaacaacttggccagcgcaacagcggcgccaatcgggcgttgttgaaattatgggaggagattaattccgaaaacgtcctctcgcgtccctgcgtctattgcggtgaaaacatcggcatcgaaactctgttttccaacagcgtcaatgtcgaccatatcctgcccttcgcattgacgttggacgacagcaacggcaacaagatcgtctgtcacacccgctgcaatcaggcgaagcgccgccaatcgccgtttgaagcctggggccacacgccgcgctgggaaggcatctccgcgcgcgccgcgcaactgcccaagaacaagcgctggcgcttcgaaccggacgcgatggagaagttcaaggatgaaagcggctttcaggcgcgccatctggtggacacccaatatctcgcccggctgtcgcgcgaatatctggcgacgctctatcccgacaagggcgaagggacgggccatatctgggtttcccccggccggctgacggagatggtccggcgcaaactgggcctcaacgacctgctgcccgatcataattttggcggcggcgcggatcaggccaagaaccggctggaccatcgccaccatgccatcgacgccgtagtcgtggcgatcatcgatcgatccatgctgaatgcgatcgccaaagcctctggtgaagaaggcgcggaagggcgcgaacggatcatcattcctgaaccctgggacggcttccgcgatgacctgcgcaccgcagtcaacgccatcaccgtcagccatcgcaccgaccatggcaccgcgtccaaggctggcttgcccaagggccaggacgcgaccgccggccgcctgcataatgacaccgcctatggttttaccggagagaccgacgccaagggcaacagcatcgtcgtgcgccgcgtgccgctgtccagcctcaagaagctggctgatctggatcgcatacgagacaccgatctgaaggccgcgctccaccagcatctggacgggctggaaggcaaggcgttcgaaaaagcggtggcggatttccccgatcgggaatggcatccttttggcggcatccgtcgcgtgcgcgtgaccgaagccctgtccgtcattccgataagcgaccggaatggacatatctataagggatataaaggcgattccaattatcggtacgatgtatgggaattgccgggcggcaagtgggaggcggaagtggtttcgacgttcgatgcgcatcagccgggctggatatcgaacgttcgcaaccttagcccgaccgcgcgcaaggtcctgagcctgcaacagaatgatgtcgtggcagcgaccagccccgaacaggagcggttgctgctgcgcgtcgtcaaattcggccaggatggcaggctgtacctcgccgaaccgcaggaaggcggcccattgaaatccagggatgcggacaagggcgatcccttttcctatttctccttcttccctgccaaacagaaggcatggtcgtttcgcaaagtccgtatcgacgaaataggccgcgtcctcgaccccggttttcctgcccgcaccgcccgtcgcaagacacgcaagacaatctgaccagggtgggggcgagacgaatggacagaattgtcgatatcgccaccgatcaccgacatctgtccgcctatcgcggtttcctgatcgtgtcgcgggatcgcgaggaaatgggtcgtgtgccactggacgatgtcgcggccgtcatcgttcatgcccatggtgtgacatggtcgaccagcctgatcgtcgctttggccaagcgcggtgcggtgatgctgctgtgcggcagcaatcacgcccccgttgccgtttgcctcccgctggacgggcatcatgcccagaacagccgcatgcgtgcgcagtgggaggcaggcaagccactgtccaagcaattgtggcgccggatcgtcatcgccaagattcgctggcaggcagcggtgctggatgccaatggcatctcctcctccgccttcgacctgctcgcccggcgcgtgggttcgggcgaccccgacaatgtcgaagcacaggcggcgcggcgttactggcccctgctgatgggggatgggttccggcgcgatcgggatgcgaacgacatcaacgccctcctcaattatggatatacggtgctgcgatcgttgtgcgcccgtgccgtggtcgcgtccggcctgcatccgtcgatcggcgtgcatcatgccaacagaaccaatgcctttgctctggccgacgacctgatcgaaccgttccgaccactggtcgatgcgcttgccctccatctggtcgcacacggaattgatgcggtgacgcctgaagccaagcgcgcatttgccgggctgatcgcgctcgacctgcccggcgcagacggcacgaccaccgtagcgggcgccgcgaaccgtgccgcgcaaagtctggcgcgcgcattccagaccggacaggcagcggatatcatgcttcctacacccccgtcacggctggaactggccgggctcgacttgctgctaccatgagcgcaacccagctgagtggataccggctgatgtggattttcgtgatgttcgacctgcccgtgaccaccagggaacaggcgcgcgcggcaacgaaattccgcgaattccttctggatgaaggctttgagaagagccagttttcggtctatgctggcttctgcaacggcaaggaacagtttgaaacctatatgaggcgggtcgaatcgagcctgcctgatcgcggcgacgtccacatcctcagtttcacggaccgacaatatgaaaatatcgtgcgattttcaggacagcgccgacggcggcaacggaaaaaccccgatcaactcgcgctattctgatgattctcgtgatttttacgctgatggatcaatggatattactttgtttttcaatgcactatccattgatgcatcatagccgctcagagatcgcggtccagcggcaacggccgccgcgagtggaatggcccgaccgccatcatagccgctcagagatcgcggtccagcggcaactcctggcgggcggcgtcgatcggccgctctatcatagccgctcagagatcgcggtccagcggcaaccgcctgcgcagttggtcgagcgcaaggataatcatagccgctcagagatcgcggtccagcggcaaccagcgcgccgtccaccagaccgtcaatcgcatcatagccgctcagagatcgcggtccagcggcaacgccggcgcactggcaccgttgctgcccgccatcatagccgctcagagatcgcggtccagcggcaactgaccggggcgcccttggctttgctgaattatcatagccgctcagagatcgcggtccagcggcaacctgtgcgagacatcatcgaccttgaagctgatcatagccgctcagagatcgcggtccagcggcaaccgtcgagaggtccgcacaagtgcgggtcgtatcatagccccccatctcgactttgtacgtttttggtcaggttcaggtccagaagatgctgttttcagcgatgtggtcgagggcgtgatcgaggggcaagacgcatccgcccatatcgtcaatatcttcccattttcgccggtgcgaccagtagccaagcctgacttcgtcgcgcgtgccgacaggcttgaggccggcgatcggtgcctcggtttccagcagatagagatggtaggcgcctttgtcctcgtaccaccccacgcctccaccgttagcggcgtcgaacgtttcgatgcgcagaatgatttcgtcgtctttcatggtgcatccatagctgccatcgggtcacagcatattcgagtcacctcgccgcatggcaacagcccaagcgttgcaacgtgcttcagtcaggattttcaagcatggaatgctggaccagaacaaggccgttatcggcgatcccgttccccagatcctgcgccaatggctgcaggcatggcgtccctgctttacggcttccagttgggagcatgtgcttgttctggtaatgggcggcctgctggccacgggcaagcggaccgttacgtcttgcctgcgtgtgaccggccgagccgacgacgccaactttgcaacctatcaccagatcctcaaccgcgcccgctggagttcgcgtgccgttgccaggcgtttactgggcattgtggtcgaacggctcgtgcccgatggtcctgtagccatcggtatggacgacaccattgagcggcgatggggcgtcggatcgccgcacggggtatataccgcgacccggcccgctccagtcacggccatttcgtcaaagccagcggactgcgctggctcagcttcatggtgctcaccccggcgtcatggacttggcctgatcaaggcactgccagtcctgacgctgcttgctccttcggaacgatcgaaccgtcaacgcggctgtcgtcataaattgctgacggactgggcccggcagggcgcgctgcaactgtctcgctggctgccgggtcggcggatcatcttcattggcgacagcagctttgctgtccacgaactggcacatgcgatcgtccgctgggccgcacgcatcagccggttgcggctcgacgccaacttgtttgcacagcctgcggggcgaacggcacgcgcgatggggcgaccggcgcagaaagggcgagcactaccaaaactcaagcccctgctcgccaacccggcgacacgctggaccagcattctcgtctctgcctgctatggccatgtcagcggcaaggcgctcgagaccacatccgacatcgcctcgtggtacaggcccgacaccccggtcttgccggtccgctgggtcctggttcgcgatcctgacggaaagcgcggcccgcaggccttcttcagtaccgacatcaccctcgggcccgccgacatcatcgctttatacgtccgccgatggcagatcgaggtcaccttcaccgaaacgcgcgctcacctgggtgtcgaaacacagcgccagtggaccgacgagatgccatagcccgaaccacgccggcgctgctgggtctctacaccctcatatcgcgtcgcctgtgctgagcgcccgccttggcaggcagtcgaagggggcctgcgatctgctcaccaccagcagcacctcttatgccgccacctggtatcgcaaaaccagcctgacattcagcgacgccatctgagccgtccggcttcaactgtgggtcggcgacattaatcaacactccccgccgcaccggaaatcgcaatatactcccacaacatgactcatacgtatggctcaagcactatgcttcgctacctaattgtacaaagtcgagataaggacgtgattgcaatcaaccatcgacgcttcacgcaaccaatttaacaggtcccgagcctgggcaccgacgctccgctgcgctggcggagtagcagaccgtggcgagctagccaggcccttaccctctccgcccgaactgcatccgatggagaagagttcgcgttagactgacagcaccggccaatcatttccggggacaggactgggcgcacagcctgcgtgtcggcagtctgctgaaccggcggcagaaggtcatggacgcgacggatgcgacgccgatcgcctgtcagcccgcctatctcgaccctgaaagacgcacgctgatgctgtcggtccgaaaaatcttctgacgacgacggtcagtagacgtcccggcgataacgaccatcctccgacagattttccagcgtggtttcgcccaatatccgggccagcccctcatgcacgccctgcgccatgccctccaggctgccgcagaccaggatcgtcgcgccgcgatcgacccagtcgctcaggatcgaagcagcatcgggcagcatgtcctgcacatagcgcccgcaatcctcgtcgcgggaaaagcagcggtggaggcgggagagcgtcccatccgcgatccaggccgacagttcatcgtcaaagaagctttcatggctccgggtccgttccccgaacagcagccagtgccccttgtgcccgccatgcgcctgcgcgcgcaaatgcgcgcgcaggcccgctatgccagtgccattgccgatcaggatcagcggacgtccgccctgccccggattggtgcggaaaccgggattggggcgcacgcggagcaatgtggtcgcaccgaccggcagatacgcggtcagccagcccgaccctacgcccagccggccatcctgacccctgacctgccggaccaccaggtccagcgtgccatcagcggcgatcgacgccgcagaatattcgcgcaccggcaggggccgcagcgcccgccccgcctccgccgtgatgggctggtcggaatcgggcaacatcgccgttgtcagatgatcgcgcagcgatgccggcagatcgatcaggtcggcatctgccgcttgcgtaaacagcaaggcgtccaccgcttcgggcgcgttacaaggctgggcctcgacaatgtcgccggcttcccatgcgctctccatatcggtggtcggctcgaattgcagatggaaggccttgagcgcatcgctctgcgggttgagcatatggcgggacaccaatgtccaggccttaaacggaatgacggtctggccgcgccgcgcctctgccgcgcccagatcgtgcagggccgcgtcccactgccgttccgccgcctgatcgccatgatccatcgcgatcaacgggaagagcgccgtcgcgccggccgtacgcagccaatcatccacccggtggccgaaggcgcagaaatcggaatattcgcgatcgcccagcgccaatatgccatagtggagatggcggagatccggcccttccccgcgcaacagccgcgacgcgaagccgcgcgccatatccggcggttcgccctcaccataggtgctgaccacgagcagcaggcgctggctctccgccagcagcgccggcgtcagtttgccgaccggcactatctgcgcccgcacgcccccttgggccagtgcaagcgccgcattgcgcgcgcggatctcggccgtgccggtctggctggcataggcgatcagcaggtcgcccgtccccgaccctgcgggtagtgcgatgtcagcgtccagcgccttggcttcccgcttgcgccgacgccgcgatagatagaggagatagccggtgatggtgaacaagggcatggtgaggctggtcagcagcatcgcgatccggcccggcaggccaaaaaacgcgccgcgatgcagttcatacatgctctgggtgatgatggttcccagcggtcggcgatcatagaggtcgcgcttcctgagcgcgatcgtctctggatcgtagctgtagcggtcggtctggcgcaggtggcgcgcgccggccgggcgggcgtcgaaattgatcgccttcatcggctgggccggggttggccgcgcgatgcggacccagacataactttcgcccgtggcgcggcggaaggcggtccaggccggatcgatcgccgggcgcggcgctatcccgtctttcttgccctcacgccgcccttcctcgccgccggcctttccggccagggcatagagcacgccctggcgataccagtcatagctccaccacaggccggtcaaggcgctcagcagatagaagagcagaacccatgtgccgatcacgacatgcagcgcgcgccacaggttgcgaccggtcttgcgcaggtccagcactatccaggcgcgccagtccagtgcctgacgcggccagcgcagatacaggccggacaaggcgaagaagatcagggcaatcgcgctgaacgccgtaatctgacgaccgatgccgttgccgccgccgggcaaagcaagccagcgatgcagttcgtccatcaggtggaagaagccggctcccgtcggctcgccgagccaatgcccggtggcgcgatcgacctgcccctgcatccggccgcgcccttcgctggcgagcagtcggaccgcatgggtgcggtcgcgcgcggcctcccaatcgaggcgggcgacataatagccgggatggtcggcctcgatccgggcgatcagccggtcgggtgacaggtccgccgcgaccggcactcccggcacgaacaggcgtggggagagcgcttcgctaatctcgtcttcgaagctcatcgtcgcgccggtgacacccatgagcgccagcacgaccccggcggtgatgcccaggaaccagtgaatttggaagaagacgcgtttggtcacccggactccgatggctgatccgataggctgatttcgtcgctatcgcgcatatgcagcgcgaatgcaattgcgacaaattcgcagtatcgctatgcgccgactgcatagggcttattcgtgggggcatatgactatctggatgatcgccgcgctggcggccggcaatacgcaggcgccgctgccggatcagcaaccgcaggtcgagcgcaggctggacgaggatatcgtcgtcaccggccagcgcccgaccttcaggaccgacgtggtgcaggtcggcgccttccgcaaccagtcgatcctggacacaccggccagcatcgccgtcattcccaaagccctgctggatgcgcagggcgcgaccgggctggaggacgcgctgcgcaacgcgcccggcgtgacgcagcaggccaccagcccgacgaccagcaataatttcgtgtcgcgcggcgtactgatgaatgcgcggaccaactatcgcctgaatggtgcgttgcagatcatcaacctcagccccgtgccgatcgagaacaagcagcgcgtcgaactgctcaagggcgtgtcggcgctttattatggcctcgccacgccgtccggcatcgtcaatgtggtgacgaagcgggccggcgacaggccggtcgacaatgtctatatgaacggcgatgtcgaaggcagcgtcggcgcgggcttcgacatcgggcgcaggttcggtggcgacgaccagttcggcctgcgcatcaacggctattcgtcgcatgtggaaacgccgatcgacggggtgaatggctatcgctaccttgccagtggcgcgttcgactggcagatgtcggaaaaattgtcgctgaagctggatgtcgaacattatcgccgcgcgaccgacgaaccgggcggcatctcgctcgcggcgttccagttgatcgaccatgtgccggacccacacagccgctacgcccccaacaatgcgccctatcgcacctggtcgaccaatatactggggcgggccgattatatgttgagtgatgcctggtcgatccgggcggaagcggggctggcgcaatcgcggaggcaacgcagccgggcggatttcagcttcatcagcgcggcgacggttgaaagcggcgcaggccggatcgcgggcaattacacgcccgaccaggaatatcggaacgaatatgtccgtaccgaaattgccggcaagctgccgaccttcggcatcgaccatgaactgctgttcggcgtcgcccgcaacaggcaggtgcaggaagaccagcatcagcgcagttacacggcggtcgcgcagaatttctacgatccccgccgcatcgtctttgacgacctggccttcaccacgacgcggctgctgccgggcagcgtcaatatcgataccggattctacatgctcgacatcgcccatgtcggcgacaagatattgctgatctgcggtgtgcggcgggtgctctacgacaccagggaaagcggcgacgatttccgcatgaaggcgtggaccccgaccggcgggatcgtgttcaagccgacgccccggtcgagcctttacttcacctatatcgaagggctggaaagcgcgggtaccgcgcccacgggcacgaccaatgaaggcgatatattgcgtccggtgctgagcaagcagatcgaggctggcgggcgaatccaggtagcgggtgcgctggcgagcatcgcctatttccatatcgaccgggggctgggctatatcgacacgaccaatagctatgtcgtcgacggacgggctatccatgagggtgtggagggatcgttgcagggcaatctgaccccgcaactgtcggtcgcactggggggccaatatctgaaagcgacgcagcgcgaaaccggcgtagcggcacagaatggtaagcgggtcgataatacgccgcgctggtcggcgtcgctgtttgcggaatatcggcccgccaccctgcctgatttgggggtcaatgcgggcgcctattataccggattgcgctatgccgacgcgctgaacagctatcggatgccggcctataccacctacagcctgggcgcgaattacagggtgaagatggccggcgaccgggcgttgacgctcagggtcaatggggacaacatcaccaataagcgctattggtcgaccggcggtacgatcttctatgtcggactggcgcggcaggtgcgtttttccgccagcatggacttttaacgcaaccggcgggcgcgggctttttcagaagaaggtcgcgccctgaccgccttgccggcggcgcaccactcaggccaggcgatgtttgttcttacgaaccgccttgcggtaatgggccagcgacgcatccagcatggccggtcccgaggtacccagcccgcccgtcatcatcttccattgcagcgtagcgaccgcttccattttctcgctaaccatcagttgcgcttcggccagcgccgccgcattgccggtcatcaaacggggcagccgcatgccgatgaccgagcaggcctccagccccaggctccagcaatcaaaggtcagggaaagcgatgtcggtttgggcatgtacattaaaaccttctcgatgcgccgggttccgcctgcgacgtctgccacgcacatagcctatctggcccgccgctggacaggcccgccagcactcgaagcgacatttattccggcaagccaggaccgatgccatgccagccttccgctttcgcaaaagagatgcaagccgccggttcgcacaatcccatggatagacgaggaaaaatctattttgatagtgacttgcaatagctaaatgtctagaggcaccccgtctacagggaggtctccattgaaccatatattcagatccgccgtcggcatgaccgggctggcccttgccagcctggccatcggtcccgtcgccatggccgccgaagagggcgatagcgccgaccgcgccgacatcatcgtcctcggcaaaagctacggtcaggaagtcggcaagacgatcacgccgctgaaagacgtgcccaatacggtcaccgtcatcgaccgcgtgcagatcgatgcgcagaatctcttcacgctggaagacgcgctgaccgcaaccaacggcatcaccgtcaacggcgtgggcagcgaaggcgcgaccttctattcgcgcggtttcgccatcaacaattatctggtcgatgggacaccgacgcgcgcctatgattcccccgccgtcatccccgacctgttcttctacgaacggctggaggtgctgcgtggcccggcgggcctgttcagcggatcgggcaatccggcgggcagcatcaatctggtacgcaagcggccgctggacgagttcaatctccaaggctctgccggctacggca

SEQ ID NO: 3087 - DNA, 22307 bp, synthetic construct
  misc_feature 1..22307: note = Synthetic
  source 1..22307: mol_type = other DNA
cgttggcgtcgatggcgacgcccatcggctggtccaggccttcggtgagcgtttcaaccgaaccgttgctggccgataataggcgtccgctgccctgttcggcgaagacgactgcgccgtccggggcgagcgcgacgcccatgaggcggtcatggccgtgggagaggaagtcgctggccccctcgcccggccgatagcgtgcgacgccgccggtgccggtggtgatgatccattcgcccgattgcgatcccgctgcgacgccgcgcatatagccgggacagccgggatggaagatcatgcccgccagttggggcgcgccgccggggcggagcgtgtagccgaacgtgccgtccgcgacgaacagcgcgccatccgcacccatggcgaggccgagcggccattgcagcgcgcgggggacgaccgggcggatattgccatcgcccagcaattcggtgatttcgccggggatgctggagatgaagatgcggtcgccgatgaagctgacattgtcgaggccgggaccaagatcggcaaggatttcgcgggtgccgctgaccgggtcgatgcgcagcacctggccgctggcgacctgggtggtgacgatgcgccccttgctgtcgaacttgaccgagtccggcacgccaaggtcgcctgcgacgacgtcatgcgcgccggttttcaggtccacgcgccagatttcattggcgcccatgacggggacatagagtttgccgtcagggccgacctgaaaggcgttggccatggggatattgtcgaggatcaggcggggcgcgccgccgtcgcggtccagttccatgatccgcgcgcccatgcggcattcgcccgcgatcaggcggccctgatgccaggtgatcgggttggcgacgggcatgtcgccatagaggacgcgcgatttcccgtcgggcgtgagcatcgacacgcggccttcggtgatttcggtgaggtagagattgccagcatcatcgaacaccagatcgtcgggcgcgacgatcgcgccgcccatcgggctgatggtcgagatggtgcctgtatcgacgtcgatcgcgctgacctggctgccgccgacctgggcgacatagaggcggccgtccgggccggtggcgaggccgttcgcgccgtagaggcggctggggggtgtgaggcgttcgaggctccacccttccgccgccgccatgccgctgggcgcgatgcgggcagaagcgccttgggccatgtcaggcgtaaccgagcatggatttgacttcgagatattcgtggaagccatactcgccccattcgcgcccattgccgctgcgcttgtaaccgccgaagggggcgtggaaatcgaagccgccattcatgctgacccagccggtgcgcaggcgacgggccacggcgtggacctgggcggtgtccaaaccgttgacgtatcccgcgaggccgaaggggctgtcattggcgatggcgacggcatggtcgatgtcgtcataggggatgatgaccagcacggggccgaaaatctcttcgcgggcgatgagcatgtcgttggtgccgaggaagacggtggggcgaacgaaccagcccttctcgatgccttcggggcggccggggccgcctgcgacgagggtcgcgccttcttcggcgcctttggcgatatagtcctgaatgatattatattgcgccttcgacacgaccggccccatggcgacgtcgcctgccgggtcgccgacggtgacggcttgcgcggcagccttggcggcggcgagcgcttcgtcgaggcgggatgcggggacgagcaggcgcgatccggcgctgcaggtctggccgctattgcccatcatgcccgcggttgcgccggtgacattgtcggccagcgccgcgtcgtccagcacgatgaaggcgctcttgccgcccagttcgaggccgacgcgtttgaccgtggtggcagcgtccttctggatctgcacgccgacgggttcggagccggtgaagctgatcatgtcgacatcttcatgggtcgagaagcgcggtgccgatgacgctgccctgcccctggatcatgttgaacacgcccgcaggcacgctcgccgcgtcgatgatttcggcgaggatctgcgcggagaaaggcgcgagctgcggcggtttgaggatcatggtgcagccggtggcgagcgcggggaagaccttgacgcaagtctggttcatcggccagttccagggtgtgatgaggccgcagacgccgatgggttcgcggcggatcagcgtgggtccgcgcaattcctcgaacgcgaaattctccagcagttcgatggcggtctgcagatggcctgcgccgaggccgacatggaagcctttggcgaggcccgatggcgcgcccatttcctcgcggatcgcctcgcccaagtccgccatgcggcgctgatattcggcctggatggctttgagcaggtcgagccgctgttcgcgggtagtttccgaccaagtggggaaggcgcggcgggcggcggcgacggccttgtccacgtctgcggcagagccaagcgcgatatggcctgcgacggtttcggttgcggggttgatgacttcggccgtcttgggcgcgaccgggtctacccactggccgtcaatgtagaagtgcagatggtcgcgcatgggtgtctccgtcattgatccttccccggcgggggaggtggcaggccgaaggcctgacggaggggtgtcatgctctcgatagggtgacacccctccaccaccgctacgcggcggtccccctcccctgcaaggggaggaatttcttcggcttactgtgtgccttccgcgtaccaggtgcggaattcggcatatttgggcatttcttccgaattggccttggggtcgatgacgacatgaacaacgccgaccttgccgctggcataggcgcgttcgatcgcgggtttgatgtcctcggcgcgggtcacatattcgccgtggcagccaaagccttcgccgatcttgtcgaaacggacgtccttgctccaatgggtgccggtttcttcggtgccctgaccgaaggtgcgcttgtagacgcccacttccagaccccaggcattgtcgacgccgacgacgcagaccagcggcagcttgcagcgcgccgcgacttccagttcgccgatatggaagaggaagctgctgtccgaggtcagcagcatggccgggcgcgaaatgccggttgccgcctggtccgccagcattgcgccggtggcgtaggggatgcccgtgccgatatgcccgaaattctggttccagatcacgtcatgcggtttgcactgcgaataggtccattggaagatgacgcccgcgccgccatcgcggatcatgatgccgtccttggggaaggcctgtgtcgcttcgaccgcgaggcgcgcgggatggatggccacgtcgccagtgccgtcgctcttggtcagcgattccgccgccagttcgtccagttccgcctgaccgtcgcgcatgaaggcttccagcatcggcgccggtgcgcgcggcgtgtccttgagcgcggcgacaagctgcggcacgacgccgcgcagatcgccgaccaagggcacgtcgatcggacgattgacgccgatggccgaggcatcctgttcgacatagatccatttgcggatcgcttcattcttctgccagtagcgccatttgccgaaatggaccggctcgccgagttcagtgccgagcgccagcacgaggtcggactcggtgacggcctcgatcgacgccttggaaaagacgtactggaaggtgcggtcttcgagacccttgatatagctggtgccgcccgatgtctggatgacggggcagttcatcaggtcggccagttgcttgaccgctgcgccgatgcgtgacgtgtggacgccatggccgacgaggaggatcgggttcttggcttcgcggatcagtttggcggcttcgtggacgcggtcgatatccgcgccctgattgaccaggcgataacgctccggcactagcggcgctggcaggtctagttcttccagaatgatgtggctgggatattcgatatagacggggccaggggtgccgcccatcgccttgcggatgccttcgcggatcacttcgtcggtctgatcggcatattcgatggatgccgcatatttcaccgaattttcgaacagcggcatttgcttcacgaactggatgcggccacggcggacgcgttgttcggtgacgcgggcgcgctggcccgacaggaagatgacgggcgaatgttcgaccagtgcgcattggatggcgggtgccatattggcgatgcccggccccaacgtgccgacagctacagccggcttgccggtgatgcgcgacgcggcttcggccatgaagccggcagcggcttcatgatggggcgcaaccacggtccagccgcgccgttcggcctccaggaacatatggacgaagttcggatcggggatgccgaacagggtgttgatgccttcggcctcgaacaggtcgaggacacgcttatagactggcgtgcctgacttgcccgatgcggttgcagcggtagcaggcttgggatcgtcgtagctcatttcaatagcctcggtgcgcccgtacccatgtacgcggcgaggttgcggtggaaattagtgatcttgcgttcctgatgcggattggggagcggcccgcgaaagccgcgcgacttcatccctttctgcacccatttcatgttcgagaagtcctgcgcgaggacggcgccccacccttctgcagtcggttcggcatgttcccattcagtcgccggttcctggccttcagggaaacgttcgatcgcgtaagattcgaagatgcacatgttgggatcgtcgccgaagggccgcgcgcgataacaaagcgcgaaggtgatcccctgcaacaccgacatgttagggaagacgtgccaggcgaggcctgcttcggccatgacgtcgggcggaatgtccggccagaaaacgccgcgtgcggcgtcgtccgctcgcgccgatttcagccagtgggcgatgacgtcggcggccgccgtgccttcgggcagttcatcgaccagacggctggcggcatcgaccagcgtttgcgtggacgcggcatagttgagcgtttcgtaattttcgcggatcagctcataggtcgaacggcgcggatcgtcgcccttgcctgcgcgggtgacgctgctgctctggctcatggcgaaggcggggtcgcgctggtcgaaaccgcttaccccgtgcaaaccataagccgcgctataggcataatagtcgccataggcgagcagctggctatgcgtgcccgcgacatgatagggttccatgaaggcttcgagcgcggtcttccaattggatggatagaccacccatttgcgccatttgtagcgcatcttgtccatctcgaaataggacaggatgcgtccggcgtcgcccagaaactcggtcacgggttcggcgtctagatccatgtggatccagatccatccgccccacaggtcgaccttcacttcggaaagatgcgtacagtcgggcgtcagggcgccctgccagtcctgcggatcgagaatatagctgttattgccctctatatcgaaggtccagccatggaagccgcagatgaagttgcggcgcttgttgcccttggccgagtgcgcgccttcgggcacatccactaactgccgcccgcgatgcggacagacattatgataggccttgagccgatcaggcgcgacgcggatgacgatgatgctgtcgtcgcaaatatcgtaggtcagccagtcgccgacgtccggcaattcctcaaaccgcgccgcgacctgccacactttgggccagagattttccttttcggcgagcgcatagtcgcgcgacaggaaagcctcgaccggataggtcagcggcttggccagatcatcgacggagatggtggtcgggctgttcatgccatgctcccgcagcctgttccctgtagtccgattatcgcgaacgacggggcaatcccaagcgaaagccggtggcaggacgagatcatccccccggcgatcatgaccgcaattccatgcccgcaaggtcaccgcgcgcgcgccaatcctgcaacaatgtctggaacgcgccccagccgggaccgtagctgcggaacagagcccagggtgctttgacctggccttcattggtgaaatagcttggcgtacattcgatctggaaggcggaagtgtcatattccacgtcgtggaaatgctggacataggcgtcctgcgcgtccgccgtggtttcgaccgaggccgcaccctttgccattgtcgcctggatgatatgggcgatatgttccgcctgccgcccgaattgttcggtgacgctggcgttgaggccgccctgaatatagccgatgaagaactggttgggaaaaccatgggtcatggtgccgtgcagcgtctttggcccgttcgcccaatgatcatagatggacaggccattgcgcccctccaccacgtcaatgccccagcggcgcttgaggtcgctggtgacttcaaagccgctggcgaagatcatgcaatcgacggtataatcgacgccgttcgagacgaagcccgtctccgtcatccgctccagccccttggcatccgacacgtcgatcagtttgacgttgggctgattgaaggcggcgtagaagtcgttgctggagagcgggcgcttacacaagaagcgataccagggcttgagcgaggcggcggtcgcctcgtccttgaccatgtcatcgacgcgggcgcgcagccgctccatgacgcgataatccaccacttcgcggcgggccatgaattcttcgggcgacagttccggccagccttcggcttccagttcggcgtggaggttgcgcgcgatttcggtccagatgtcgcagatcagatcctgctcaccgggcaagaaaaattccatcgcggcgcggtggaaattggcctggcgttcggcctgccagccgggttgcagcgattccgcccagtcgggatcggtcggcggattgggccgttcgtccacggtcgatggcgtgcgctgaatgacgtagagctgcttggcgtagcgggcgagatgcgggactgcctggatcgcggtggcacccgtgcccaggatcgcgacgcgcttgtcagcgagcttgtccagcaccgggcttttatagctgccgccggtatagccatagtcccagcgggcggtgtggaagatcttgccctgatagcggtctatcccctcgatccccggcagtttgggcatgttgaggacgccgcagcccatgatgacgaagcgggcgcggaaatgatcgccgcggctggtttcgacatgccagcgctggagtgtatcgtcccatttcagcgcggtgacgagggtgtggaacagggcgcgatcgtggaagccgaagcgctgggcgatctgtttgatataggcttgaatctccgcgccgtcggcgaatttcttggacggcatgaagccggtttcttcgagcagcggcaggtagcaataggcgtcattatcgcactggatgccgggataacggttccagtaccagaccccgccaaagtcgccggcatggtcgatattgcggaaatcggtgacgccttgcttggtcagatgatagcccgccaacaccccggcaaagcctccgcccagcaccaacacgtcgagatcctcgaccagcgggtcgcgcggggtgacggccatgtgcggatcgacatcatagctgtgggtcgtgtcgtcggtggtcggctgatactgcgcctgcccgtcaccgcgcaggcgcttgtcgcgctcctcgcgatattttgcgcgcagcgtcgggatatcgaatgtatcgggcgctggcgtccgggtgggagtgcagctcatatccgctccatggcagcttgttgtttccggcaactaatcaacaaccctgttcatttgcaatgcggcctgcgtggttagcgccggagcgatgtttcgctgggccctctgtttagggcttggccgcgcgggctaggttgagcgcgtaaaaagcgggatgaggatgttggacatggcgcagcaattgatggatttcaccggccggacgatcatcgtcacgggcgctgcgggcggcggcatcggcaccgcgacgacgaagatgctggcgcaggcgggcgcgaccgtgattgccgctgggcgaacccaggccaagttcgatgcgcatatcgcgccgctgattgcgcaagggttggcgatcgtgccggtgatcgccgatgtcgggacggacgagggcgtggcgaaggtgatggaggcggcggtggcggcccctggcacgctccatggcctggccaatgtggcaggcggggccgcgccgcaaacctggatgcgcgccgagcgggtgacgcgggcggactggcgcgctttgttcgagcagaatctggagacgatgttcttcatgagccaggcggtggcgcgggaattgcgggcacggggcaatccgggggcgatcgtgggggtttcatcgatcagcgggatgaacagcgcgccctatcacatcgcctatggcacggcgaaagcggcgatcgtcgcggcgacccgcacgttggcgaccgagctggcgctcgacaatatccgcgtcaatacggttgcgccgggcatgacgatcacgccgggatcgggcgcctatatcgacgcggatgtggcgcgggatcaggcggcgatcgccatggggcggcgcgcccggccggaggaacaggcgggtgccatcgccttcttattgtccgacctgtcgagctatatcactgggcagacgatcttggtggatggcgggctgaacctcaaatggacgcatctgggcgcggacaatacgtcgctgttcctgaagaatgaggatttccgagcagcgataaaggcgtaacaatggctggcatgagcgcgatcgaaagacagacattgcggggggcggacgtagacctggccgcggacgtcaccgggccggtggatggccagcccatcctgttcctgcatggcagcgggcagacgcggcaaagctggggcaaggcgctggtcgaggcggggcgccacgggtttcgcgcgctatccatggatttgcgcgggcatggcgacagcggatggtcgcccgatggacgctatgacctgaccgtctttgccgatgatttgcgcgcggtgctggcgcaattggaccgacccccggtggtggtgggggcgtcgctgggtgggatcgtgggcatgatcgtggccgccgccgatcccgccgcgatcagagcgctggtgttggtggatatcaccgcaacggtggacatggagggggcgaatgaggtgatcgccttcatgaacgccgggtcggacggctttgcctcgatcgaggaggcggcagcggcggtttcggcctatctgccgcatcgtgacaagccgcagagcagccggggactggcgaagaatttgcggcaacgcggcgcgcgctggtattggcattgggacccggccttcatgacgatgggcgtggatgccaagcaggaggcggaaggaccgaccgtgctggagacggcggcgcgggcgctgacgataccgacactgctgatacggggcgggcgcagccggatcgtgaccgaggaaggggcgcgggctttcctagagatggtgccgcatgccgactatgtgcatatcgacggcgcgcaccatatggtggcgggcgatgcgaatgatgcgttcaacgatgcggtgttccgctttgccgatcggcaggtggaaggatcagcgcaggctgacgggtaacgcgcacaaaaaaggcgacgccggagcgtcgcccttatctggtgcgtactgacacttgttaactgccagaccgcgatctctgaggcttcaagttcgcacaggcaccaaccgccgtcaatagtgacaatgatcgacagacccatttcggcgcagaatttgccttgaccttaaccaagtaacttggcccattggattttctcttctgggggtggatggtcatgacaggcaaaaagcatatatattggcgcttgggcgctgacctgggggccaattcgctgggttgggcggcaatcgaactcgatgcgccgaccgatggcaagccgatcggcattctggccgccggttcgcggattttcagcgatggccgtgatcccaagtccggggcctcgctcgcggtggaccggcgcgatgcgcgggcgatgcggcggcggcgggatcgctttcagcagcggcagcgggccttgctcaaatatctcgtggctgacgggttgttcccggaagatgaaagtgagcgcaaggcgctggcggcgctcgatccctatgcgctccgcgcacgggcgctggatgaggcgctgtcgctgcatgaattgggccgggcgctctttcatctcaaccagcggcgcggtttcaaatccaaccggaaggccgatcggaaggcggatgacgatgcgggcaagatcgccatcggcgtcgatcgtgcgcgcgaggccatggccgagaatggcgctcgcacctatggcgagtggttgcaccaacgccgcgccagtgcgacggacgccaatgcgattcccccagtgcggacgcgactgcgccctgaaagtggcgaagacgccaagggcgatgggtatgatttttaccctggccgcgacctgctggaggaggaatttgcggccatttgggaggcgcaagcggcgcatcatcccgacgtgctgactgacgacgtgtatgagcgcctgttcgagatcgtcttttaccagcgccccttaaaagcaccgcagatcggcatgtgtacgctgatcgcgggtgaccggcggctgcccaaggcgcatcccttgttccagcgccgccgcttgctggaagaacttaatgcgctgatgatcgtgcgacccggtgaggtggcgcagcgtctgacgcgcgaggaacgcgatacgctgttcctcaagctcaaggatcgcaacaaggttagtttcgaaagcctgcgcaagacgttgaagctggaccccgatgcgcggttcaacaaggagagcgaaaaccgtactgagttgaaaggcgatgaggttgcggcggtgataggaagcaagacgcgcttcggcaatcgctgggtccatttgtcgatcgaagagcagtgggcggtgatcgagcggctgggcgatgtcgaaagcgatgcgcaggatgacgcttttcgctcttggctggccgagcgttatgcgttgacgccggaacagacgcgggccgtcaccaatgcgccgttgccgcagggctatggtcggttcggcgagaccgcgacacgcaagctgatcgacgcgctgcgcgacggcgagaaggatggtcgagtgctggtatatagcgaagcggtcacggcggcgggcctgggccatcatagcgaccggcgcacgggcgaggtcttcgaggacgaagaggggcgaccgcaattgccctattatggcgtggcgctggagcggcacatcatgccggggacgggagatccgtccgattcggatgaaatgcgcgttggtcgactgaccaatcccaccgtccatatcgggctcaatcagttgcggcggatcgtcaaccggctgatccgcgcctatggcccgcccgccgaaatcgcgatcgagctggcgcgcgaactgaagctgacggatgaggacaagaagcggatcaataaggagaataacagcaatcggctggacgcggagaaaaggtcagaaaagctgctggcgatcggcaagcctgataccggtgcgaaccgggccttgctgaaattatgggaagaactgaaccccgccaatgtactggaccggcggtgcatctatagcggcgtgcagatttccatcgacatgctgttttccgctgcggtcgaggtcgatcatatcttgcccttcaccgcgacgttggacgacagcaatggcaacaagatcgtctgcacccgcgaggccaatcgggagaagcgcaaacggtccccctatgaagcgtgggggcatagcgcccgctgggaagagattgccgcgcgcgccgcgcaattgccgcgcaacaagcgctggcggttcgagccggacgcgatggagaagttcaaggatgacggcggttttctggcgcgccatctggtcgatacccaatatctcgcccggctgtcgcgcgaatatctggcgacgctctatcccgacaagggtgaagggaccggccatatctgggtttcgcccggccgcctgaccgagatggtgcggcgcaagctcggcctcaacgacctgttgcccgaccataatttcggcggcggtgcggatggcggcgcgcggcatcgatagggtgacgcccgaagccaagcgcgcctttaccgggctgatcgcgctcgacctgcctggagcggacggcacgacgacggtggcaggcgcagccaatcgggctgcccaaagcctggcgcgggcgtttcaaagcgggctggcgaccgacatcattcttccggtcccgccttctacgctggaactggccgggctcgacgcgctactcccgtgagcgcgaaccaactaagcggatatcgcctgatgtggattttcgtgatgttcgacctgcccgtgggcaccaaggagcaggcccgtgccgcgaccaaatttcgcgagttcctgctggacgaaggctttgagaaaagccagttttccgtctatgctcgtttctgcaacggcaaggagcagtttgaaacctacatgcggcgagtcgaagcgaagctccccgataatggcgatgtccacatcctcagtttcacggaccggcaatatgagaatatcgtgcgattttcagggcaacggcgcaggcggcagcggaaaaaccccgatcagctggctttattttagcgattcgggtcgttttgaaggcggtcgatccgtcgttatcgctttggttttcaatgcgataacgacggatctattataaccgctcagagatcgcggtccagcggcaaccgcaatgaccatcggtgcttcggtcggcgtattataaccgctcagagatcgcggtccagcggcaacgaaaaagcgcccgcccagccgccgatcgtcaattataaccgctcagagatcgcggtccagcggcaacgctcgccgaactgtcaatcaaacatccgttattataaccgctcagagatcgcggtccagcggcaacgtcatcaatgtcgtcgtcatcatcttcagcattataaccgctcagagatcgcggtccagcggcaactgtctggcttcgtgcccggcggggcgttgtattataaccgctcagagatcgcggtccagcggcaacataaaggccggggagcgcgcagatattcgcattataaccgctcagagatcgcggtccagcggcaactctggctcagagtatcagccgcatcctctaattataaccgcttgtcttatgactttgtggtccgttcgggtcaggatgcgatgtccggtccggggtggccaccccggaccggacggaaggggacggatcgcaaaaccgctggtcgtgaagggaccgggttagagtaggatcgcccctttctttttcatcaggcccgaacggataccggggctttcaaggcccggatgacaagcatgggacagcgaaaaagatgagcaactctctaccacaaaccatcggcatcgacatctccaaagcgacgttggactgctatgtccatcccatcgggatcgagcgccagttccccaacaccaccaagggccacaagaccctgatcgcatgggccgggcaatgggaggtcgagcggatcgcctatgaggctaccggcatctaccaccgcgcgctggaggtcgcgctcggccatatgccctgcgtcaagctcaacccggaacgggcaaggcgcttcgcccaggcgacgggcacgctcgccaagaccgatcgcatcgacgccaggctgctcgcacggatggcggtgacgctgaaacccccggtcaggcccgcccgaagcccgcagcagaaccagttggccgaactcgtcaacgcccgcgatggtctggtgcgtgatcgcaccgcgctcaaaaaccgcgaaaagaacctcaccgtcacgctgcttaagcgccagtgcagccaacggctcgaacagatcgctcgccacatcgctgcgctcgacgctgaaatcgcggccgtcattgccgcagatgaaaagctcgtccggcgccaccacattctcaccagcatcgctggcctcggcacactcaccgccaaccagatcatcgccaccatgcccgaactcggatcgctcgataacaagcaggctgcctcgctcgccggacttgccccggtcgcgcgccagtccggccaatggaaaggcaaaagcttcatccgcggcggtagggccaatgtccgacaggctctctacatgcctgctctggtcgccgcccgattcaatccaaacctcaaggccaaataccagcagctcatcgctgccggaaaacccgccaaaatcgccatcacagccatcatgcgaaagctcatcgtcaccgcaaatgcgctactcagggcagatcgtctctggaccacagcatgcgcttgaccatcacggatactcagagatcgcggtccagcggcaacattgcagatccaccgccgatcgacgctttgattataaccgctcagagatcgcggtccagcggcaacagggcatagttggcgtgcgtgaagcgcgagattataaccgctcagagatcgcggtccagcggcaactcttcgaataccattgacgccgcgattgcattataaccgctcagagatcgcggtccagctgtgtctatggctgctttggttgcatggccaatcctgccagacccgtggccgcgtcggtcatgaatagataggcgtcggtgccgggttgccgatccttgttgatcgactttgccggaaccgcgccgcttttgtcctgatgggtggccaaccatttttgcgcgcgctttagggcggttgcagtggacggatcgcctgtttctcgtagaatgacggcgaccgatgcggtggcgtagccgtcgctttcctgtggcaaactcgttccatcgatgcgctgccatgtcgataggctcggcaggttccagccgccatccggtcgctggtttgccatcaattccgcgaggattttggtacgttgctctggcaccaacaccccatgaagctggctgtccgcccataggatgagagagcgagaatagagcgagccgccgccgatgccgccacgcaaataggcgcggagcgcttcgacttgtggcccaatggccgggtttgcggcatagccgtcgggcgcacgagcaacagcgagtgccgccagggtcgcgccccaatatgtcgcgctggtcgattcaaagggttcgaggcggaaattgagccaggtgaagccacccttttgatcccccgtcatcatctggacgccccacatgttggcgaaggcctgtcgcgtatccgcgccaaaatgcccgcgtgcctgatcgcgggtggcgaggatcagagcgttcaggaccgcttcgacgccgcgggattcggcagatttgggcacgccgcgcgtctgatcagggtagaaaggctcgaccgcgtcccacagataaacgcgttttaccacatcatcgaacatggccatttcatcgatactttgtcgatgttcgccagatcgtgcgcgcaaagcgggcatcgccagaacatgcggcagcgaggtatgacatgatacgcagcgcgtgccatgatcccgttcggatttgggccattgccgccaccaggtcaggcgactttcaagatagcgggcggccgctgcattatcccaaccaggtgcctgcgcaggcgcggcctgtccgcgcgacatcgctgccatcgcgagaagggcggcagaggaaagaagcagccaacgggtcatgcagtatcctatcaaacatgcgaaaggataggtggaaggccttcgcaggctatgggttgtatgacgtagaagtccctgcggaatggcggtgcgcggcaatcagggcagttttgcgatcagtctttttaaagaagcgttcggcaagcgacggtggatcgcggcgcgctattgtgcctgtccagttcgtccagggttgccagcgccatcgccttatagggcggcaggagtgtagggcattgttcgcccagcgctgcgagatgtttggcgatcgtttcgtcgtcgccgcgcagcagcgggccggagaggcctgccatgccgtgatcgagactgacgtccagcgcggcgcgtaccagggggccgaggagtgccgagggttcggcgacaccggcggcggcgagtgcctggcaggcaccggcaatcagcgtgaccagatggttggcaccgtggcataaagcggcgtgatagagcgcccgctgcgcctcttcgatgggcaccatgatgccgcccagcaaggccacgagctggagcgctgctgcgttggcttgctcagtcgatccggtgacggcaaagcgggcgtcgaccatatgtttgacttcgttcgtcggattgccggtgaaggtcatggcgggatggatcgccgccgtcatcgacgtggcgctgcgcagtgggtccaatatggtcgcgccgctgcgcccgctgacgtggaagatgaagcgtggccggtcggtggcttcggcctgtgccagtgcggcgacgatgtctgcgagggcatcgtccgcgacggcaagtatgatgagatcgcagtcgcgggtgatctgggccatatctccagctgcctgtgcccgtccgaggactccgacagcctcggcgcatttcgtggggttccggccccagatcaggagcgggttgttggattgggcggccagcgcacagccgatggcggacgccacccggcctgtgccgatgatgccgatccggcggtagggcgatgtgctgaccatgattgtcaccctagcccacgaagcatggcccgtcatcgcatggatgacgggccatcgccatttgtcagccgaccgcgcggctcatcagtcggtcgagccggtcagagaaggcgcgcgcgtcggtgggttgttcgccatcggcgatgcgggcctggtcgagcagcaaatgggcgaggtcggacttgagaccatccgcatcgtcgctcgacgccagtttctggatcagggcatggcgcggattaatctccagcacggggagcgccgccgtcgggagctggcctgcgctggcgagcagcttttccaattgccggtccatgccgctttcgggcgcgaccaggcatacagcgctggtcgtcagccggtccgacgcgcgcacatccgatacggcatcagcgagggtcgtcttggcgaaggcgaggaagtcggcgacggctgcattttcctgctcggtcggcttgtccgcgccttcgaccagcgggatgaggcccaggtccgcgccgccctgcgtcaccgacttgaacggcttaccttcataatcgacgcccatcgtggtccagaaattatcgacctgatcgggcagcagcagcacttcgatcccgcgcgcacggaagccttcgagctgcggcgaggtgaacagccggtcaaggtcactgccagtcgcataatagatggcggtctggttttctttaagctgcgcgacatagtctttgagcgaacgccagccctcccccgatgtcgtgcttttgaaccgagcgaggccaagcagcgcctcgcgccgttcgaaatcctcgtacagcccttccttgaggacggggccgaaattctcccagatgcgctgataggcttccgcgtcattatcggccaacttctgcaggtcgccgagcagacggccggtcacgcccttctggatggcgcccagcaccgggctgtcctgaatcatctcgcgcgacatgttgagcggcaagtcggcggagtccaccagcccgcgtacgaagcgcagatagcggggcaggatcggtgcttcatcagtgatgaagacgcgacggacatagagtttgatatgccccttgcgatccggatcgaacaggtcgaacggcttggtttcggggatgaaggtcaggaccgaatattcatagcggccctcggcgcgataatggaccgtgtgcgcgggcttgtcatattggccggcgacgctgcgatagaagtcggcataatcctcttcgctgatctcggacttgggcttgagccacagtgcggcgccatcggcgatgtcgacgccatcggcatcgggcttttcgaacagcatgatcgggaccgggacatggcccgactgcgccttgatgatgcgctcgaccgtgaagcgttcggcgtaggatttggcgtcttccatgaggtgaaggacgacgcgggtgccacgcgtgggggcgtcggccaaatcgaccggggcgatggtgtaggtgccctgcccgtccgaggtccagctggcggcgtcctgcgatccggcgcggcgcgaaaacacctcgacctggctcgccaccatgaaggcggaatagaaaccgacgccgaactgaccgatcagttgcgaaccttccttgcccgcttcggccgccaggcgttccatgaacgccttggtgcccgaccgagcgatcgtgcccagcgtctcgcccatttcggcggcggtcatgccgatgccattatcttcgatcgttaggcggttctggtcggcgtccagcagaacacggatgcgcggttgcgggtcatcgcccagcagagagggcatggcgatgccttcatagcgcagcttctcgcacgcatcggcggcgttggaaatgagttcgcgcaggaagacgtcacggtcggaatagaccgaatgcaccatcatgcgcagcagcttcgaaacatccgcctcgaaagcatgggtttcgggcgcggtagcagtttcagtcgtcatggcaggtttaccctttgaatgcgtcaacggcgcggcaaatggcggctcgtcgtgcattttgcaagatcgatgcttggcctttcatgacgcgagacggggtggattggccccttactctatcgattgcacttcatcggtatggacgtcgaaccgcaccagattggcggggccaaaggcagtggtcagggcgacgtcggtcgcatcgcgtccgcgcgccatgaggatgcggccgatgcgggggcgattgtgacgggcgtcataggtgtaccagttgccgtcgatatagacgtcgaaccaggcgctgaaatccatcggcgcatcgaccggcgggatgccgatgtcacccagataaccggtgcagtagcgcgccgggatattcatgcagcggcacaaggtgacagcgagatgggcaaagtcacgacatacgccgcgccgttcctgatagccgttccacgcggtcttgtctgaacgggcataatgatagccgaactcgatatggttgtggacgaaatcgacgatcgcatcgacccgatcgcgggccgaggcataatgggcgaaattgccccaagcgacatccatcagccgatcggtctcgcaatagcggctgccgagcaggaagggcatcaccgcgtcgggcagatcctcgaccgggatttgcggaccatcgggcgcgcggacgtcgggctcgccattatcctcgatcacgaaatcgcaggacagggtcacgccgccgggcgggatagcgaagcgggtggcgacattgccgaacccgtcttcgaactgataaagcggaatgtcggggctggccatcagccgctggggcgtgcgcagatcctgatggcgcgagggatgcacgctcagcagcgcgaccatggcggtcttcgcatcggtattgaaggcaatatcatatccgcagcggatcagcatggacgggtactttccttaagcgccgatatgtcggctgttgatggcaccatggttggtcgagggaaacaggctagggtccgcacgcaacacatcaaccgatacatccatgttcaggaagctgccgggcgggccgaaccatgtgcccgacaggggcagcgcctgatagggatcgcgcgcgacggcgacgcggatgaggccgcgattgccgatgatgccgttggtgggatcaaattcgacccagcctgaaccgggcaggaagatgcggacccaggcatgggtgttgccgccgcccaccacatcttcggatcgcgagggattatacacataacccgaaacgaaccgcgcggcgaaacccagagcgcgcaccgcctcgatcatcaacacggcaaagtcgcggcaggtgccctggcgcagcttgagcgtttctatgggcgattgggtgcccttttcatggcgggggacataggtgaattcgcgctggatgcccgtggcgatctccgtcaacagcgcgatcgtgctggtattgccatgattgctgacgaagctgcgcgcccaattatcgacgatgcgttcgggatcatgatattcccgttcgatcgaccgaagcaggtcgggcatgtcttccgacgaataagtgaaaggaaagaggcgcgcatagggttcgacgtccacctgcttttgcgcgagcggggcatgatccaatgtggcttcgctattgacgaccaattgcgcggcgcgcgccttgaacgtggcgatggcgaccgaattgccgaaaacgtcgtgcagccagcgcaattcgctgggcgctggatcgatgtcgaggcgcgcggacagcaagcgctggtcaaatgcctcgcgagggcgcatcatgatgcgatgttcacccagggataccggctgctgatagtgatagatggtgctgtgtcggatggtgagcaacggcatagggtcatgtcctgatggccgggcgcacggcagaaaatctattgggtccgggcgatccgttgccgttcgggctgttcaacgcagaaggcggctccccgttcctgctgatcggcgatcatgcgggagcggctattccgggggcgctgggggatatgggattgagtgcggccgatcgggggcggcacatcgcgatcgatatcggggtttacggccttggtcgtgctttggcgcggcggctggatgcgccttttctgcatcagagctattcgcgtctggttatcgattgcaatcgtgacccggcgcacgccgaggcgatacccgctttatccgatggcaccgtgattggcggcaatgccgacttggacatggcggagaaggcagagcgggtgagagcgatccaccgaccctatcatcaggcgatggcggacctgatcgcggcccgaacggccgccgggcgcgagacgatcctgttgtcgttgcatagttttaccccggtgctgaacggtgatgtccgtccctgggatatcggcatattgcattggcaggggcggacggatttcgcgctgtcgatgcttgatcagttgcagtcgattgcgggtgtcgtcgttggcgacaatgagccctatgcgatggatgccaccgactatacggtgccctttcatgctttccccaacgggttgcgctatgcggaaatcgaggtgcggcaagacctgatccaggacgccggggggcaggcgctatgggctgagcgtattaccagcgcggcacaaggggccatcgcttagcgttccgcctgacagacccagccatggaaaaagattccaagggaacgtccgcacttaccgcgcattagcctccccgacaggaggcctcatgacttatagtgaccgtatgaccctattcgcgcgcatcggctttgcggcgcgcgggctcgtctatatcctgatcggctggtttgcgctggacgtcgcgtcgacgggtggcgaggtgaaggataatcaaggtgcgctgggcagcatggtcgatgcgccgctgggccatgtgctgctggccatctgcgcgctggggtttgccggctatgcgatatggcgattgaccgaagcggcgatggacccggaaaattgcagccggacgctcaaaggtaaattcaagcgggtgggctatgccatgagcggcatttcccatgtcatcctggcggtcgccgccgcgcgcctggccttgcgtcagacatcggcgcaggagggcagtcccggcgacgcgagcgccgaaagctggtccgcttggcttttgtcacagccgggcggcgtggtccttctagtactggttggcctggttctctttgcggttgccgcgacgcaagcgatcaaagcctataaggcggagtttcgcgaactggatggcgatacccccgcccccgactatgtgcgctggatcggacgctgtggttatgccgcacgcgcattgatattcgcgctgatcggctggttcataatttcggccgcactgaaccatgatcctgatcaggcgggtggtctgggcgaagccctcaaacagttgcgggcgcaggaggaaggcaccatcattttgagcgtcgtggc

SEQ ID NO: 3088 - DNA, 22235 bp, synthetic construct
  misc_feature 1..22235: note = Synthetic
  source 1..22235: mol_type = other DNA
tggcccaagccgatctcgacagcctgtcgacgcgggggcgctatctggaaatgaaatatcgcgaggaaaaggcggaatgagcgtgaaggcggcggtatgatgccggaggacaagccgtcgtgcttccaggagccggcaacggccaagtcctgagggttggcccttggccttcgacttcgctcaggctgaacggagtttgggagccaagccatattacccgccgccgttcagcctgagcgaagtcgaaggccacgcccctcccccctcaggtgtcgaacaatccgtcctgcgacccgaccggaggattgaggcccagatgcttccatccgcccgggttcaagattcgcccccgcgccgtccgcgccagcaggccgagctggatgagatagggctcgatcacctcctcgatcgtgtcgcgcggttcggacaggccagcggcgagcgtctccaccccgaccgggccgccgcgatagacatcggcgatcatggtcagatagcgccggtccatcgcatccagccccagcgagtcgacctccagccggttgagcgcctggtcggcggcggcggcatggacgatctcatgccccgccacgctggcgaagtcgcgaacccggcgcagcagccgcccggcgatacgcggcgtgccgcgggaacgccgcgcgacctcgatcgcgccatcctcggcgatcggcaggtcgagcagccgcgcggcacgcgtcaccacgcgggtcaattcctcgaccgtatagaattgcaaccgcaccggaatgccgaaacgatcgcgcagcggcgtggtcagcaacccctgccgcgtcgtcgctccaacaagcgtgaagcgcggcaaatcgatccgcaccgaccgcgccgaggggccttccccgatcatcaggtcgaggacacggtcctccatcgccggatagagcacttcctcgaccgccggttgcaggcggtgaatctcgtcgatgaacaggacgtcgccatcctcaagattggtcagcagcgcggcgaggtctcccgacttggcgatgaccgggcccgaggtcgcgcggaagcccacccccatttcgcgcgcaatgatctgcgccaacgtggtcttgcccagccccggcggcccgaagaacagcacatggtccaacgcatcgccacgccctttcgcggcctgaatgaagacacggaggttgtcgcgcgccgcatgctggccgacaaactcgtccaggctcttcggacgaagcgcagcatcgacatcctcgggacggcggctggcggacaagaggcgatcctgatcggtcatagcgcgcgccctagcggctgcgccgggcgactgtcgagcatcaggatcggggaagcatcagcgaacattgcacgaacatagcagccgatgcaccgcagggacagccatgctccgagcgaagctgatccgggtggcggactcgcgtacagaatcgcgctaaatgggggatatgccgcacgatctcttcctggccacccagataccgcccgcgctcgaactggcgcttgccgaccactacacgctctatcgcgatacaccgcccgccaccacccgtgccatggtcggcggcggcatgatgacggtcgatcgtaacctgctcgaccgactcccggagttggaaatcattgcggtccacggcgtcggccatgacggcatcgaccgggaggccgtggcggcgcgcggcattcgcatcgcgatcaccccggacgtgctgaccgaggatgtcgcggaccaggcgatcgcgctgtggctggcggtcgaccggcggatcgcggcgaacgaccgggcgatgcggatgggcaactggaccgtgccgctgggccggcgcgccagcgggcggcggatcggcctgttcgggctgggccggatcggccaggcgatcgcccggcgcgcggagccctttggcggcgagatcctctacaccgcacgttcggccaagccggtcgcgtggcacttcgtgcccgacctggccacgctggcggaggagagcgacgtgctgatcctcgccgcgccgggcggacctgagacgaagggcgtggtggatgcggcggtgctggaccggctgggtcctgacggggtgctggtcaacatcgcgcgcggcagcctggtcgacgaagaggcgctgatcgccgcgctggacgcccaccggatcgccggcgcggggttggacgtgttcgccgacgagcccgatgtgccctatgcgctgcgccggatgaaccatgtagtgctctccccccatcagggcagcgcgacgcgggaggggcgagcggcgatggcggacatggtggtcgccaatctggaggcgcatttcgccgggcaggaggtaccggggttgctgggttagggtttcctttgggcttcgacttcgctcagcctgaacggagatttgtaagctacccacagccgctcaggctgagcaaagtcgaagcccacgccccaccaccgctatttcgccgccttccggagcgccaaccgcaccagcgcgtccagggaagcactggcccccaattcctcttccgccgaggccaccgccgcgctggcctcggctgggcggaagcccaggttgagcagcgccgataccgcatccgcacccgctccgaccgtcgccgccgcaccgccacccgatccgggggccagcacgatgccgccgaccttgtccttcaactccatgacgatccgctgcgcgagtttcggcccgacgccgttcgcgcgcgcgaccatcgccttgtcgccgctggcgatcgcccgcatcaggtcggcgggttcgagcgccgacaggatcgccagcgccacccgcgaccccacgccctgcacgccggtcaacagccggaaccagtcgcgctcatcggcgctggcaaagccgaccagccggatcgaatcctccgacaccagcatctcggtatgcagcatcgccgcctcgcccaccgaaccgatgacggacaaggtgcgcgccgacgcaccgaccagatagcccacaccgccgacatcgataaccgcatggtcgatgccggtggagtccaaacgtcccttgagatgcgcgatcatgcggccggattagaacaaaacgggggtttcgtcacgtctttcggtggaacggaaaatggatcacgcgacgccgcgaagcgggataattttgttcgcgcggagacgcggaggcgcggagatgttgccttgccggacgacatgcgggctttgccgacggttgagatcagagggccgctgacgcggcgagtggcacacctccgcgtctccgcgcctcctcgtgaaccatgtcttctaaatggccgaagcccgtcgctgcatcgcccgcgcgctggcaagatgatgcgcatgggtgatcgccaccgccagcgcgtcggccgcgtcggggccggtgagcttcacaccggggagcagatgaccgaccatcgcctgcacctgcttcttgtccgcgccgccggtgccgacggtcgccttcttgacgatgctgggatgatattcgccgacgatcagtcccgcttgcgccgcagcgagcaggacgatgccgcgcgcctggcccagtttcagcgttgattgcgcgttgctgttgcccagtacctcttccaccgccgcgccgtccggctgttgctggcggatcacgtcgtagagcgcggcgtgcaggttcgccagccgccggggcagcggcatcgacggctcggtcttgatctggccgttggcgacatggcgcagccggttaccttccgccgcgatcaccccccagccggtggtgccgagaccggggtcgaggccaaggatgatggcggggggtggggtcatcttctgccttgcgaggggtaatctatggttcctacccctcaccaccgggctttgcccggcggtcccctccccaagccatacttggggaggaatgggatcaggccagcttttccatcacttcgtcggagacttcgtaattgccccagacggtctggacgtcatcgtcatcgtccagcgtgtcgatcagcttgaacagcgtcgccgccgccgcctcatcgactgcaaccatggtctgcggccgccaggcgagcttggcgccttccgcctcgcccagcacgggctccagcgccttggcgacttcgtgcagatcggcctgcgccgtccagatctcgtggccgtcctccgacgaagtgacgtcttcggcacccgcttccagcgcggcctcgaacaccttctcggcgtcgcccgcgctggcgggatagttgatcaggcccatccggtcgaagccatggctgaccgaaccggcggtgcccagattgccgccattcttcgacaccgcggtgcgcacgtttgtcgcggtgcggttgcgattgtcggtcagcgcctcgatgatcaggctgacgccgccggggccgaaaccctcgtaacggatttcctcgtaattctccccgtcgccgcgcgaggccttgtcgatcgcgcgcgcgatattgtccttgggcatcgaggccgccttggccgcgttgacggcggcgcgcagacgcgggttcatgtccgggtcgggcgtgcccatcttggccgcgacggtgatttcgcgggaaagcttggaaaatgccgccgagcgcttcttatcctgcgcgcccttgcggtgcatgatgttcttgaatttgctgtggcctgccatcggtgcctcttgagatgatcgggctctttacgaccgcgcaagggcctttgccaacccgtcgatcttcgcctccagcgagtcgagccgttcaataaccgcgatatcgagtttgtgatgcaggcgcaggatgtcgatctcggcgcgcaaattggtgcgatagtcgaggctggcggccaatctatccttcgccgcctgccggttctggctcatcatgatgaccggcgcctggaccgccgccagcgtcgagagcatcaggttgaggaagatgtacggatagggatcgaagaccagcccgaaatggctgagcacatccgaattgagtagcatccatcccagcagcaccaccgaaaatgcgatgatgaaaccccaactgccgccgaccgccgccacccgatcggccagtttttcgcccaacgtcgcggtctcgtccgcgacatcggcggcgtcgcgtgtactgatgctgcccgattcgatatcggtcagaacctggcgttcctcctcgtccagttcggcaaagggcttgcccagcgcgcggcgggcggtttcggcggcggtcgacagggccatgggcaaggggctccgctgggaatcaaatgccttgctccttggggcgttgatcggccaaacgccagagtcatgacggtacgcgtggatatgggaaccgacgagcgaggctcgtcggtgccgatcgatcttgaggagcttctggcgacccgcctgctcgtgcagggcaattcggggtcgggaaagtcgcatctgctgcgccgcctgctggaaaagtcggcgggccaggtgcagcaggtggtgatcgatcccgagggcgatttcgtcaccttgtccaaggcctatggccatgtcgtgatcgaagccggcgactatgccgaacgcgaggtcgggcggttcggcgcgcggattcgtgaacatcgcgcctcggtggtgttgagcctggaaggactggagatcgaggggcagatgcgctgcgccgcgaccttcctcaacgccctgttcgatgcgccgcgtgagcattggtatccccgcgctggtggtcgtggacgaggcacagctcttcgcccccaccaccggcggcgaggtgtcggaggaggtgcgccgcgcctcgctgtccgccatgaccaacctcatgtgtcgcgggcgcaaacgcggcctggcgggcgtgatcgcgacccagcgactcgccaagctcgccaagaacgtcgcggcggaggcctccaatttcctgatgggtcgcaccttcctcgacatcgacatggcgcgcgccgccgatctgctcggcatggagcggcggcaggccgactcgatccgcgatctggcgcgcggtaccttcctggcgctggggcctgccgtctcgcggcggccgatcacggtgaagatcggcgcggtggagacctcggcccggtcgggcagccccaagctgacccccctgcccgacgcgccgccgccggacctgcaggaactgctcttcgcgcccgtcgaggaagcccccaccctgccgatgaccttcgacccgcgcccgcgccgggtccccgccgaggaactgatggccgatctcggccgcccgccgctgcccacgaccgccgcgccggccgcgcccgagatggacgaggccgaggtcgaggcgatctacgaacaggtactgcgcgcgatcgtcgaggaccccgaatcgaccttccgccccgcctcggtgctgttccaggatttccaggtgcgctgccggatggcggggctggcccggccgccgctcgacctgaacggcttcgcccggcggctgtcctgcgcacgggcggggattttcgacgtcaacgatcccgactggcaggaggcgctggcgctggccggaatgctgcccgacgacatgctcggcgcgttcctgctggtggcgagggccgcgcgcgagggcctgccctgcccgccggataccaagatcgccgagacctatggcaccagctctttgggccgggtgaagcggctgatcgcctatatcgagagccgcgacctgttcgtgtgccgcaccgacctgacggggaagcgatcgatcacgattccgcggctgggctggacgacccaggcggcggagatgggttgaggggcttcccttggccttcgacttcgcttgaggggaacggaggttgaagtgaagaaaccgcaaacttacgcttcggcactccgcccgatgatcagggctttggggcagcggctttgatcatcggccgtggtatccagatcgtgcatgacaacccttcgaccaatggtccgccatccggcatccggacgcgcttgaaacagccgccgagcggaaattcccgactcagccagcgtccctccggctgatcttgctcgtaggattgaatcttatgccgttccagaaaggcccatagcttgtcggccgccgcaccggagcagatatatttgtggctgctgtccgtttcggtaacgtaatttgcctcgatcgcttcgttcagacaagcttccatgaggaccggcatctgctccgggaaaggctcgtcggttattgcggcaagcagggcgaggacaaagatcagcatgatggaccgaagtcatgcccggtcagggtgtgaccggcaagcgccaacatggcggcgctattctctccaaagtccaagaacggctcatcgacaaacgcctatgcaagcccccccgttaagcctgagcgaagtcgaaggccaccccccaccgccggctacaaacaaaaagggcgacggagccctcgccccgccgcccttcgcatatccgaacccgaaagcgggatcagatcatgcccagcgccttcatatacacttcgaggatggcttcctcttcctgatattcctcccgcttcttcttgcggatggccatgatcttcttgatcgccttgggatcatacccacgcgccttggcttcggcgaatacatccttgatgtcgtccgaaatgcccttcttctcttcttccagccgctcggcccgctcgatcagcaggcgcagttcgtcggccgtgacattgccgctgctgtcgaaattctcgtccgccatcatcttaaccttttgaaatcctgtatgccccgaagagcccgaccggatcgccgccccgatgcccatcgcctggggcggcgggccgtctggcgcgaatgtcgggatcggcggcgggtctaggcggttccgggccagcgctcaagccggctgttcacgcattcttcttcacgctttcggccatgcgcgccagttgctccgaggtcgcctcggcctggtgctcggccttccactgatcatatggcatgccgtagatcgcttcgcgcgcggtcgccttgtcgacgcccgccgcctcgcccacccagtcggacaggcagttgcggcaaaagcccgccagccccatcaggtcgacattctgcgcatcggtccggtggcgcaggtgcaggaccagtcggcggaacgccgccgccgcggcctgatcatcgattgcattcaacgcatccaccgcatcggccatattcgtcgctcctaggttgatcgtaacgcattaggctttaggacacaggccgaaaagaagcaggatgtgaacatgatcaaggctctcccccctcgttcgcgcaaagtccgcgtcctggccacgctcggccccgcgagcagcgatcccgaaatgatcgccaccctgtttcaggcaggtgccgacgccttccgcatcaatatgagccatggcgaccagcagtcgaagatcccgctgatccaggcgattcgcgcgctggaggaacggttcgaccgcccgaccacgatcctggccgatcttcagggcccgaagctgcgcgtcggcaagttcgccgagggcaaggtcatgctggagaccggcagcaccttcatccttgatcgcgaccccacgccgggcgacgcgacccgtgtagagttgccccacaaggaaatcttcgccgcgatcgagccgggcgcgcgcctgctgctcgacgatggcaagctcgtcctgcgcgtggctttccatgatgaggagaagatcacgacgctggtcgaggtcggcggcgcgctgtcgaacaacaaggggctgaacgtccccgacgtggtgctgcccatggccgcgctgaccgagaaggaccggtcggacctcaatttcgcggtcgagcagggcgtggactggatcgcgctctccttcgtgcagcggcccgaggatttgatggaggcgcgcggcctgatcaaggggcgcgccgcgctcctcgccaagatcgagaagccgcaggcgatcgaccggctagaggagatcgtcgagcagtgcgatggcgtgatggtcgcgcgcggcgacctgggtgtcgaattgccgccccaggcggtgccgccactccagaagcgcatcgtcgaggtctcgcgccgcatgggccgcccggtcgtcgtcgcgacccagatgctcgaatcgatgatccagagcccctcgcccacccgcgccgaagtgtcggacgtggcgaccgccatttacgacggcgccgacgcgatcatgctgtcggccgagtcggcggcaggcgcctggccggtcgaatcggtcgcgatgatgaacgcgatcggcgtgtcggtggaaaacgaccccggtcacggcgagcgtgtccacttcaccgccatgacccccgacccgacgaccgctgacgcgctggccgaggcggcggcgcggatcaccaacacggtctcggccaaggcgatcatctgcttcaccaccagcggctcgaccgcccgccgcgtcgcgcgtgagcgcccctcggtgccgatcctggtcctgaccccgcagctcgaaacggcacgccgcctgggcctgctctggggctgtcacgcggtgcacacccgcgacgtcgaatccttcgaggagatggtcgccaagtccaagcgcatggcgctgcgccacggcatcgccgaggcgggcaaccaggtcgtgctgatggccggcgtccccttccgcacgccgggatcgaccaacgtgctgcacgtcactcggatcatgggcgacgaactggcgaattacggggacggggtcgaggtgtaagcccggccgccttatggcctgaacgataagggggcggcggggcatcattccgtcgcccttttctttgggtcgacgccggatacaccggacaagaaaaaagccagcgccgtagcgctggccttatctggtgcagacatgactgcttgttagccgccagtaccgcaatctctgaggattggaaatttgcccaatcgacgactgcggtcaagcccggtcgcctccaattcggatcgatcttgcgttccgttccaagcccttttttccatagacaaaggggtccatcatcgggggaaacaggatggacgggggagctatggactggcggcttggactggatctcggcgcgaactcattgggttgggcggccttgcggctggatcgcgcgggcgatcccatcggcatcctcgccatggggtcccgcatcttcagcgatgggcgcgatcccaagtccggggcctcgctggcggtcgatcggcgtgctgcgcgggccatgcgacggcggcgtgaccggttcaaacagcgtcaggccgcgctcctcaaatatctgatccgcgatggcctgtttccggcggatcaggccgatcgacagaggctggcggatgaagacccctatgccctgcgcgcccgcgcgctcgacgaggaattgtcgctgttcgaaatcggccgggcgctgttccacctcaatcagcggcgcggctttcagtccaaccgcaaggcggatcgcggccaggatgacgaagcgggcaagatcgcggtcggtgtggaccgactgaatcagcagatggaggagcagggcgcccgcacgctgggcgagttcctgcatcagcgccgccgagccgccaccgatgccaatcacatcccttcggtccgtacacgcctgcgccctgaaaccggcgagggggcgaagggcgatggctatgacttctacccctcgcgcgcgctgatcgccgaggagttcgaggagatttgggccgcgcaggcaccgcattaccccgacacgctgacgcagcaggtccacgaccggctgtacgagatcatcttccaccagcgtccgctccgcgcgccgcaggtcgggcaatgtacgctggtcgccggcgagacgcgcctgcccaaggcgcatccgctgttccagaagcgccgtctgctcgaggagatcaacgcgctgatgatcgtccggcccggcgagatcgcccagcgcctgacgcccgaggagcgcgacacgctctatctgaagctgaaggacaagcgcaccgtcagcttcgccacgctgcgcaagacgctgaagctcgacagcgccgcgcggttcaacaaggaaagcgagaaccgcaccgagttgaagggcgacgaggtggcggccgagctgggtgccaagacgcgtctcggcacccgctggcagcatctgtcgggcgaccagcaatgggaggtcgtccaccgattgatggcgctcgaaagccaggcggacgaagccgcgtttcgcgactggatcagccagacctatgacctgttgcccgaacaggccgcggcggtgctgggcgcgcgattgccacagggccatggccgcttcggaccgaccgccaccacgacgctgatcgactcgctgctccacgaccggaccgaggatggccgggtggtcgtctatagcgaggcggtgcagcgctcgggactgggtcatcacagcgatctgcggcacgaccgcgatgacgaggacgtcaccgagctcccctattatggcgtcgccctggaacgccatatcatgcccggcaccgccgagccgaccgatccggaagagatgcggatcggccgcctgaccaacccgaccgtccatatcgggctgaatcaactgcgccacgtcgtgaaccgactgattcgcgcctatggcccgcccaaggagatcgcgatcgaactcgcccgcgaattgaagctgagcgaggacgagaagaagaagcgcaatagcgagaatcgcgacaaccggctggccgccgaggggcgctcgaagaagctggaggaaatccgccagcgcgataccggcgccaaccgtgcgctgctgaaattgtgggaagaactcaatcccggcaacgtcctcgaccggcgctgcatctataccggcgagcagatttcgatcgacatgctgttttccgaccgggtcgaggtggatcacatcctgcccttcgcccagacgctggacgattcgaacggcaacaagctgctctgcctgcgcgaggccaatcgcgagaagcgccgccggtcgccctatgaggcctggggacataccgaccgctggcccgacatcgccgagcgtgcctctcgcctgcccaagcccaagcgctggcggttcgagcccgatgcgatgcagcgctttgcgacggaagacggcttcctggcgcggcacttggtcgacacgcaatatctcggccgattggcgcgcgaatatctgtcctggctctatcccgggcgtggcgaggatcgggccatgtctgggtttcacccggtcggctcacggaaatggtccggcgcaaactgggctgaacgacctgctgcccgaccataatttcggcggcggcgcggaccagcccaagaaccggctcgaccaccgccatcacgcgatcgacgcgctggtcgtcgcgatcgtcgatcgggggatgctgcaggccatcgcccgcgcttcgggccaggacggtagcgaggggcgcgagcgcatccatattcccgctccctgggacggctttcgcgacgatctgcgcgtggcggtcaacgggatcatcgtgtcgcaccgtcccgaccatggcaccgtggccaaggcgggattggcgcgcggccgcgaccagaccgccggccgccttcacaacgacaccgcctatggcctgaccggcgagaccgacgccaagggcaacagcatcgtcgtgcgccgcataccgctatcggcgatcaagaaacccgccgacatcgcgcgggtccgcgatccgctgctacgcaacgcgctggccgagttcaccaagggattggacggcaaggcgttcgaggcacggatcgggcggtttcacgaattggggccgcttctctatcgcggcatccgccgggtccgcgtggtcgaaacgctgaccgtcatcccgatccgcgatgccgagggccgggcctataaggctataagggtgacagcaattaccgttacgatgtctgggaaatgccggacggcaaatggcgatgtcaggtcgtgtcgatgttcgacgcgcatcagtcgaccgaacaggcacggccgcatcccgccgcccgcaagattctcagtctgcagcgcaacgacatactcgcgatcgaacggaccgaaggggatcgtgaactggttcgcgtcgtcaaattttccgaaaagcaattcgccgtcgcgcccccgcatgaaggcggctcacttaagactcgcgacggcaatgccgatgatccgtttcgctatctttatccctcccccaacacgctgaaaggctggcgcgcacgccaagtccggatcgacgaactgggccgcgtgctcgaccccggcttccccgcccgcaagtccgtacggcgcacccgcccccgcgccgcgccggtcgactgacgagggacgccgccgcgatgggtttggaacggatcgtcgatatcgccaccgacaaccggcatctgtccgcccatcgcggcttcctgatcgtctcggaggagcgggtcgaggtcggccgggtgccgctcgacgatgtcggcgcggtcatcgtccatgcgcacggcgtcacctggtcgaccaatctgatcgtcgcactggccgagcgcggtgcggtgatgctgttgtgcggaagcaaccacagcccggccgccatctgcctgccgatcgacggtcatcatgcgcagaacggccggatgcgcgcacaatgggaggccgggcgtccgctgtccaaacagctctggcgtgcgctggtggtggccaagatccgctggcagggcgcggtgctggccgccaatggccactccgccaccgccttcgatcatctggcgcgcaaggtcggatcgggcgaccccgagaatatcgaggcgcaggcggcgcgccggtactggccgaccctgatgggcgaggctttccggcgcgaccgcgatgcgcaaggcgccaatgcgctcctgaactatggctatgcggtgatgcgcgccgcctgcgcccgtgcggtcgtggcggcggggctgcacccgtcgatcggcgtccatcacgcgcatcgcggcaatcccttcgcgctggccgacgatgtgatcgagccgttccgcgcgctggtcgatgccctgaccatccggctgatcgcgcacgacatcaccggcgtcacgtccgaggccaagcgcgcctatgccggcctaatcgcggtcgacctgatgctggacgacggtatcaccaccgtctggctcgccatccagcggaccgcgcagaccctggcacgcagcttccagagcggtcgcgccaccgacctgatcctgcccgcgccccccctccgcgctggaactggccgccctggacggattgatcgggcgatgagcccgcgtctcgccaccacgcccatccccgcgagcggcgcggcacaactgtcgggatatcggctgatgtggattttcgtgatgttcgacctgcccgtcaccaccaagtccgagtcgcgcgccgccaccaaattccgccaatatctgctcgacgaagggttcgaaaagagccagttctcggtctatgcccgtttctgcagcggcaaggagcagatggaagcttatctacgccggatcgaggcgaacctgcccgacaagggcgagatccacatattgagcttcaccgaccgccaatatgagaatatcatccgcttcgccggccaatcccgccggcaaccgcgcaaaaaccccgaccaactggccctgttctgatgcttcgcgaccgttttgactatgccggatggtggatttcgtcgttgcagatcaacgcgataccccaccatccagcatagccgctcagagattgcggtccagcggcaacaccctgcgtccccgcttgatgaccggaccgagcatagccgctcagagattgcggtccagcggcaactgtcgccgaattccaccttggcaacaccggagcatagccgctcagagattgcggtccagcggcaacggcgcgccccggccatcgcttgcgcgcgctagcatagccgctcagagattgcggtccagcggcaacgcgcgatcgggtcgccatcggggccgcaagagcatagccgctcagagattgcggtccagcggcaactaccgccgcttttgactctgcatctgggatagcatagccgctcagagattgcggtccagcggcaactatgcggattggcttacggacgcgcggaggagcatagccgctcagagattgcggtccagcggcaactacgcgccttatatgaacgcgaacaggaacagcatagccgctcagagattgcggtccagcggcaactgatcgacgaacgcgaacatctggagggccagcatagccgctcagagattgcggtccagcggcaacccagtgctggacgcatccgtcagttcgtgtagcatagccgctcagagattgcggtccagcggcaacgaatgtaccgatcaggtcataatagagcgtagcatagccgctcagagattgcggtccagcggcaacagaaggtctagcattctgaaaccggcttcaagcatagccgctcagagattgcggtccagcggcaacaccccggaggaggccaacgccatcgcggtgagcatagccgctcagagattgcggtccagcggcaacaggccgagctgccgggccgcgacctgggatagcatagccgctcagagattgcggtccagcggcaaccaaggacgaagagcgcacacgctttgcagaagcatagccgctcagagattgcggtccagcggcaacccgcagctactggcggggtgccggtgggtgagcatagccgctcagagattgcggtccagcggcaacacatcggcgcattcgcccccagtagcgtcaagcatagccgctcagagattgcggtccagcggcaactgaaagcctgttgccgcccttgatcgcacgagcatagccgctcagagattgcggtccagcggcaacagattgcagcatctgggcttcttcgggagcagcatagccgctcagagattgcggtccagcggcaactggtgtcacgccgatgagcaccagcgaattagcatagccgctcagagattgcggtccagcggcaacccgcgtcctccacgtcccaaccggcagtgtagcatagccgctcagagattgcggtccagcggcaactaatacactcgtcatggacaaggccgatgaagcatagccgctcagagattgcggtccagcggcaacagcgcgtaggcgtggccgtaaagccaaccgagcatagccgctcagagattgcggtccagcggcaacctccccgtgcgagagggcggcgcataatgtgttcttcggattgctcccgcgtaccgccaaacaaaaagggcaggcacttcgcagcgcccgcccctttcgtcatccggcaaaacccgatcagatatggatcggcttgccctgcaccgccatggcggcttccttaagcgcctcggcatgggtcggatgcgcgtggcaggtataggcgatgtcttccgacgtcgcgccgaactccatcgcctgtgccgcctgcgcgatcatcgtgccagccaggctcgagatgatccacacgcccagcacgcggtccgtcttggcgtcggcgatgaccttcacgaagccgtcggtgtcgcggttggtcttggcgcggctgttcgccatgaaggggaacttgccgaccttgacctcgccgcgctctttggcggcctcttccgacaggccgacaccggcgatctcgggcatggtgtaaacgacgctgggaatgacatcgtggttcacgatgccggtctggccagcaatattctccgcgaccgcgacgccctcgtcctcggccttgtgcgcgagcatcaggcccggcgcgacgtcgccgatcgcccagatgccgtcgacattggtcgcgaagtcatggtcgatctcgacctggccacggccgttcagcttcacgcccgccgcttcgaggttgagcccatcggtgttgggcttgcgaccgatcgcgaccagcacggcatcggccgacagcgcttccgtcacgccgcccgccgccggctcgaccgacacggttgcgcggtcgccctcgatggtgacgccggtcactttggtcgaggtcttcagctccatgccctgcttcttgaacagcttggccgattccttgcggacctcgccatcgaagccggggaggatctggtcgagatactcgaccaccgtcaccttggcgcccagacgccgccagaccgagcccagctccagcccgatcacgccgccgccgatgacgaccagatgctccggcaccttgggcagcgccagcgcgccggtcgagtcgaccacgaccttctgatcgatctccacacccggcagcggggtcacgaccgatccggtcgcgatcacgatgtcacgcgcggtgacggtctggtcaccgaccttgaccgtgctcgaatcctggaacgccgccttgcccttcagccaagtgaccttgttcttcttgaagagatattcgatgccgccggtcagctcgccgaccgccttggccttttcggcatgcatctggtcgaggttgagcttggccccctcgatctcgacgccgaacttggcaagcgcgccgtggctcgcttcctcgaacagctcggaggcgtgcagcagcgccttggacgggatgcagccgacattaaggcaggtgccgcccagcgtctcgcgcgcttcggcgcatgcggtcttcaggcccagctgcgccgcgcggatcgccgcgacatagccgccggggccagcgccgatcaccaggacgtcatagtcatactcagccatttgtctctcccgttccccggcgttcggggtccagcctgcgggcgcacccgccttcatacagcaataacggaccctcgccggtgcaagggtccgtataggtcacaaaccgatcagaggtcgatcaggatgcgggtcgggtcctggatcgcgttcttcagcgcgacgaggaaggtcaccgcctcgcggccgtcgatgatgcgatggtcataggacagcgccaggtacatcatcgggcggatgacgatctggccgtcgacgacgaccggacgctcctcgatacggtggaggcccagcactgccgactggggcgggttgatgatcggggtcgacatcagcgagccgaagacgccgccgttggagatggtgaaggtgccgcccttcatctcttccatcttcagcgtgccgtccttggcgcgcttgccgaagtcgccgatcgtcttttcgatgcccgcgaccgtcagatcctgcgcatcgcggatgaccggcacgaccagtccgttcggcgccgagacggcgaccgagatatcggcatagtcgtgatagatgatctcatcgccctcgatcgaggcgttgaccgaaggaatgtccttcagcgccatcgtggcggccttcacgaagaagcccatgaagcccaggcggacgccgtgcttcttctcgaacaggtccttatacttggcgcgcgcctcgatcaccgcggtcatgtcgacgtcgttgaacgtcgtcagcatcgcggcggtgttctgcgcttccttcaggcgcttggcgatcgtctgacgcaggcgcgtcatcttcacgcgctcttccttgcgcgccgaaccggcggggcagcggccggagcggcggccagagccggtgcgctcgacttgttggcggcggcggcggcgacatcttccttggtgatgcggccgtccttgccggtgcccttgatcgtcgcggggtcgaggccatgctcgagcaccgcacgacgcacagacggcgacagcgcggcaggcgagtcgctcgactcgtcggcggcaggcgcagcagccggggcgggagccgccgccggagcctgggtcacggccggggccgccgcttcggtcttggccggggccgagccaccggcgtcgacggtcgcgagcagcgcacccacctgcaccgtgtcgccgaccttcacggcatgctcacccatgacacccgccaccggcgagggcacttcgaccgagaccttgtcggtctccaggctcgcgatcggctcgtcgaccgcgaccgcgtcacccggctgcttcagccattcgccagggtcgcttcggtgatcgattcgcccagcgtcggcaccacaacttcagtcgccatttccatttcctccgcccggccttggggccggggctcttacgcgggcgggcaaagcgcccgcgccagatttcatccctccccggctccgcgaagagccggggcattcgtcagtttcagtccgcggcggccgtggtcggcttggcggtggtgttgctgccctcggcgcgcgtccggcggatttcgtcgcggacattgtggcccagcgcatcggcgaccagcgcaccctgctcggcggtgtggcgcttcatcaggccggtggcgggcgatgccgccgccgcacgacccgcatagcgcgcccgcttcaccgacgccccggcttcggccagcgcttcctcgatcagcggctcgacgaagaaccagtaaccgttgttcttcggctcttcctgcgcccagaccacgtcctgcaggttcggcatccgcgcgatccgcttggcgagcgcgtcgctcgggaacggatagagctgctcgacgcgcacgatctgggtcgtggtgtcgcccgccgcgtcgcgtgcctcgatcaggtcataggcgaccttgccggtgcacaggaccagacgcgtcgtcgcctcgtcggcagcgccgttggtgtccgacaacaggcggcggaagtggctctcgccctggaagtcctcggccttcgacaccgccagcttgtgacgcagcagcgacttgggcgtgaagacgatcagcggcttgcggaagttacggtgcatctggcggcgcaacaggtggaaatagttggccggggtggtgcagttcgcaacctggatattatcgttggcgcaggactggaggaagcgctcgggacgtgccgacgagtgctccggcccctgcccttcatagccatgcggcagcagcatcacgaggccgttggcgcggagccacttggattcgcccgacgtgatgaactggtcgatcatgatctgcgcgccgttgacgaagtcgccgaactgcgcctcccacagcaccaaagtcttcggatcggcgagcgcatagccatattcgaagcccagcacgccatactcagacagcgggctgtccagcacctcgaagctgccatgctcgacggtcttgagcggcacgtacttgtgctcgtcggtctggtcgacccagaccgcgtgacgctgcgagaaggtgccgcgacccgaatcctggcccgacaggcgcacgccgtatccttccgacagcagcgagccgaaggccaaggcctcgccggtcgcccagtcgaaattctcggacgtagcgaacatctgccgcttggcatcgagcacgcggttcagcgtcttgtggacctgcaagccttccggaatcgtggtcagcgtgcggccgatcgcgtcgaacagcttcttatcgaggccggtctccacgttgcggcggccctgatcggtctccttcggtgccgacaggcccgaccagcgaccggcgaaccagtcggccttgttgggcttgtagctcgcgcccgcctcgaactcgccttcgcagcgcgtgatatactgcttgatgttctcgtcgacccaggcctgatcgaccacgccctcggcgacgaggcgcttcgcataagtctcggcgacaccggggtgcgagcggatcttgttgtacatcagcggctgggtgaagcccggctcgtcgccctcgttatgaccgaagcggcgatagcaccacatgtcgatcacgatgtcgcggtggaacttctggcggaactcgatcgccatcttggtggcgaaggtcaccgcctcgggatcgtcgccattgacgtggaagaccggcgcctggacgcccttggccacatccgacggatagggcgaggagcgcgcgaactgcgggctggtggtgaagcccacctggttgttgatgatgaagtggacgcagccgcccgtgttgtagccacggatgccggagaagccgaggcactcccacacgatgccctggcccgcgaacgccgcgtcgccatggatcagcaccggcaccgaggccgcgtgatcggtcaggtcgcccgcgatcgtctggatcgcgcgggtcttgcccagcacgaccgggttcaccgcctcgaggtgcgaggggttggcgaccagcgacatatggaccttgtggccgtcgaactcgcggtcggtcgaggtgccgaggtggtacttcacgtcgcccgaaccgccgatgtcatcggggttggccgaaccaccggcgaattcgtggaagatcacgcgcagcggcttggccatgacgttggccagcacgttcagacggccgcgatgcgccatgccgaacacgatctcgcgcactcccatctggccaccgtacttgatgaccgattccagcgcggggatcatcgactcgccgccgtccaggccgaagcgcttggtgccgacgtacttcttgccgaggaacttttcccactgctcggcctcgatgaccttgttcaggatggccttcttgccatcgacggtgaactcgatcgccttgtcctggccttccatccggtcctggaggaagcggcgctcctccacatccgcgatgtgcatatattccaggccgacattgccgcagtaattcttacgcagcgtatcgaccagctcgcgaacggtcgcccattcgaagcccatcgtgccgcccagatagaccttgcggtcgatatcggcgtcggtgaagccgtgatattcggtcttcagatcttccggaagctcacgcaggccagacagaccgagcgggtcgagattggcagcaagatggccgcgcacccggtaggtgcggatcagcatctgcgcgcggatcgcgtcgcccgccgccttgacgatatcggcggtcgaggggctgcggccgcagcggccgccggagcgggcttgccacccttggcgggcttgggggccggttccatctgggtcggatcgaggcccgccgtcagatcgtcggtcgaggtcagcggccagcgcttgttctgccagctcggcgcgcccacgccctgctccaggccgtcgaaaaagctgcgccagccggcatcgaccgacgacgagtcagcctgatacttggcatagagcgcttcgatgaaggcggggctgacgcccgccgcgatgtcgctgaaatcctggccttcgtagcccatgagacgcttcctcgaccgcccgtcttcttcatgatcgccaccccggcacatccgcctagggtccgcagccgcgagcggcccgcctgccgccacggaccccggcgggtgtgccggggtgacgcgatacgccttacttgttca

SEQ ID NO: 3089 - DNA, 22085 bp, synthetic construct
  source 1..22085: mol_type = other DNA
  misc_feature 1..22085: note = Synthetic
acaatgtgctgcagaaggcgagctatatcgcggtcatcttcctcgccctgccgctgctgatcctgaccggcctcaccatgtcgcccggcatgaacgccgcctggccctggctggtcgatctgttcggcggtcgccagtcggcccggtcgatccatttcctggccgccttcgcactggtcgccttcttcctggtccacatagtgatggtgctgctcgccggtccggtgaacgagataatgtcgatgattaccggccgttatcgcctgccgaaggaccggccatgatcctgacccgtcgcaccctgctgctgggcgcggccgcgacgctggcgggatgcgaccggatcgcgcgccagtcgctcgcccgcgacatcctcttttccgcggacaatttccatcaatgggcgcagcgcacaatcatggcgcgcgacgcattggcacaggagttccggcccgagcagatttcgcccatcttccgcgcgaacggcaccgcccatcccaacaccccggcctacaaggcgctgtggcgcagcggctttgccgactggcggttgcgcgtcgacggactggtcgcccggcccctgtcgctgtcgctgtcgcaattgcacgccctgccccatcgcgagcagatcacccgccatgactgcgtcgaggggtggagcgcgatcggcaaatggcgcggcgtgccgttgaagctgctgctcgacggcgcggggctgcgcgatcgcgcccgctatatcgtcttccactgcgccgacgacatgggcggtggcaccgcttattatgagagcatcgacctgatcgatgccttccacccccagaccatcctggcctttgccctcaacgaccggccgctcagcgtcgccaatggcgcgccgctgcggctgcgggtggagcggcaactgggctataaacaggccaagtatctgatgcggatcgaggcggtcgagagccttctgtcgatcggtcggggcaagggcggtttttgggaagaccgcgccaattatgattggtatgcaggtatttgacggccgcgtaacgagaaggaccagcctgctccatgaagattttcgaccgcgttctgagacgtcttgtcaccaagggtcagttgaccgttttctatgccgacggccgtagcgttaccgtcggttcgcccgatcccgacctgcccccgctggcgctgcgcttcctcgacaagcgcgtgcccctcgacatcgtcaaggatccgcgcctgggcatggccgaggcctatatcgatggccgggtggcgatcgagggcggcggcatcatggagttcgtgtccatgatccgccagaataatgcctgggaaaatggcaagtcgatcgacgccaaggggccggtgcagcgcgcgctgaagacggtgcgccgcaagctgtggaaggccaatcaccgcagccggtccaaggccaatgtcgcccatcattatgacctgtcgggcgcgctctacgccctcttcctcgaccgcgaccgccaatatagctgcgcctatttccccgatgcggagaatgaggcggggatcagcctggagcaggcgcaggaagacaagaaggcgcatatcgccgccaagctctacctgaagccgggcatgaaggtgctggacatcggctgcggctggggcggcatggcgctgtacctgcacaagcatttcggtgtcgacgtcaccggcatcaccctgtcggaagagcagttgaaggtcgcgcgccagcgggcgatcgacgcgggcgtcgccgaccatgtccggttcgaactgatcgactatcgcgacattgaagggccgttcgaccgcatcgtgtcggtcggcatgttcgaacatgtcggcaccgccgactatcgtgtcttctacaacaagtgccgcgacctgctgacccaggatggcgtgatgctgatccacacgatcggccgcgtcgacggccccggcatcaccgacctgttcaccaccaaatatatcttccccggcggctatatccccgccttgtcggaaatggtggcgggcagcgagggcacgcggctgatgatcaccgacgtggaggtgctgcgcatccattacggcctcaccatccgcgactggtacaagcggaccatggcgcacaaggcggagatcgtcgccctctatgacgagcgtttcttccgcctgtggaccttctatctggcgggcgcggcgaccgtgttcgaacatggatcgatggtcaatttccaggtccaatatgtgcgcgaccgccgcgccttgccgatcacccgcgactatatgatcgaggccgagacggcgctgcgcgggcgctgatacgccgccacgcaccgatgatgcgaggcagaaatgcgaccgtccgggcgggctgaacacagcctgtcagccccgttcccggacggttcagtgacttggccccattctcctctccacgtccccgcgctgccccggcagccgggccggacagaggagaagcaagatgaaattcctgtggaaaagcgctgcgatgctgggcctggccatggccggcattaccgtcaccagcgcaccagcccaggcgcaacagtatcgcggcgacggctggcgcggcgaccgcgatggacgctgggagaatcggggtcgggatcggcgccactgggacaatcggcgttggggcgaccgccgcgactggcgcggcgaccggcgctatcatgatggccgacgcggctattatcgctccagctatcgccagcgctgctgggatgagtggcgctataatccctatcgcgaccgccgggtccgggtgcgcatctgtcgctgaccccgcctgagcaaatatatatcgcggcccgccccgattgaacccgagggcgggttgcggcatttctgtgcccatgagcgatcccacccccgtcttccagagcctgttgtcgggcctcccgatccttcttctccacctcgcctgcgcgaccctggtctgggccgcggccatggcggtctatatgtggataaccccacatgacgagttcaagctgatccgcgccggcaatgaggcggccgccatttcgctgggtggcgcggcccttggccttgccgtgccgctcgccttctgcctcgccggatcggtcaatgtctgggacgtggtcatctggggcagcgtcacgctggtgctgcaactgatcgcctttcgcctggtcgacctgttgctgggatcgctgtcgggccggatcgaggcgaatgagcgatccgccgccatcttcctggcgatgatgaaggctgcggtcgcctgcctgaccgctgcggccgtggcgggctgacgcgatgggacgtcggggctgcggctgcctgccctggctgctgggcctgatcctgctgctcgcctggctgggcgagatacaggcaccgtccttgcaggtcgaacaatatgacccccgctcgccccgccgcccgctgccgcgcgggggcgaggaacaatatattatcgaggatcggcccggtggcccggcggacgccatgggcacggcctttgcggtggatcgcaacggcgtgtggatgaccgccgaacatgtcacccatggctgttcgcgcgtcgggctggaacagcgcggccgcgcgctggaagtgccgcgcgtcatcgaaagccgggaatcggatgccgcgatcatcccgcgcggcccccgcagccccgccgccctgccgctgcgcagcggtgcgccatcgcccggcgccaccggctatcatatgggctttcccgccggcgaaccgacattggtcctgtccgaactgatcggccgggccgaagcccggcgcggcagcagcggcatcgaccagccagtgctggtctgggccgagcgtggccgcctgcccgagggcgatggcaccctgtcggggatcagcggcgggccggtcttctccaccgatggccgggtggtcggcatcaacagcgcatcgacggaccggcgcggccgcatcctgaccgtcgcgcccgacgcgatgatccgcctgaccgccgccagccgtgccgtcggcgaccagccggtcgcctatccctttgccggccttaccgacgcgcaggaacgcttcgccaactggctggacgaaggcgtcatccgccgcatcttctgcgacgtcgacgacgggcgcggcggttgacgcctgcgggcaggaaagagtaggcgctgcgcagcatttccagggaaattgagatcatgagcgacacgccccccgaccatctgtccaccaacccgcgcagcccccatttcgacatggaggtgctgcagcgcggcatcggcatccgtttcaagggccgcgagcgcaaggatgtggaagaatattcgatttccgagggctggattcgcgttgccgccggcaagacccgcgaccgtaacggcaacccgctgaccatcaagctgtcgggtgaagtcgaggcctggttcgaaaatccggccgaaggcgccgagggcgacaaggccgccgacgccgaataagcctataaggccggtctccgctcaatcgcgggggccggtcagttcatcagggattcgcgcttcacgtcagcgatgacgtcgcccagcgagcgatccgacgggctgttgtccgcatattcgatgatgaacgggtctgcctcgatatgcggcgccgccttgcgccggggcgcagcaggcttgggcgataccgtcgccaccatcgcgtgcgtctgaaccgacgccatccgtgtcgccgccctgggcagcggcgcaacctccgcaccttcctcaccatcgcctgtatcggctgcggcgctggcatagcgaaggctgctgcccagcgccggatcgggcgtgaagggatgcagcttcgctttggccggatagatgaagccgaaggtaggattggtgcgggcacccatctgcccggtcgggctgtgccagacgcgcacctggctccagtcgcccgcgtccgacacgtcgatcgccagcacatcctcctcgatcgcgccgggcgacgaccagttggcatggcggatcagcacgcggcgatcatccaatatccggctgaccacggcgacatggccgagcgtcatcgcccccaccggccggaaggccagcaccgcgccctttttgggcctgttgccacgcttgtaatgatcctgcgcctggtcccaccaggtcagcgcgtcaccatagatgtcgacaccggaaacgacgcgcgcatagggcacgcattgcagcgccgtggcggccattacaggggctgccgtcagactggacagcaaagccatccagcgaacatatcgaaacattattgcgacctctaagcgtcgagaatcgccccaccgcgatcgaccctagagcctcatccgtaaggaagaggttaatggcttagaaagcaccccgagcgctgtcgctgccggcggtggcgcggtcggccagggcgatctggaccggctggtcgaggctgggcttgtcggcatagatgaagccgttggccgggttggagcgcaggccgacatcaccgatcgggccataccatacgcgcacgtcggtccagtcattgttggccgacacgtcgatggcgcggacattgcgctcgacaccgccacgataggaccagttggcgtgggtcagcagcacttcgcgatcattgacgatcttgctgaccatggcgacatggccgaccggcatcgaacggctggacgcgaaggacaggacggcgccgacgcggggctcatggccacggtcgtagcgaccggcagcctggttccaccaggtgttggcattgccgaaaatctcgatgcccgaaacttcacgggcgaagggggcgcattgcaggacaccggcggtggctggaacggcagagaaggcaccgagcgcaagcatggcggctgcgaacagcgcgcgaaaaccaccgatcattccttgcgacccccgacttgtaggtaggtataatccccgatgacctccttagggcagacgccgttcgtcttgaaaaccgccgagcgatgagtcgttgctgcgatgcgtcatgctgcggaacgaaaaacatgcccggccgttacatggagccgggctgcaccattcaactcgttgaaaagactatcttccgtgccggtcatccagacctggccgccggtttcgcgcaaccggtcgaacagtgcagctcgtcgcgacgggtcgagatgcgccgccacttcgtcgagcagaagcactggcggctggccgcgatcggccgacaccagagccgcatgcgccagcaggatcgagagcagcagcgccttctgctcaccggtcgaacagagcgccgccgcctgattcttggcgatgtggacaacatccagatcatgacgatgcggccccgacagggtgcggccggccgcagcatcgcgtcgccgcgcgcgggccagccgctggccgagcggttcgtcactggcgccatcctcccgcgcgattcggatgaggggccgggcgaaaggctcgtctgactggtcgatcagttgcgcgttgaggcgcgcgaccagatcggcgcgggcggcggcgagcgccgtgccatgctcgtccatctgcgcctccagcgcgccgatccaggtcgggtctgcccggcgcagatcggtcagcagccggttgcgcgcccgcattgccgcttcatagcgggcgctgtgcgcggcatggccgggatggagcgccagggtgaggcgatcaaggaagcgacgacgaccgccggggctgtcgaggaacaagcggtccatcgccggggtcagccagacgatcgcgagatgatcggccagcgcattggcggacgaggcgacaccgccgatccgcacctgccgccggtcgggcgcatccgcgctgacgccggtgcccagcaccacgccatccacctccgccgcaatgccgaagctgccgccaccatcttgccgcgccatcgcccgcagcgccgcgccgcgcagccctcggccaggcgccagcatcgatacggcttccaatatgttggtcttgcccgcgccattgtcgccggtcagcaggacgaacggctggtcgggcacgatcagcgcgtccgcatggttgcggaaatcactcagggtgaggcggccgatcatcgcgccgctgtagcgaggacggcgcgccgggggaagcggttcagacggccggagtgcagcgcttgcgcacgatcgccgtgccgtcattggtgatggtaagctgttgcccatcggccgagggacgcagcatcagggtccgggtccagctttccccctcacccgcgaaattggcgacgaccgccagccgcccctccccctcgcgcgttacacgctgcaccgtgccgacgctttcgtggaagatcaggctggccgccgtcagttccagcgcctgggccgccgcccggtcgccacagcgctcattggtgccggtccagcgcccctgcagcgcgatcgggatcgcattggcgtggagcgcctcccccttggccacgggcaggtcgggtgcgggctcgaccggggtgatggcattggcgccgggtggcgcgtcgcgcgtgctgggcagcgcctggtccaatatgttggtgaccatggcggactgattctgttccttgctgccgcacccggcgagcagcagcagcggaagggcgaggaggaaatggttacgcatgcgatgccaacccggcaggccgcatcgagttccccctatcacccgcgtgaccggccatcgcggccatgctatcaccgccgcgacaatcgaggagggatgccatgccggtcctgggaatgggcggacttttctttcgcgcacgtgatccgcaggcgctgtcggcctggtatcgcacccatctgggcgtcggcggcggatgcagcgccgatcccaatattccggcggtcaacgaatatgtctggcagacgctgggcggcccgatggtcttttcgccgttcaagcaggacagcgactatttcgccgccgacaagagcttcatgatcaatctgcgcgtgtccgatctcgacgggctgctggcggacttgcgcgcggcggacgttgaggccatcaccaagcccgaatgggatcatcccgatgtcgggcgctttgcccggatccatgatcccgagggcaatgccatcgaattgtgggaaccgcccgcccccgccgcctgaccgacccatgggagctagattatgaagagcgcgaagatcatcctggccctggcggccgcagccctgggcacgcagggcagcatggcggccctggcggtcggcgccaaggcgccggaattcaccacccgcggcgcgctggccggcaagaccttcaccgtcactttgtcgcaccagttgaagcgcgggccggtggtcctctatttcttccccaaggccttcacgccgggctgttcggccgaggcacgtgagttcgccgagaatatcgacaagttcaaggcggcgggcgccaccgtgatcggcatgtcggccgatccggtcgatgatctggtcgccttctccaccaaggaatgcgccggcaagttcgcggtcgcctcggccgggccgaacatcgtgtcgggctatgatgtcgcgctcaagatgcggccgggcatgaccgaccgcacctcctatgtgatcgcgcccagcggccgcatcgccttcgtccatagcgagatgagctatgccggccatgtgaagagcacgctcgccgcggtcgaggcgatgaagcagaaataaacccggcgagcgaaggggtgatgcgatcaccccttcacaaatttgccgaaccagtcgatcgtttcgctccaggcggcctttgccgccgccgcattatagctcggccgataatcggccatgaagccatggtcggcgccggcatgaacggtgatggcatcgggcggcgacttgcccgccgccttgagcgcggcgcgcatcgcctcgacatcggcctgggggatgcccttgtcgagttcgccatattggccgagcaccggcgccttgagtttggccacctcctcgatcgccgacagggtctggaggtcgttcttctgggtcacgagccgaccgtagaaggcgacgccagcgtcgagcgcggcgctgtgcgcggcatagagccagaccacccggccaccccagcagaagccggtgatgccgcgccgtgacgcgtcgccgccatgggcgccggcaaaggcataggtggcatcgatgtcggacaatacctgcgcgtcgggtgccttgctgacgatctcggctaccaactgcttgaagtcgctgaccttggtcgcatcgccatggcgggcgaacaggtccggcgcgacggcatgatagccggcttttgcgaagcgccggcacatgtcgcgcacccattcatggacgccgaaaatctcatgcacgacaacgatcaccggcgccttcttcttgcccgccggccgggcgacgaagccgggcatggcgaaaccgtcgctggtcgggatcgagacgacttcttccagcagcccctccgccggggtctggatggtgctggccgcgaccggctggcaggcggcggcaaaaccggcggcaaaggcgccaccggccaggatatgacgccgactgagcccggtcgaggcgatccagttgcgatcctccgccatgcgctcgacgggggacggcacatcttcgcgatcggtggtcatcggcgctctcctgctatggacgcgcgcagactagcccaaggccacggtcgcgcaagcggctcgactgacaggagaatgatgcctgctatctggttcaattcatgcggcgctgatcgccacatccaatggcgtgtcagctccgctgaattaggccaatatcagcataagcttctcaaatcgaagctacttaagctgacaatgcccatgatatcatgaccaacaaaaaaggcgacgccggagcgtcgcccttatctggtgcgtactgacacttgttaactgccagaccgcgatctctgaactgcaagagtgatggataaggatgccaaggtcaagatgttcctttgagacctcgttcatttcggtatcgattttatcttgacgaaattgactgcgcctgccccactgccaaatccatatggggtgaggaatgatggccgaacagaaaaagcctgtctggcgactgggcgccgacctgggcgccaattcgctgggttgggccgcgatcgaactgagcgcggcggtgaatggcaagccgctctccatcctggccgcggggtcgcgtatcttcagcgacggtcgagatcccaagtccggcgcatcgctggcggtcgaccggcgcgatgcgcgcgccatgcgccgtcgccgcgatcgctttcagcagcggcaaaaggcactgatcaaatatctgatcgccgatggccttttcccggcggatgaagcggcgcgcaaggcaatggccgcgatcgatccatatgcagtgcgtgcgcgggcgctggacgaagcactgtcgttgcccgaactgggccgcgcgctgtttcacctcaaccagcgacggggcttcaagtcgaaccgcaaggccgatcgcaaggcggatgacgacgccggcaagatcgccatcggcatcgatcggacacgcgacgccatcgccgaggacgaagcggcagccggcgcggagccgggcagctggacttttggcaaatggctgcatgagcgccggacgaaaggacagtccgtccgcacccgcctgcgtccggaaagcggcgaggccgccaagggcgacggctatgacttctacccaggccgcgcactgatggaggaggagttcgatgccatctgggctgcgcaggcgccgcatcatcccgatgtgctgaccaatgatgtccatgaccgattgcatgagatcattttctatcagcggccgctgaaggcgccgcaggtcggcatgtgtaccttgatacccggcgaccgacgcctacccaaggcgcaccccctgtttcagcgtcgtcgcctgctggaggaactcaatgcgctgatgatcgtccgaccgggagaagtcgcgcagcgattgacgcgggaggaacgcgacatcctgttcctcaagctcaaggacaagaacaaggtcagctttgcgagcctgcgcaaggcattgaagctcgatcctgacgcccgcttcaacaaggagagcgagaaccgcaccgacctgaaaggggatgaggtggcggctgtgatggggagcaagacccgcttcggcaatcgctgggtccatttgtcggtcgaagcccaatgggatgtcctcgcgcggctggacgatgtcgaaagcgaggcggaggatgcggcctttcgcgcctggctgtccgaaacctatgcattgacgccggaagaggcgcgggctgtcgccaatgccccgctgccgcccggctatggccggttcggcgagacggcgacctgcaaactgatcgaagcgctacgcgatggcaagaaggacgggcgcgtattggtctatagcgaagcagtcaccgacgcgggccttggccatcatagcgaccggcgtaccggcgaggtgttcgaggatgcgaaggggcgcccgcagctaccctattatggcgtcgcgctggaacggcacatcatgccggggaccggagatccatccgatccggaggaaatgcgggttggccgcctcaccaatccaaccgttcatatcggtctcaaccagttgcgtcggatcgtgaacagcctgatccgcgcctatggcccgcccgccgagatcgcgatcgaactggcacgcgaactgaagctgaccgacgacgacaagaagcgcatcaatcgggagaataacgagaaccggttgaacgcgcagcggcggtcggaaaagctgctggccatcggccaggccgacaccggcgccaaccgcgcgctgctcaagctatgggaggaacttaatcccgccaatgtgctggatcggcgcatgctgaatgcgattgcgcgggcatccgggcaggaaggggccgaagggcgcgaacggatcatcattccggaagccaagcgcgcctttgccggattgatcgcactcgacttgccgggaccaagcggcaccacgaccgtagcgggcgcggcgaaccgggccgcgcaaagcctggcgcgtgccttcgaaagtgggcaggcgggagacatcatacttccttctccgccatccgcactggaactggccggactcgacgcgttgctaccatgagcgcgagccaattgagcggatatcgactgatgtggattttcgtaatgttcgacttgcccgtaacgaccagagaacaggcccgcgccgccaccaaattccgcgagttcctgttggacgaaggctttgagaagagtcagttttcggtctatgctcgcttctgcaacggtaaggaacagttcgaaacctatatgcggcgggtcgagtcgagcttgcccgatcgcggcgatgtccacatcctcagcttcacggatcggcaatatgaaaatatcgtgcgattttcaggacagcgccggcggcggcaacgcaaaaaccccgatcagctcgccctattttagcgattcgggcgattttcacagcgatggatcaacggttattgccttgtctttcaatgcaataaccgttgatccatcatagctgttcagagatcgcggtccagcggcaacaagccccagaccggcggcttcaccaagaacatcatagctgttcagagatcgcggtccagcggcaaccttcgcctccgcattatgatcctcgatcgcatcatagctgttcagagatcgcggtccagcggcaacgggtcgattacatcgccgcgcgcagtcatgatcatagctgttcagagatcgcggtccagcggcaaccaaccagctgcgcatcgcgatggcgcggtcgatcatagctgttcagagatcgcggtccagcggcaacccgctatcgcgtcggccactgacgccggtgatcatagctgttcagagatcgcggtccagcggcaacaccgcatcgccaccatgaatgaaacgctcgatcatagctgttcagagatcgcggtccagcggcaactctggcacaacatgcacaagcttgaccttcatcatagctgttcagagatcgcggtccagcggcaacttcgcggtgctggtggtggccgatcagggcatcatagctgttcagagatcgcggtccagcggcaacccggcatgaccctgcgcgatcggcggttcgatcatagctgttcagagatcgcggtccagcggcaaccctgtaggagacgcctttggtgccgcttcgatcatagctgttcagagatcgcggtccagcggcaactaccggacgcggcgcaaagcgccgtcgcgcatcatagctgttcagagatcgcggtccagcggcaaccgaaaccggccttctacgtgtgcaaatatcatcatagctgttcagagatcgcggtccagcggcaacatgttatcgcattgacgctccagcgccatcatcatagctgttcagagatcgcggtccagcggcaacaaccatgctcaagccatgtgggcggcgcatatcatagctgttcagagatcgcggtccagcggcaaccaaacgcgagcagctgacgatgcttgaggatcatagctgttcagagatcgcggtccagcggcaacgtagcggccgagttgggagtgcatgagcacatcatagctgttcagagatcgcggtccagcggcaaccgccgaaggtaagcattgctgctcacccccatcatagctgttcagagatcgcggtccagcggcaacgtcaacagcgtcgagcaatggatgcccgaaatcatagctgttcagagatcgcggtccagcggcaacaaattctcccgtgctttgctgatagacaaaatcatagctgttcagagatcgcggtccagcggcaactggcggctggcgcgatgatcaatctctttcatcatagctgttcagagatcgcggtccagcggcaaccctgtgggcagcgccagctcgtcggcaatgatcatagctgttcagagatcgcggtccagcggcaacaatgcaaccatccgccacgctggttgcccaatcatagctgttcagagatcgcggtccagcggcaacctggccgactggatcatccgcaatgccgagatcatagctgttcagagatcgcggtccagcggcaacctgcggcctcaccagtaaactccacgctcttgtcgatgctgaaggacgccctgtcagcctgaggctgaccggcgggcaggttcatgatgcctgtgaagccgaggccctgattgagaccattcccaagggcgcaaccctgctgggcgactagggatatgacagcaacgccatccgcgaagctgctacggcaagggacgtctgggcgaacattcccaatcgatccaaccgcaagcagcgcttcgccttctcgccatgcctccacaaacaacgaaatctcgttgaacgattcttcaattgtatcaaacagttccgaggtatcgcgacacgctacgacaaagacccagccaacttcctcgccgccatcaagctcatctgtattcgcatctggtgcaatgcgtaatgagccaacgcgctagttgtttgatcccacggtttgatggtgcgatcgtttcattggaatggaaggaagctttatgggacaggttcgtcacgcgagcgccacgaccacgcacgccgtccgagcagcaatacagcgatcagcgatcgcaagcttcgctcgcgacttctcgttcaaatttctccaattcgcgctgccgcttgtgccgagcttccgcaatgcaggaagtccgaagagaaattatcacctccgtcctaccgccaaaaagacttcggacatcgtcaggaacacccctccaaaaatagaggcgatctccgcgccagtatatgtagcgttcgcccccgaactgctttcaaatcccgcccccatttgtagcagttagccgcacggaagccccggtttcaaggactttccaggctttgcaaccagttgcaaggggattggcggagagggagggattcgaaccctcggtaccctctcgggcacgccgcatttcgagtgcggtgcattcgaccactctgccacctctccgcagaagaccggaagcactgaaccgcaagggaaaaatgccggaccgatcgggtcgaggggcgcccattagcgaatgattctccgcttgccaagcgcccttttcagtatttttcttgtctccctgcgcaggctccctaaattggtcatatgaaagtcacgattcagaatatcggtaccagcataattgccccgccggtcgtccatgcccgcttcagcattggcgatgtgctcaagcatcgcagcttcggctttcgcggcgtggtgttcgatatcgacccggtcttcgccaacagcgaggaatggtatgaatcgatccccgaacatgcccggcccgacaagcagcagcccttctatcacctgctcgccgaaaatggcgagaacagctatgtcgcctatgtgagccagcagaatctggtggccgacgacagcgaggagccggtcgaccacccggcgatcaccggcctgttcggcgattatgcggatggcaaatatcagctgcgcccgcgccaccggcactgagccgcactggcaagccgcgatcggcattgccctgtggctcgttgcgggaggggcgctgcacgcggccccgccgccgacgcaggacaaggtcgcggtacccaatgccgatccgaccttccccttctccaacgagatcgccgcctttgccaaagccgaggcggccggcccgccgatcgccgacgcgacattgttcctgggcagttccagcattcgcctgtgggacatcaagggcagcttcaccgatatcggcacggtcaatcgcggctttggcggtgcgaccacgcccgacgtgctgcattattacaagcgcttgctgcccaaggcgaagccgcgatcgatcatcgtctatgtcggcgaaaatgatctggctgccggtgccactcctgacaaggtcgcccaggacatcctgaccctgctgcgccaattgcgcgccgactatcccagggcacatatcgcctatctctcgctaaaacccagcccgatccgctggacgctctggccccagatggcggcggtcaacatgatcgtttcggcgcgcagcaagacgatgaaattcgactatctcgatgtcggccgccccttgctcgccaccgacggcctgcccgacgcatcgctgtttcgcgccgatggtttgcacatgaatccgcgcggttacgaacgctggaccagactggtcgacgcctatctggaccatgccgtgctggctgacgccggcgctggccgcgattcctgaccgccctgtcggccagtttaagattgatccaagcgccagcaacattattaccgaccgcttgatcgatcgactggcgaagggaaaagagcagtgacaaccgattcggccaaggccgtgccgatggcggagctgacgctacgcggcgtcattcttggcgcgctcatcaccctgctgttcaccgccgcgaacgtctatctcggcctcaagatcggcctgaccttcgccacgtcgatccccgccgcggtcatctccatggcggtgctgcgcctgttcgcgaccggcacgatcctggaaaacaacatcgtccagaccatcgcttcggccgccggcacgctgtcggcgatcatcttcgtgctgccgggcctggtcatcatcggctggtggcagggctttccctattggctctccgccttcaccatcgcgctgggcggcatattgggcgtcatgtattcggtgccactgcgccgcgcgctggtcaccggatcggacctgccctatcccgagggcgtcgccgccgccgaagtgctcaaggtcggcgccggttcgcgcgagggcctggaagaaaataagcgcggcctggccgccatcgtcatgagttcgctcgccgccgccagcttctcgatcatcgccaagaccaagatcctggccgaggaggccgccaccttcttcaagctgggtgccggcgccagttcggtctcgaccagcttctcgatggcgctgatcggtgtcggtcatctcgtcggtatctccgtcggcgtcgcgatgttcgtcggcctgctcatcagttgggtgggcatcgtcccctatctcaccagcccgctgccggctggtgcagaccttgccgacctggtcggcaccaccttccgcatgaaggcccgcttcatcggcgccggcacgatcggcatcgccgcgatctggacgctgctcaagatcctcggcccgatcatcagcggcatccgctctgccctcaatgccgccaaggtccgcaagtcgggcgatgccggcatgctggacatcaccgagcgcgacctgccgatcggcatcgtcttcggcaccatcctcgcctcgctggtgccgatcgcggtgctgctgtgggtgtttgcccagggcggcccgatcgccgccaatccggtaccgatcatcggcctgacgttggcctatatcctggtcgccggcatcgtcatcgcgtcggtctgcggctatatggccggcctcatcggcgcgtcgaacagcccgatttcgggcgtcggcattctcgccgtgctgggcgcctcgctgatcctcgctgccatctacggctcgggtggcaacccggaacagagccaggcgctgatcgcctatgcgctgttcaccaccgccatcgtgttcggtgtcgccaccatctccaacgacaatctgcaggatttgaagaccggccagctggtcggcgcgacgccgtggaagcagcagatcgcgctggtgctgggcgtgttgttcggcgcgttggtgatcccgccggtgctcgacctcttgaacagcgccttcggctttgccggtgcgcccggcgccggtcccaacgccctgcccgcaccgcaggccgcgctgatctccgcgctcgccaagggcgtgctgggcggcgatctcgactggggcctgatcggcttcggcgccgccatcggtgtcgtcatcgttgcgctcgacgagctgctgggcaaggcgggcaagctacgccttccgccgctcgcggtcggcatgggcatctatctgccgatggcgctgaccctgctgatcccggtcggcgcggtgatcggccatgtctacaatcgctggtcgctgcgccaggcgaaccccgaatttgccgagcgcatgggcgtattgatggcgaccggtttcatcgtcggcgaaagcctgttcggcgtcgcctttgccggtatcgtcgcctcgaccgacagcgacgcgccgctggcgctggtcggcgaaagccattgggcggtgccgctgtcggtgctgatcttcgccggcgtgatcgccgccctctatgcgcgcctgcgccgctgggccaccgcaccgctaggctgacaggcgtccggggcggccgacatcgggtcgccccagcccgcccaagtcatgtggcccttgcgccacgtcacataagttacatttttcagacttttatctgcaatcatactgccatgaagccgtaaggactcatcgccaatggcctccccaaccgaaggggagcattcaccatgaagaccttgttccgtggcgcgagccgcgccgcgatcatccttgccaccgccatgcccgccgccgccttcgccgggacgatcaccggcaccgtgtccgacggcaccggcacccgcgcgctgcagtcgacccagttgcgcatcgtcgaaaatggccgcgtcgccgaagccggtcgcgatggctcctatcgctttcccgatgtcgcgccgggcacctacacgatcgaggcccgctatgtcggcgccgatccggtccgcaccaccgtcgtcgtgcccgccaccggtgacgtcgatgccgatatccgcatcggttcgaacatcgatgcgtcgatcattgtcgtcggccaggtcgccaaccaggcatcgacgctgtcgcgccagcgcgcggccgacggtgtcgaaagcgtcctgacccgcgacgcgatcggccagttccccgaccagaatgtcgccgaatcgatccgccgcctgcccggcgtcaacatcctgaacgaccagggcgaaggccgcttcgtgtcggtccgcggcctggacccggaactcaacgccgcctcgatcaacggcacccgcgtgccggcgccggaaagcgacgtccgatcggtcgcgctggacgtcatcccttcggaactgatcgaatcgatcgaaatcaagaagtcgctgacgccggacatggacggcgacacgatcggtgcctcgatcgaaatcaacaccaccagcgccttcgaccgcaagaaggatctctactcggtcaagttggaaggcagctataacgactatgccgacgcgctgacgcccaagggcagcgtcgatttctcgacccgcatcaccgatcgcttcggcatcgccggcggtttcagctattacaagcgcaagttcgagagcgacaatatcgaggcggccgactggaaccagacggacgatggcatcgcctatgccgaggaaatccagtatcgcgactatgacgtgcagcgtaagcgcctcggcggttcgctcagcctcgactggctggcgaccgacacgaccaagctctacgcccgcggcctctacagccagttcgaggatcaggaatatcgcggcgacgtgattttccagatgagcggcgaaccggaatcgggcgacgcgaccagcgcgcaattctccgatgaggacgaccgcatccgcgtccgtcgccggatgaaggaccgcttcgaaaagcagcgtatcaagtcgctgaccctcggcggtgaaaccaataccggtccctggaagctgacctatgcgggtagctggtcggaagccagcgagcgcgaaaatggctcgatcgatccgacccgcttccaggcggatttcgaagaaaatggcgtgaatgtgggcttcgactattcgaacccgatgaagccgacctacaccgtcaccggcaataccgacgctttctacgatccgtcggaatatggcttcaacgagctggaacgcaccacgctgtcggactcgaaggatcgcgaatatacgatcaggggcgacatcagccgcgccttcgccaccgatggcggcaccttcaccgtccagaccggcatgaaggcacgctggcgcaagaagagctataatctccagtcggacgtctatgacggctatgatggcgactatacgctcgcctacgtgctgggcggccagacctatcgcattcaggatatcctgccgcaggcgagccacaccggcccgaccaatttcttctacgccaaccaggccaatttcgagcgcaacgatttcgattcgctgctcaactcgaccacgtccgattattcggtgacggaagatatcctcgccagctacctgatgggccgctgggacagcgacacgctgcgcgtcatcacgggtgtccgcgtggaacagacccgcaatgacatccacgccttccagaccctggcgaccggcgacgaggtcgaggatatcacgatcacgccgacccgcttcgtgcgcaactataccaactggctacccagcctgacggtacgttacgaacccgtccgcaacctcgtcttccgcttcggcggctacaagagcctggtgcgtcccaagctgtcgaacctggccccgcgcttcgacatcaacgaggatggcgaagccacgctcggcaatccgaacctgaagccctataatgcctggaacatggacgtgtcggccgaatggtatttcggcaccaacgccgccctgaccggtggcttcttctggaagtcgatcaaggacttcgtcgtcgaacagacgatcgaggaaccgggcaccatctatggcgtcgactataatcagctgaccacctacatcaatggcgacaaggcgaagatcaagggcttcgaactgtcctacagccaggtgttcagcttcctgcccgcaccgttcgacggtctgctcttgaacgccaactatacctacaccgacgccaagggtacggtgctgacggatggcgacatcgccgatccccgtaccgtcccgctggcctcttcgtccaagaacacgttcaacatcgtcctgggctatgagaagggaccgatctcgctgcgcgccgcgggcacctatcgtgacaaatatctggatgagctgggcggcaaggccgaggatgatcgctatgtcgacgatcatttccagctcgacctgagcgcgaaatatcgcgtcgcgccgggcgtccgggtctttgccgagtggatcaacgccaccaacgaaccctatttcgcctatcagaactatgccggtgccaagcgcctgctgcaatatgaggaatataactggaccgcgaagttcggcatcaccgccagcttctgatcccgttcgtttttcccctgcttgccggtcgcgcccttgcgcggccggcaagtcccgttttcccggaaaggacgcccatgtcccgactgttcctgaccatgctgctgctggcgagcgccgcgccgctctccgcccagccggccgccgccccgtccgtgccccgctccgccggcacgccctatgccgcacgcagcctgcccgaccggatcatgctgacgcccgccgccgatccgtcgcgcggcatggccgtcgcctggcgcaccgacaccgcccaggccgccagcgaagcgcagatcgccatctcggtcgacggcccgacgctggaggagaaggccaggatcgtgaccggccccgtcggcaccgcgaaggatagcgccaatggcccggccctctaccaccagatccggttcgacaatctgacgcccgatacggtctatgcctatcggctcaagggcagcgcgggctggagcgaatggctgcaattccgcacggcggcggctgaagccaggcccttccgcttcctctatctgggcgacatccagaacggcatcctcacctatgccagccgcgtcattcgtcaggccttccacgccaatggcgggatcgaactggtcgcccatgccggcgatctggccgcgcagcgcgacgacctcgaccatgacgacgaatggggcgagttcaaccaggccggcagctataactggtcgatcgtcccgcaactacccgcgaccggcaaccatgaatatgtcgatgtggtgaagcccgacggcagcgagagccgcaagctcggcccctatttcccgctgcaatttgccctgcccgacaatggcgtgccggg

SEQ ID NO: 3090 - DNA, 17195 bp, synthetic construct
  misc_feature 1..17195: note = Synthetic
  source 1..17195: mol_type = other DNA
cagatcatcgcggcttcgatcacgcgcgcatccccccgctgaatggatagaccgccgccggcccgtgctcagcataaggcacgtccgtgacacggcagagatagacgtcgttctgcggatgcgcctcgatcacgaagccggcggcgcgcagcatcgcctccgaacaggcgcggttgggcgcccaccaattggtccagtcgcccgcgaacttccgctcgatgaagtgcatcttcggatagctggcatcgtcgaaataggcgggcggcgtccaggtgccgggcacgtagaagggatggtcctccggcacctcgcccacgtcgcgcgatccctgctgcatcgtctggaacagcatcagatcgcccgcgacatgctcgcggatcaggtccagcgccagcaacgggtggcgcaggtggtagagcacgcccatgaagatcacgaggtcgaagcgctcaccgagctgcgcgacgtcatagaccgacagcttgcggaactcgacgctgtcgccgaagcccagcgccgcgctggccagtcgcgcctgcgccagatagcgttcgtcccagtcgatgccgaccacgcgcgccgagccgcgccgcttcatctcgaccgaatagaagcccgcgttgcagccgatatccagcaccgtccgcccggacaggtctgcgggcaggcaggcaccgaattcggcgaacttgttggcgggataatcctggaggaaatggtcgggcgcggtttcgacgccgcccggcagatggatgttgtgaaaccacggcgcgagcgcttccacctgctcgcgcaagcccccgttggcccgcgtgtcggcctgcatcttgtcccctttacccgcaatcgtttcgccaacgatcggtccgcgcctgcgttccatctacttagccttattgccggacgtggaaccaccgcgcctctcgcggctttgcggggtgatggaggaacatagccgccgctggaccgatgcgatgcgcgcggagcgcttcgccgacgcctgggcggtggagcaagcggtgctggaggcgcgcgacctcgccacccgcgacgatccgcgcctgccctaccaccagcgctgggtgtgggacggccgcccgttctccggccgcgatgtgctggtgcgctgctatcacgggctgggcgacaccatccagttcgcgcgcttccttcccaccctggcggcgcgcgcgcgttcggtgacggtggaggcaccggcgcatttgcatccgctgctgcatttccccggcgtgacgctggcggcgttcgatcaggcgcatccgctgccatcggcggactgcgatattgagatcaccgaactggcctttgcactgcggctcggcccgcgcgacgtgcccgcgcgctacctgcgcgccgcccccgccgcgctgccggcggggacgatcggcctgtgctacaaggccggcgactgggataccgcgcgctgggtgccgcccgccatgctcgcaccggtcgtcgggggtcgccccgcgctgtcgctggttcccgagccgtgcccgctgccggtgcgcaatccggatggctgcccgctcgacatcgccgccaccgccgcgctggtcgctggctgcgcgctggtggtcacggtcgacacgatgatcgcgcatctggcgggtgcgctcggccgtccgacatggctgctgctgaaggccgcgcccgactggcggtgggatccggcacggcgcgacagcggctggtatccgacgatgcgcctctacgcgcaatccacgtccggcgactggacttcggtgatccgcgccgtcgcccacgacctgtccgcacaaggggaacaccatggccagcctgcccaatccgtcggtgcccgtctcctggggtgagttgctcgacaagatcaccatcctggagatcaagcgcgagcggatcgcccgcgccgaggcgcgcgccaatgtcgcgcacgaacattcgctgctgcaacggatcggcgcgggcgtgctggcggtggacgggatcgcggcgctgttcggccggctgaagtcggtcaatcaggacctgtgggacatcgaggatgcgatccgccaccaggaagcggcgcgcgcctttggcgccgagttcgtgcggctcgcacgatcggtgtatcgcaagaacgacgaacgcgcggcgctgaagcgcgagatcaacctggcgctggaatcggaactgatcgaggaaaagagctacgccggcaccggatgaggatggccgggcctatgatcgcggccgctcgttgagcgccaccagccgcgcgccgtcaccttccagctccagcgtcgtcaccgatcccggatcgcatcccagcgcgaagatccgctccagccccagcccgagataatgcgccaccaccccgcggatgatgtcgcaatgggtgacgcacaccgtcgccccctcccccagcgtcgcgacgaacccgaccgcgcgggcgaccgcctccgccatcgtctcgccccccggacagcgcgcggaggcgcgttcggcattccagcggtgccagtcgggatcccgcgccagcgcgtcaaagcgcatgccggcgaagcggccgaaatccacctcgtccagcgccggcgcgatcgccacgcctccgccggcgacggcgcgcccggcgacgatcgccgccgcggtttcgcgcgtgcgggtgcgcgggctgctgtagatcgcggtcgtcgccatgccgtccagatgccgcgccaccgccgccgcctccgcgcggccgcgcgcgtcgagcgcgatcgcggagcgaccgctcagcacatggcccacctcggcatggctgccgtgccgtatcagaagaacgcgccgttccatcgtcgccgcatagaacaggcggagagatgacaccaagaaaattgcatgtccgtaacggcttccggaacaaagctatgtagaagatgttccagcctgtgtaatcaagcagcaacgatcgcccgtgtcattgatccaaatcaatcgtccggcacgtgcgacgcgggagggaccagcgtggaaaccatactcatcaccggcggcgccggtttcatcgggcgtttcgtggccgatgagctgctggcgcgcggcaacaaggtgcgtgtgctcgacagcctgatcgaacaggtacacggcgattgcgagcgcccgccgctgctgaatgacgaggtcgaattgatccacggcgacgtccgcaacggcgacgtcgtgaccaaggcgctggacggcgtcgacagcgtgatccacctggcggccgaggtcggcgtcggccagtcgatgtacgaggtggagcgctacacctccaccaacgacgtcggcaccgccgtgctgttcgagaagctgatcgacaagccggtgcggcgcgtggtcaccgcctcctccatgtcgatctatggcgaaggactgtaccgcgatgccgacggcaatctggtgcaggatgccgaacgcaagggactgcgcgacgggctgagcaactgggagccggtcgatgcgcagggccgcccgctcacccccgtcgcgacgccggagtggaaacagccgaacctcgcctcgatctacgcgctcaacaaatatgtgcaggagcgcaccacgcatatcatggccgcgccctatggcatcgagggcgtgtgcctgcggctgttcaacgtctatggccccggacaggcgctgtcgaacccctataccggcgtgctggcgatcttcgcctcgcggctgctcaacgggcagcagccgatgatcttcgaggatggcgagcagcgccgcgacttcgtgcacgtcagcgacgtggcgcgcgccttcgccgatgcgctggtgctgccgcaggcggtcgggggcacgttcaacatcggctcgggccacgaccgctcggtgaccgaggtcgcgaccgaactggcgaaggcgatgggcaagaacgatctcgcccccgaaatcgtcggcaaggcgcggatcggcgacatccgccattgcttctgcgacacgacgctggcgcaggaccggctcgacttccgcgcgacgcaggatttcaccgccgggcttgccgagctcgcggaatgggtcgccgaacagaccgccgaggacaaggtcgcgacgatgcgcgccgagctcgagaagcgcggactggtcgcatgacaggcgccgtgctggtcaccggcggcgccggcttcatcggatcgaaccttgccgaccggctggccggcgaaggtcatgacatcacggtctatgacgtgctggcgcgtgccggggtcgaacgcaacctgacatggttgcaggaacggcatggcccgcgcatccgcttcgtccatgccgacatccgcgacgccgcgcggctggcggacgaagtggcgacggcatcggcggtgttccatttcgccgcgcaggtggcggtcaccaccagcctcgacgatccggccgacgatttcaccaccaacatcgccgggacgttccagttgctggaggcgctgcgcacacgcgcgccgcatgtgccgttgatcttcgcgtcgaccaacaaggtctacggcgatctctccgacctagatttcacgctggaggacggtgcctatcgcccgactgatccgcatgtccgcgcccatggcatcggcgagggccgcccgctcgacttccacacgccctatggcgtgtccaagggggcggcggaccagtatgtgctcgattacgcgcgcagcttcgggttgaagacctgcgtgttccggatgagctgcatctatggccagcgccagatgggcacggaggatcagggctgggtcgcgcatttcctgatccgcgcgctgaacggcgagccgatcaccttgtacggcgacgggcatcaggtacgcgacgtgctcgacgtgcgcgacgcggtgaacgcctatgtcgcggcctggcggcggatcgacagcgtggcggggcgcgccttcaatctcggcggggggccggacaatgccgtcagcctgcgccacctgctggcgcagatcgcgacgctcaccgggcgtccggtcgatgtcagctacgccgactggcgcgccggagaccagcgctatttcgtcgccgacgcgcgcgcggcgcaggcggcgctggcgcttccgccgcgccgcgactggcgcgagggcgtggccgatctggccgaatggctgcggcgcgagcacgcggccgagcgcgcgatcggcgtcgccgcgtgacgcgacgcctgttgatgaccgccgacgcgatcggcggcgtctggcaatatgcgaccggactggcgcacgatctggtgcgcgcgggatggtcggtcgacatcgcgctgctcggccccgccgcatcgacggcgcagcgcgcgcaggcggcgacagatggcgtgacgctgctcgacaccggactgccgctcgactggctggcgcccgacgcggcggtggtggcgacagcggccgtggcgatcgcggatctcgcccgcgcgcgcggtgccgatctggtgcagctcaaccagcccgcgctcgccgtggccgacatcggggtgccggtcgtcgcggtcgtgcatagctgcgtggcgagctggtgggacgcggtggagcagggtccgctgccggccgatctggcgtggcagaccgatctggtcgcgcgcggcctgtcgcgcgccgatgcggtggtgtgccccacccgcgccttcgccgatacggtggcgcgactgtacgcgctgccgcacgcgccggtcgcgatccacaatgggcgtgcgccggccgggccaggcgggccgatccacgacttcgccttcaccgccggacggctgtgggaccggggcaagaatgtcgcgacgctcgaccgcgccgccgcgcggctcgggatcccgttcaaggcggcgggcgcactcgccgggccgaatggcgagcggatcgcgccggcccatctccagacgctcgggcaggtcggtgatccggtcatcgccggctgcctgtccgcgcgcccggtcttcgcctccgccgcgctgtacgaaccgttcggcctggcggtgctggaggcggcgctggccggctgcgcgctggtgctgtccgatatcccgacgttccgcgaattgtgggacggggtcgccaccttcgtcccggccaccgacgcgatcggcttcgccgacgcgatcgaggccgtggccggcaatccggcgctgcgcgccgcgcgcggcacgctcgcgcgcgagcgggcgctggcctattccccggatcgcaacgccgcggcgatggtcgcgctgttcgagcgcgtgtcgggtgcacaccgacgggtcgcggcatgaacatcgtttatttcacgcacagcctgtcgtcatgctggaaccacggcaacgcgcatttcctgcgcggcgtcatgtcggagctgatcgcgcgcgggcacgacgtgcgcgtccacgaacccgaaggggcgtggagcctcgccaacctgctggccgacaatggcgaggcggggctggatgcctatcgcgcccattaccccgaattgtcctcgcagacgttcgcgcccgatgccgacgtggaggcgctggtcgacggtgccgatctggtgatcgtccacgaatggaacgaccatggtctggtcgcgcggctcggcgcgctgcggcggcgcggggcgcgcttcaccctgctgttccacgatacgcatcaccgcgcggtcagcgcgcccgaggagatgcgcggctacgatctggacggttacgacggcgtgctggcgttcggcgaggcgctgtcgcgcgtctatcgcggctggggctggggcgaccgggtgtggacgtggcacgaggcggccgacacgcggcgtttcttcccgatcgacgcggaggagcgcgccgggctggtatggatcggcaactggggcgatggcgagcgtaccgccgagatcgaacattatctgctcgcccccgcgcgcgccgccgaactgccgctcgacatctacggcgtccgctacccggacgcgggcaaggcgatgctcgccgactatggcgcgcgctatcacggctgggcgcccaacgccgccgcgcccgcgatcttcgcgcgcgcgctggccaccgtccacgtgccgcgccgctattacacgacgatcctgcccggcatcccgacgatccgcgtgttcgaggcgctggcatgcggcctgccgctcgcctcggcaccgtgggacgatgcggaaggattgttccgccccggccgcgacttcctgttcgcgcattcgccggacgagatgacgcagatcctgacgcacctgcgcgacgacgcgaacctgcgcgcgtcgctcgccgcatcggggctggagacgatccggtcgcgccacacctgcgcgcaccgcgtcgacgaactgctggcgatactcgcctccctctcccccctgccgccacggagcaccgccgcgtgaagatcgccttctacggatccagcctgctgtcgtcctactggaacggtgcggcgacatactatcgcggcatcctgcgcgcgctgggcgagcgcggctacgacatcgccttctacgaacccgacgcgttcgaccgccagcagcaccgcgacatcgatccgcccgcctacgccagggtcgtcgtctatcccgcgacgcccgaggcgctgcgcggggtgctggcggaggccgccgacgccgatgtggtggtgaaggccaatggcgtgggcgtgttcgaccgcgagctgctggagggcatcatcgcgcacgcgcggccagacgcgctgaagatcttctgggacgtggatgccgccgccacgctggacgagatgcgcgccgacccccaccatccggtgcgcgccgcgctgccgcacctcgacatggtgctgacctatggcggcggcgatccggtggtggacgcctatcgcgcattcggcgcgacgctgtgcgcgccggtctacaacgcgctcgatccgcagacccatcatccggtgcccgccgacgatcgcttcgcctgcgatctcgcgttcctgggcaaccgcctgcccgaccgcgaggcgcgggtggaggagttcttcctgcgcgccgcggcgctgttgcccggacggcagttcctgatcggcggcaacgggtgggagagcaaggcgatgcccggcaacgtccgccaccgtggccatgtcttcaccgccgagcacaatgccttcaactgcacgcccaaggcggtgctgaacgtcgcgcgcgattcgatggcacatatcggcttttcgcccgcgacgcgcgtgttcgaggcggcgggcgcggcggcgtgcctcatcaccgacgcatgggaagggatcgaactgttcctgaccccggacagcgaagtgctggtcgcgcgcgacgggcaggatgtcgcggaccacctcgccgcgctgacgccggcgcgcgcgcaggcgatcggacaggcggcgctgcgccgcgtgctggccgaacacacctatgacctgcgtggtgcgcaggtcgacgcgctgttccgggcgcatgccgcgcgggcgcgggaggcggcgtgatgaagctggtcgtcctgggcctgtcgctcagctccagttggggcaacggccatgccaccaccttccgcgcgctgctgcgcgcgttcgcggcgcgcgggcatgaagtgctgttcctcgaacgcgacatgccctggtatgccgatcaccgcgacgaaccggcgcccgattactgccgcctcgacctgtacgacagcctcgacgcgctggaaggctggcgcacggagatcgagcaggccgatgcggtgatggtcggctcctatgtgcccgacggcatcgaggtgggacggctggtgcagcgatgggcgcgcggcgtcaccagcttctacgacatcgacaccccggtgacgctcgcccgcctcgtgcgcgggacgtgcgactatgtctcggcggcggtgatccccggctatgacatctatttctcgttcaccggcggtcccacgctgcggctgatcgaggagcgttatggcgcgccggccgcgcgtgcgctttattgctcggtggacgccgaccgctatcgcccgaccggcgcggcggcgcgctgggacctgtcgtatctcggcacctacagcgacgatcgccagccgacgctggaacggctgctgatcgagccggcgcgccgccaccccgaccggcgtttcgtcgtcgccggcccgcaatatcccgccacgatggactggcccggcaatgtcgagcggatcgagcatctcgcgccggccgaccatgccgatttctactccgcgagccgcgcgacgctgaacgtcacgcgtgcggacatgatcgcggccggctggtcgccatcggtgcggctgttcgaggcgaccgcctgcggcacgccgatcgtgtcggatcgctggccgggcatcgaggagctgctgacccccggcagcgagatcctgctcgccgacagcggcgcggacgtggacgcggcactcgcccgcgacgacctcgccacgatcggcgcggcggggcgcgcgcgcgtgctggccgagcacaccgcgcgtcaccgtgccgcggagctggagtcgcacctgcgcgaagcggccgcggaacgcgcggcgccgatcggcgcacgggtcgtcatctgagcggcgcttcgccgcaaggtgtcgccgcctagccccgggcgacacggtcgcgacggcggcgcccgggatcaccaaggctttcgcgacgggccgacccgccgccagcattaggacgatgcgctcggccagcgtcgcggtgacatggagtaaggaaggcggcggcgagcccatctgcctgcgctcctacaatgaaaaaggccagcgccgtagcgctggccttatctggtgcgtactgacgcttgttaaccgccagaccgcgatctctgagccttcagaatagctatgctcatgcgcgggtcaaggcattttccgtatcgcgtccgaaacggcgctgatcgtaaggcgctggccagtggtccacgcgtgccgggtcaacggcctagcaggcgatgcgcgccggatggcgattgacgccctctccccgttcgccatcatcgcaccggaatggccgcaactcggcttggcgaacggtgcgtggggagaaatgaccgcatggcgggaggcgacgtgacgaactggcgtctgggtatcgacttggggacgaactcgctcggctgggcggcgctgcggcttggcgctgacggccggccggccggcatcattgcggcgggctcccgtatcttctcggacggacgcgatccgaaatcgggtgcgtcactggcggtggaccgccgcgaggcacgcgcgatgcggcggcggcgcgaccgcttccagcagcgccagcgcgcgttgatgaaatatctggtcgccgacggcctgttccccgccgagcgcgaggaacggcgcgggctggaaacgctcgatccgttcatgctgcgcgcaaccgcgctggacgaggcgctgccgctccatcacctcgggcgcgcgatctggcacctcaaccagcggcgcggcttcaggtcgaaccgcaagaccgatcggcccgacgacgacagcggcaagatcaaggtcgcggtcgggcgactgcgcgacgcgatggatgcggcgggcgcgcgcacgttcggcgagtggctccaccagcgccgtcagccgagcgaggaccatcccgacggcctgcccgtccgcacccggctgcgcgccgagccgggcgacaatgccaagggcaccggctatgatttctatcccgatcgcgcattgctggaggatgagttcgacgcgatctggtccgcacaggccgaacatcatcccgacgtgctgaccccggaggtgcacgatcgcctgtacgagatcgtcttccatcagcgcccgctgaagacgccgcaggtcggcacctgcaccttcggcagcggcgagccacgattgcccaaggcgcacccgctgttccagcgtcgccggctgctggaggaactcaatgcgctgaggatcgtgcgcgccgggcaggtcgccgagcggctgacccccgagcagcgcgacctcctgctgctgaagctgaagagcaagggcaaggtcagcttcgagagcctgcgcaaggtgctgaagctcgaccccgacgcgcgcttcaacaaggagagcgagaaccgcaccgagttgaagggcgacgaggtggcggcggcgatgctgacgaagacgcggctcggcaaccgctgggaacatctgtcgccggacgagcagtgggaggtcatcgagcggctggaaagcgccgaaagcgacgaacaggtcgaggcgttccgggcatgggtggcgacgcggttcgatctcagcggcgagcaggccgtggcgatatcggcggcgcgtctgccgcagggccatggacgcttcggcgagaccgccacgcgcgggctgatcgacgcgctgacgcatgatcgcgaccctgacggccgcgtgatcgtctacagcgaggcggtggcgcggctgggctatcaccacagcgacttccgcaccgaccagacttacgacgaactgcctccctaccccgagatcctcgaacgccacctcatgcccggcagcggcgatccggcggaaaaggatatcttcaagcggctgggccggctcaccaacccgaccgtccatatcgggctgaaccagttgcgacgcaccgtcaaccgcctgatcgcgcaccatggccgccccgccgagatcgcgatcgagctggcgcgcgagctgaagctgaccgaggacgagaagaaggagcttggccgccgcaaccgccagaaccgcgaggaggccgagcggcgatcgcgcgcgctgctgggcatggacaccgacggcaaccggatcgggcggccggtcgcggacgataccggcgcgaaccgcgcgctgttgaagctgtgggaggaactcgatcgcgacaatgtcgcgggccggcagtgcatctacaccggcaagcagatcggcatccacatgctgttcaacggcgaggtggagatcgaccatatcctgccgctgagctccacgctggacgacagcaacgccaacaagctgctgtgcctgcgcgaggcgaaccgcttcaagcagaagcgctcgccttgggaggcatggggacataccgatcaatgggacgagatcgccgaacgcgccgcccgcctgccccgcaacaagcgctggcgcttcgaacccgatgcgatgacccgccatcaggaggagggcggcttcctggcgcggcatctggccgacacgcaatatctggcccggctggcgcatgaatatctcggctcgctctattccgatcgcggcgagggcagcggcaggatatgggtgtcgccgggccggctgaccgagatggtgcgccgcaagctcgggctgaacgacctgctgcccgaccacaatttcgccggcggcgcggaccagccgaagaaccgcctcgaccatcgccatcacgcgatcgacgcgatcgtgatcgccatcgtcgatcgcgcgatgctgcaggccatttcgcgcgtttccgggcaggagggagaggccggccgcgaacgcctgaccgtccgcccgccatgggacgggtttcgcgacgaggtggcgacggtggtgcgcgggatcgtggtcagccaccgcaccgaccatggcaccgccggccacggcaccggctccaccgccggccggctgcacaatgataccgcttacaggctgaccggcgaaacggatgccaggggcgtgccgatcgtggtgcgccgcaagccgctggcggggctgaagcccgccgagatcggcacggtccgcgatcccgacctgcgcgccgcgctgctcgaatggaccgccgggaaggacggcaaggcgctggacgccgcactggcgcggttcgccacgcatggcccgctcccgtttcgcggcatccgccgcgcgcgcgtgaccgagacactgaccgtgatcccgatccgcgaccgtgaaggccgcgtctacaagggctacaagggcgattccaactatcgctacgatatctgggaaatgcccgacggcaggtggcgtgccgccgtcatctcgatgttcgatgcgcaccagcccggcgagcgcccgcgcccgcacccggccgcgaaacggatcatgcgcctgcaccgcgacgacgtgctcgcgatcgagcgcgacggcggcccgcgcgagttgatgcggatcgtcaagttttccgaacgggcgttcgtgatcgcgccgccccacgaaggcggcgcgctgaaggcccgcgacgcggacaagggcgatcccttcaaatatgtctacccgtcgcccaacacgctgaagtcgtggcgcgcgcgcaaggtggacgtcgacgaggcggggcgcgtgcgggatcccggctttccgatgcgcaccgcgcgtcgtccgacccgaacggccgcggcgtagcgcgcctcgatggagcggatcgtcgacatcgccaccgatggccgccacctctcggcgcatcgcggcttcctggtcgtgacgcacgaccgcagcgaggtcgggcgcgtgccgctggacgatgtggcggcggtgatcgtccatgcgcatggcgtcacctggtcgaccagcctggtggtggcactggccgaacgcggcgcgatcctgctgttgtgcggcagcaaccatgcgccggtggcggtgtgcctgccgatcgccgggcatcatgcgcagaacgcccgcatccgcgcgcaatgggacgccgcccgcccgctttccaagcaattgtggcgacgtctggtcgtcgccaagatccgctggcagggcgccgcactcgccgccgagggcaaatcgtccggcgccttcgacttcctggcgcggcgcgtcggatcgggcgaccccgacaatgtcgaggcgcaggcggcacgccgctactggccgctgatgatgggcgaggagttccgccgcgaccgtgccgcggaaggcgccaacgcgctgctcaactacggttacacggtgctgcgctccttgtgcgcgcgggcggtcgtcgcggcgggattgcacccgtcgatcggcgtccaccacgcccatcgcggcaacccgttcgcactggccgacgacgtgatcgagccgtttcggccgctggtcgacctgctcacgctgcggctgctggcgcacggcgtggaatcggtcacgtcggacgcgaaacgtgcctatgccgcgctgatcgcgctggacctgccgggcgagaacggcgtcaccacgctgtccaacgccgcgatgcgcgtcgcgcagacgctcgccggcgcgttccagagcggccgcgccgccgacctgtggctgcccgccccgcccgccgctgcggaactggcgcggatcgcgacgctggtcccggcgatcgcgacggccgcgtgacgacgacgcaactcagcggctaccagctcatgtggatcttcgtgatgttcgacctgccggtcaccacgcgcgaacagtcccgcgccgccaccaggttccgcgaatatctgctcgacgagggtttcgagaagagccagttttcggtctatgcgcgcttctgcaacggcaaggagcagatcgaagcctatcagcgccgcatcgaggcgcacctgcccgacaagggcgacgtgcacgtcctgagcttcaccgaccgccagtatgagaacatcgtccgcttctccggccaacgccgccgccgcccgcgccgaaaccccgaccagctggcgttgttctgatgcgaaacggtcgattcacgtccgcggatgcaccgcctttccgctgctttcacaacgggttggcggcgcatccactatagaccctcagagatcgcggtccagcggcaactcatcatggccgcgccggctggcgtcgtcgactatagaccctcagagatcgcggtccagcggcaaccccgcgacaaccggaaccggcccggctcgcactatagaccctcagagatcgcggtccagcggcaactccggcgcgtcgcgctggcggagacggtgaactatagaccctcagagatcgcggtccagcggcaactcgcacaaccaaccagacaggagccggagcactatagaccctcagagatcgcggtccagcggcaaccccggaaccactccacctgatcgtgcgtaaactatagaccctcagagatcgcggtccagcggcaacccatcgctcgccggatgatgcgcctcaagaactatagaccctcagagatcgcggtccagcggcaactcttaacccgaattaccagtcggtggagagactatagaccctcagagatcgcggtccagcggcaactccacacggctgcgctatgacgcaacatatactatagaccctcagagatcgcggtccagcggcaactaccgcagccgccagatcgcttcgtcatatactatagaccctcagagatcgcggtccagcggcaacccatcagctcggccagtgcactcatgcgaactatagaccctcagagatcgcggtccagcggcaacggtatcggctgttcggtcgaacgaggcgcagactatagaccctcagagatcgcggtccagcggcaacttgagcgcgcccgtcacgtcgatttcgaacactatagaccctcagagatcgcggtccagcggcaacactggtggccggcataataggaccagtcctactatagaccctcagagatcgcggtccagcggcaacaagcaggtcggcggcaagaccgcgatcatgactatagaccctcagagatcgcggtccagcggcaacaccacgatgctgttgagtgcgcgattgcagactatagaccctcagagatcgcggtccagcggcaaccttcgggctgctggtacacgccgctgtacgactatagaccctcagagatcgcggtccagcggcaacataagcggcgagcttgccccccgcccccttcgactatagaccctcagagatcgcggtccagcggcaactgtcacacccattttcggcggttttctgcgactatagaccctcagagatcgcggtccagcggcaactctggcagccgatcaagtgcgatgcggccgactatagaccctcagagatcgcggtccagcggcaacagcttcgggccgtgccagcaccagcggcgaactatagaccctcagagatcgcggtccagcggcaacgctaaggaacggagtgaggtgcgaatgctaactatagaccctcagagatcgcggtccagcggcaacatcccgccgatgagcgacacgatcgcgtcgactatagaccctcagagatcgcggtccagcggcaactcgttgcgaccccagccgacgaactcaagcactatagaccctcagagatcgcggtccagcggcaacagcaagcgccgctgcttcatcagttcgccgactatagaccctcagagatcgcggtccagcggcaaccggccaattgatcagcatcgatggcgtgggactatagaccctcagagatcgcggtccagcggcaaccttatgcggttggccgcgctgcgtgttgtcactatagaccctcagagatcgcggtccagcggcaacccggttccagaagttgttcgtccgcttgtaactatagaccctcagagatcgcggtccagcggcaaccctcctcgacgggccagacgtcgtcgttggactatagaccctcagagatcgcggtccagcggcaaccgccgcgcaggtccgaaatcatcgcgtcgaactatagaccctcagagatcgcggtccagcggcaacgaagaggacgccagcggcgaggacgccagactatagaccctcagagatcgcggtccagcggcaaccagcttctcccggcctcgctggcttccgaactatagaccctcagagatcgcggtccagcggcaacccttgcccgcttcgaccgcgcgcaccgcggactatagaccctcagagatcgcggtccagcggcaacctggaggcgctgacgtgagccggctgctgaactatagaccctcagagatcgcggtccagcggcaacgggcggagttgtccaggccggcgatccgaactatagaccctcagagatcgcggtccagcggcaacaggaacgccgacaggcgcttgctgtcgtcgactatagaccctcagagatcgcggtccagcggcaaccatccggacgtcgatccgctcaccctgcgcactatagaccctcagagatcgcggtccagcggcaacggggacgtgacgctctcgcggaacgtggaactatagaccctcagagatcgcggtccagcggcaacagcgagttgacgcgcaccgtgatgtcctcgactatagaccctcagagatcgcggtccagcggcaacaagctgcgggtg

SEQ ID NO: 3091 - DNA, 16489 bp, synthetic construct
  source 1..16489: mol_type = other DNA
  misc_feature 1..16489: note = Synthetic
cgcccctgccccgcgcgcgcccagccccgccaagctggcgcaagtcgacatcaaggcgttgcccggccagaccgaacgctggctggaggcacagcgcccgcgcctgcccgcgcccgccgtcacgctggtcgaccggatcggccagcggctggaaacgctgtcgccgcagctcgccgccgtcgacaacgatacggtcgaggcgatggaggtccgccgtctgatcggcgagcagctccccgccttcctgcgcgattacgaacgcgtgcccgaaccgctgcgccgcgtcgagcgcaacgggcggacgcccgacgcgcagctggtcgatggcctgaagctgatcgagcaggagattggcgatatgacccagcggctggcgcaggccgatctggacagcctgtcgacgcgcggccgctatctggaaatgaagtatcgcgaggaaaagaccgaatgagcgggctggcggtggtgctggctaccctctgagggttttcccttggccttcgacttcgctcaggctgaacgaagtctgggagccaccccccgcccgttcagcctgagcgaagtcgaaggccccgccccctcagacgtcgaacaacccgtcttgcgacccgatcggcgggttcagccccagatgcttccacccgcccggattcaagatccgcccccgcgccgtgcgtgccagcaggccgagctggatcaggaaaggctcgatcacctcttcgatcgtatcgcgcggctcggacaggccggcggcgagcgtctccaccccgaccgggccgccgcgatagacatcggcgatcatcgtcagatagcgccggtccatcgcgtcgaggcccagcgcgtcgacctccagccggttgagcgcctggtcggcggcggcggcgtggacgatctcgtgccccgccaccgtcgcgaagtcgcgcacccggcgcagcagccgcccggcgatgcgcggcgtgccgcgtgagcgccgcgccacctcgaccgcgccatcctcggcgatcggcaggtcgagcaggcgcgcggcgcgggtgacgacgcgggtcagttcctcgaccgtgtagaattgtagccgcaccggaatcccgaaccggtcgcgcaagggggtggtcagcagcccctgccgggttgtcgcccccaccagcgtgaagcgcggcaagtcgatccgcacgctccgcgccgaaggtccttcgccgatcatcaggtcgaggacgcggtcctccatcgccgggtacaggacctcctcgaccgccggttgcaggcggtggatttcgtcgatgaacaggacgtcgccgtcctcgagattggtcagcagcgcggccagatcgcccgacttggcgatgaccgggccggaggtcgcgcgaaagcccacgcccatctcgcgcgcgatgatctgcgccagtgtcgtcttgcccaggccggggggcccgaagaacaggacatggtcgagcgcgtcgccacggctcttcgccgcctggatgaacacgcgcagattgtcgcgcgccgcatgctggccgacgaactcgtccagattcttggggcggagcgccgcgtcgacatcctcgggacggcggctggcggataacaggcggtcttggtcggtcacgcctgcgctcctagcggctgggcggcatggctgtcgagcatcgtcgcgaacattgcacgaacatagcaggcgtcgaccggcatggacagccgtacggcccttaggcttgatccgggtggcggactcgggccgcaaatcgcgctaggatgctgacatggcaaatgatcttttcctggccagcccgattccgcccgcgctcgaaatcgccttggccgagcggttcacgctccaccgcgacaccccgcccgccaccacccgcgcgatcgtcggcgggggcatgatgacggtggatgccgccctgctcgatcgcctgcccgagctggagatcatcgcggtgcacggcgtcgggcatgacgggatcgaccatgacgcggtcgccgcgcgcggcatccggatcgcgatcaccccggacgtgctgaccgaggatgtcgccgaccaggccatcgcgctgtggctggcggtcgagcggcgggtggccgcgaacgaccgggcgatgcggatgggcaactggacggtgccgctgggccgacgcgcgagcgggcggcggatcggcattttcgggctgggcaagatcggccaggcgatcgcgcggcgggcggagggctttggcggcgacatccgctacaccgcgcgttcggaaaagccggtggcgtggacgttcgtacccgacctggcgacgctggcggcggagagcgacgtgctgttcgtcgcggcgcccggcggggcggagacccgcaatgtcgtcgatgcgacggtgctcgaccggctggggccgaagggggtgctggtcaatatcgcgcgcgggagcctcgtggacgaggaggcgctgatcgccgcgctggagtcgcaccgtatcgcgggggccgggctggacgtgttcgccgaggagcccgacgtgccctatgcgctgcgacggatgaaccatgtcgtgctggcgccgcatcagggcagcgcgacgcgggaggggcgcgcggcgatggcggcgatggtgatcgcgaatttggaggcgcattttggcgggcaggttccgccggggttgttggggtgagtgattcccttgggcttcgacttcgctcagcctgaacgggggttggaccttatccccccagccgttcaggctgagcgaagtcgaagcccacgtcccttacttcgccgccttccgcaaagccaaccgcaccagcgcatcgagcgacgccgccgcccccaattcctcttccgccgccgcgaccgccgcactcgcctcggccgggcggaagcccaggttgagcagcgccgacaccgcatccgcgcccgcaccaaccggtgtcgcggcgccgcccgatccgggggccagcacgatgccgccgaccttgtccttcagctccatcacgatccgctgggcgagcttggggccgacgccattggcgcgcgcgaccatcgccttgtcgccactggcgatcgcgcgcatcaggtcggcgggctccagcgccgacaggatggcgagcgccacccgcgagccgacgccctgcacgccggtcaacaaccggaaccagtcgcgctcgtccgcgctggcgaaaccgacgagacggatggaatcctcggacaccagcatctcggtatgcagcatcgccgcctcgcccactggcccgatcgacgacagcgtccgtgccgacgcgccgaccagatagcccacgccgccgacatcgatcaccgcatggtcgataccggtggagtccaaacgtcccttgagatgcgcgatcatggggatgggttagaacaaaagggggtagacgtcacgggggttatcgttggggttgtcgcttgtggcggcgccctcccctatcccctcccgcctgcgggaggggtgcgttactgggccgtccgcaagcgctgcttcaagagattcctgcaacggaaccttggcacgccccccccgcaggcgggaggggatgggggagggccttgccacgagcgagacgcctcaactatcaccccaccctacgcgccatcgcccgcgcactcgccagatgatgcgcatgcgtgatcgccactgccagcgcatccgccgcatccggacccgtcagcttcaccccgggcaacagatgcccgaccatcgcctgcacctgcttcttgtccgcgccgccggtgccgacggtcgccttcttgacgatgctgggatgatattcgccgacgatcagcccggcctgcgccgccgagagcaggacgacgccgcgcgcctggcccagtttcagcgtcgactgcgcattgctgttgcccagcacttcctccacggccgcgccgtcgggctgctgctggcggatcacgtcatagagcgcggcgtgcaggttcgcgaggcggcgcggcagcggcatcgacggctcggtcttgatctggccgttggcgacatggcgcaggcgattgccctccgccgcgatcaccccccagccggtggtgccgagaccgggatcgaggccgaggatgatggcggggggtggggtcaagacgttgatatactcagagatcgcgggccggcggcaacaacgtgctcatcgggatcatcgatgacagtaaggatagcgccgaccgggcttggcgcgcaacggtgatcgtgccccgcccctccaccaccgggctttgcccggcggtccccctccccaagccgagcttggggaggattggggatcagcccagcttttccatcacttcgtcggagacttcgtaattgccccagacggtctggacgtcgtcgtcatcatccagcgtgtcgatcagcttgaacaaagtcgccgccgccgcttcgtcgaccgcgaccatggtctgcggacgccaggccagcttggcgccttccgcctcgcccagcaccggctccagcgccttggcgacttcgtggaggtcggcctgtgcggtccagatttcatggccgtcctcggtggaggtcacgtcttccgcgcccgcttccaacgccgcctcgaacaccttttcggcgtcaccggcgccggcgggatagttgatcaggcccatccggtcgaagccatggctgaccgagccggcggtgcccaggttgccgccattcttcgacaccgcggtgcgcacgttggtcgcggtgcggttgcgattgtcggtcagcgcctcgatgatcaggctgacgccgccggggccgaagccctcatagcggatttcctcgtaattctccccgtcgccgcgcgaggccttgtcgatcgcgcgcgcgatattgtccttgggcatcgaggccgccttggccgcgttgacggcggcgcgcagacgcgggttcatgtccggatcgggcgtgcccatcttcgccgcgacggtgatttcgcggctaagcttggagaatgccgccgagcgcttcttatcctgcgcgcccttgcggtgcatgatgttcttgaatttgctgtggcctgccatcggtgcctcttaagatgatcgcgctctgtacgactgcgcgaggggctttgccaacccgtcgatcgctcaccccccggccgccgccttccggagaatcaaatgccttgccccctggggcgttgatcggccaaacgccaaagccatgacggtacgcgtggatatgggaaccgacgagcgtggctcgtcggtgccgatcgatcttgaggaactgctggcgacccgcctgctggtgcagggcaattcggggtcgggaaagtcgcatctgctgcgccgcctgctggagaaatcggcgggccaggtgcaacaggtggtcatcgaccccgagggcgatttcgtcaccctgtccaaggcttacggccatgtcgtgatcgaggcgggcgactatgccgagcgtgaggtcggtcgtttcgccagccggattcgcgaacaccgcgcctcggtggtcctcagcctggaggggctggagatcgaggggcagatgcgctgcgccgcgaccttcctgaacgccttgttcgacgccccgcgcgagcattggtatcccgcgctggtggtggtcgacgaggcgcagctgttcgcccccacgacggggggcgaagtgaccgaggaggttcgtcgtgcctcgctgtccgccatgaccaacctgatgtgtcgcggccgcaagcgcgggctggcgggcgtcatcgcgacccagcgactcgccaagctggccaagaatgtcgcggcggaggcgtccaacttcctgatgggccgcaccttcctcgacatcgacatggcgcgcgcggccgatctgctcggcatggaacggcggcaggccgactcgatccgcgatctggcgcgcggcaccttcctggcgctggggccggcggtgtcgcgccggccgatcacggtgaagatcggcgcggtcgagacctcggcacgctcgggcagtcccaagctgacccccctgcccgacgcgccgccgcccgatctgcaggaactgctcttcgcacccgtcgaggaagcgccgaccctgccgatgaccttcgactcacgcccgcgccgggtgcccgccgaggagctgatggccgatctcggccgcccgccgctgcccaccaccgccgcaccgcccccacccgaaatggatgagggcgaggtcgaggcgatctacgaacaggtgctgcgcgcgatcgtcgaggaccccgaatcgaccttccgccccgcctcggtcctgttccaggatttccaggtgcgctgccggatggcgggccttgcccggccgccgctcgacctgaacggtttcgcccggcgtctgtcctgcgcgcgggcggggattttcgacgtcaacgatcccgattggcaggaggcgctggcgctggccgcgatgctgcccgacgacatgctgggcgcgttcctgctggtcgcgcgggccgcgcgcgaggggctgccttgcccaccggataccaagatcgccgagacgtacgggaccagttcgctcggccgggtgaagcggctgatcgcctatatcgagagccgcgacctgttcgtctgccgcaccgacctgacggggaagcggtcgatcacgattccgcggctggggtggacgacccaagcggcggagatggggtgagggtttcgcttggccttcgacttcgctcaggctgaacggaggttgggcttatgcgagagagaggccattaccccctcatatctgctacattacgggaatggacccttggcgaacgagtgctgccaaccttccgctcccatcaggtggccgttctcgaatgtgaaatttatccgcgaaatccgcttctcgcgatttgcaatgaaatcgaccgtcacctgttggcggcgacatgcgtcatccgggatgtccatgtaatcccaaccgagaaagcgatactcgtcggcattcatccgcttggcaagcgaccgggcacccgccgcacccttgcctggtaaacccacgtctccgacaataacggttagaaccgcgtccttatcgatcaacgcgttcaatacattatctgatgctgacccggatgttgccgcagcggccatgatgcctaccgcacggcggctgagcgcctcatggaccgcacgaccgcctttgattgccgtcagatcacagttttggacagccaagccggccagaaggattgtgagaaccatggctgtaagctggcagacctgcgtaaaggctgcaatcgtacacagccgttcctctatacgctgccatcaagcaccacccccgttcagcctgagcgaagtcgaaggccacgccccgccacccgccacaaacaaaaagggcgacggagccacaagccccgccgccctccgcatttccgaacccgaaaaccgggatcagatcatacccagcgccttcatatacacttcgaggatggcttcctcttcctgatattcttcgcgcttcttcttgcggatctgcatgatcttcttgatcgccttgggatcatagccgcgcgccttggcttcggcgaagacatccttgatgtcgtccgaaatgcccttcttctcttcttccagccgctcggcccgctcgatcagcaggcgcagctcgtcggccgtcacattgccgctgctgtcgaaattctcgtccgccattgtcttacaaccttcttgaaatccgatccgctcccaggaatccgccgccacgacgcacatgcccgcccatgggcaaggtcggtccggcgcggatgtcgggatcgggggcggtctaggcggttccgcgcctgcgctcaagcgggggttaacggttcttcttcacgctctcggccatgcgcgccagctgctccggcgtcgcctcgccctgatgctcggccttccactggtcgtacggcatgccatagatcgcctcacgcgcggtcgccttgtcgacaccggccgcctcgcctaaccagtcggagaggcagttgcggcaaaaccccgccagccccatcaggtcgacattctgcgcatccgtccggtggcgcaggtggagcaccagccgccggaacgccgccgccgccgcttgatcatcgattgcattcaacgcatccacgctatcgctcatattcgtcgctcctaggttgatcgtaacgcattaggctttaggaaacaggccgcaaagcagcaggatgtgatgatgaccaaggccctccccccgcgttcgcgcaaagtccgcgttctcgccacgctcggcccggccagcagcgatcccgagacgatcgccaccctgttccaggcgggggcggatgcgttccgcatcaatatgagccatggcgaccagcagtcgaaaatcccgctgatccaggcgattcgcgcgctggaggagcggttcggccgcccgaccaccatcctggccgaccttcaggggcccaagctgcgcgtcggcaagttcgccgagggcaaggtcatgctggaaaccggcagcaccttcatcctcgaccgcgatccgacgcccggcgacgcgacccgggtcgagctaccgcacaaggaaatcttcgccgcgatcgagccgggcgcgcgcctgctgctcgacgacggcaagctcgtcctgcgcgtcgccttccatgacgatgagaagatcacgaccttggtcgaggtcggcggcgcgctgtcgaacaacaaggggttgaacgtccccgacgtcgtgctgcccatggccgcgctgaccgagaaggatcggtcggacctgaacttcgcggtcgagcagggcgtcgactggatcgcgctgtccttcgtgcagcgccccgaggacctgatggaggcgcgcggcctgatcaaggggcgcgccgccctcctcgccaagatcgagaagccgcaggcgatcgaccggctggaggaaatcgtcgaacagtgcgacggcgtgatggtcgcgcgcggcgacctgggcgtcgagctgccgccgcaggcggtgccgccgctccagaagcgcatcgtcgaggtgtcgcgccgcatgggccgcccggtcgtcgtcgccacccagatgctcgaatcgatgatccagagcccctcgcccacccgcgccgaggtgtcggacgtggcgaccgccatctatgacggcgccgacgcgatcatgctgtcggccgagtcggcggcgggatcgtggccggtcgagtcggtcgcgatgatgaacgcgatcggcgtatcggtggagaacgaccccggccacggtgagcgtgtccacttcaccgcgatgacccccgacccgacgaccgccgacgcgctcgccgaggccgccgccggcatctcgcgcaccgtgtcgtccaaggcgatcatctgcttcaccaccagcggctcgaccgcacgccgcgtcgcgcgtgagcgtccctcggtgccgatcctggtgctgaccccgcagctggagacggcgcgtcgcctgggcctgctctggggctgtcacgcggtccacacccgcgacgtcgaatccttcgaggagatggtcgccaagtccaagcgcatggcgctgcgccacggcatcgccgaagcgggcaaccaggtcgtgctgatggccggcgtccccttccgcacgccgggttcgaccaatgtgctgcacgtcacccgcatcatgggcgacgaactggcgaattacggggacggggtcgaggcgtaagccctcgtaccgggcttgcggacgcgatgctccgcaagccgggtgtccaatgcgaagcccaagaaaaaaacccggcgcatctttgagaaagcgccgggtttttctatcgcaatgcgatagagagaaaagccgcgccgtggcgctgacattatctggtgcgtaatgacgcttgttaaccgccagaaccgcaatctctgaggtctgaagaataacacaggtcgatcgccacgcaagacggatttgcaccatttcgcatgtttatcggggtattacgcgcgccgatgcttgcaggatcggcatcccagggcgacactggcactcgctccatttcggatacgcttgggactgttcagcgcgaccgggatttggccagatagcgggaggggatggcgaagatgaccgatatgatgaacgagcggggcatggcgtggcggttggggctggacctcggcaccaactcgctgggctggatcgccctgcaactggaaggcggcaagcccgccggcatcatggcgatcggctcacgtatcatttcctcatctgagagcgcaggccgcgatccgcaatccaagcaatcgctcgccgtcaatcgccgcgacaagcgcgcgatgcgtcgtcgccgcgaccggttcaagcgccgccaggccgcgctgctcagatatctagtcaaggacggcttgttccccgccgaccaggctgctcgccaagcgctggaaacgcgcgatccctatgaactccgtgcgcgcgcgctcgacgaaaggctggagccgagcgaaatcgcccgcgccttgtttcatctcaatcagcggcgtggcttcaaaagcaatcgcaagaccgatcggaccggcgacaaggacgatgaaagcggcaaggtcgcgttcggcattgcggggctgaaggacaagatcgccgccgccgaagaggccgccggtgcggaacccggcagttggaccttcggcaaatttctgtgcgaacgccgtgcggcggccgacgacctcaacgccttgccgccgacacgcgcccgtgcccatgccgccccgcccgaaaacaagaacgacgtctatgacttctatcccagccgcgacatcatcgaggcggagttcgaggcgatctgggaggcccaggccgcgcatcaccccgacctgctgacggacgaggtgcgccaccgcctctacgaaattatcttttaccagcgcccgctaaaggcgccgaagatcggcctgtgcaccttggtgaacggggaaacgcggctggccaaggcgcatccgctgttccagcagcgccgcctgctggaagagatcaacgcattgcaactgatccgtacgggtgaagccccgcgccgactgatgcccgatgagcgcgaccggatactgatgaagttccagggtaagcccagcctaaccttcgtcgcactgcgcaaggagttgaagctcgactccaccgtccgcttcaacaaagagagcgagaaccggcccaaactgctcggcgacgaaatggcggcgcggatgggcgacaagaagcggttcggcacccattggcggcacctttcggtagaccagcaatgggaggtcattcaacggcggcaaaatctggaaagcgatgccgatgaagccgccttcgtcgcctggctcgccgaacgctactcgctgacgtccgagcaggcagccgccgtcgcctcggtcgagttgccgatgggcttcgggcggatcggtttgaccgcgacgaccaagctgatcgaggcactgacgaacggtcggaccgagggcggcgaagtgctggtctatagcgaggcggtcgacgcggccgggctgggccatcatagcgaccgacgctccgacacccgctatagcgatgccaagggtcaaccgatcctcccctattatggtctgccgctcgaacatcatctgttgcccggcaccggtgatcctagcgatccggaggacatgcgggtcggccgcctcaccaaccccacggtgcatatcggcctcaaccagctggcacgggtcgtcaacgcactgatccgtcgcttcggccgtccgaccgagatcgccttggaactcgcccgcgacttgaaattgtcggacgaggaaaaacaacggcgcaacaaggagaataaccgcaaccggatcgaggcggaaaagcgttccatcaagctgcgtgaaatcggtaaacccgacaccggcgaaaatcgcgcccgattgaagctatgggaggaactgggcgaggactgtctcgaccgacgttgcgtctataccggtgagcggatcgggatcgaaaagctgttctcggatgcggtcgagatcgaccatatcctgcccttctcgatcacactcgacgattccaacgccaataagatcgtttgcatgcgcgatgccaatcgccgcaagggcaaccggtcgccccatgatgcctgggggcatggcgaggactggcccgacatcgccgcacgcgcctcgcgtctgcccgccaacaagcgctggcggttcgacccggatgcgctcgcccgctttaccgaggaacgcgatttccaaccgcgccagttggtcgacacgcagtatctggggcgattggcgcgcgagtatctgaccagcctctaccccgaacgtgggcagggatcgagcaaagtctgggtttcacccggccagatgaccgagttggttcggcgcaagctgggcctcaatcccatgctgggcgacgacaatatcctgggaagcgtgaaccagcctaaaaatcgtctggatcatcgccaccatagcattgacgccttcgtcgttgcggtcatcgaccgtgcgatgctggcagagatcgcgcgaatctccggcgaaacgggccgcgacggcaccgaaaagatctgtattcccgacccttggcccaatttccgcgacgagcttcatgccgcactccggggaatcgtcgtatcgcatcgcccggatcatggcacggcttccaagaagggcctgaagcccggccatgaccagaccgccgggcggctgcataatgacacggcctatggctttaccggtacgactgatgccaagggcaagccgatcgtcgtgcgtcgcatcgccctgaccgacttgaaatcggcggccgacctgaacgcgatacgcgacccccatctgcgtcaggcgctacgcgaccataccgctcaccaggatggcaaggcctttgaggagcggatcaaagccttcccgcccttcacgctcaaaaaggtgtatggcggcatccgtcatgtccgcgtgaccgaggcgttgtccgtcataccgatccgcgacgcatccggccgagcgtataaggcgtataagggtgacagcaattatcgctatgacgtctgggaaatgcccgatgggaaatggatcacccggtggcaggccgctgacggcaccgagcgaagcagtatcgtatcgatgttcgacgcgcatcaaccccgcgaacaggatcgcccccaccccgccgcgcgcaaggtactcagcgtgcatcagaacgacctgctcgccatcgaacctcccggcgaggcacgcagactgggccgggtggtcaagttcggccaggatgggaggctctatctcgccgatcccaaggaaggcggtgcgctgaaggcgcgtgacgcggacaaggaggatgccttccgctacgattcgctcttccccgccaagcaaaagctgtggaaggcacgccaggtccggatcgacgaactgggccgcgtgctcgaccccggcttccccgcccgcaagtccgtacggcgcacccgcccccgcaccgcgccggtcgactgacgaggggccggccgcgatgggtttggaacggatcgtcgatattgccaccgacaaccggcatctgtccgcccatcgcggcttcctgatcgtctcggaggagcgggtcgaggtcggccgggtgccgctcgacgatgtcggcgcggtcatcgtccatgcgcatggcgtcacctggtctaccaatctgatcgtcgcactggccgagcgcggtgcggtgatgctgttgtgcggaagcaatcacagcccggccgccatctgcctgccgatcgacggtcatcatgcgcagaacggccggatgcgcgcgcaatgggaggccgggcgtccgctgtccaagcagctctggcgcgcgctggtggtggccaagatccgctggcagggcgcggtgctggccgccaatggtcactccgccaccgccttcgatcatctggcgcgcaaggtcgggtcgggcgaccccgagaatatcgaggcgcaggcggcgcgccggtactggcctctgctgatgggcgaggcattccgccgcgaccgcgatgcggagggcgcgaatgccctcctgaactatggctatgcggtgatgcgcgcagcctgtgcgcgggcggtcgtggcggcggggctgcacccatcgatcggcgtccatcatgcgcatcgcggtaatcccttcgcgctggccgacgatgtgatcgagccgttccgcgcgctggtcgatgccctgaccatccggctgattgcgcacgacatcaccggcgtcacgtccgaggccaagcgcgcctatgccggcctgatcgcggtcgacctgatgctggacgacggtatcaccaccgtctggctcgccatccagcggaccgcgcagaccctggcgcgcagcttccagagcggccgcgccaccgacctgatcctgcccgcgccgccctccgcgctggaattggccgccctggacggattgatcgcgcggtgagccgtcgtctcgccaccacgcccatccccgcgagcggcgcgacgcaactgtcgggatatcggctgatgtggattttcgtgatgttcgacctgcccgtcaccaccaagtccgaatcgcgcgccgccaccaaattccgccaatatctgctcgacgaagggttcgagaagagccagttctcggtctatgcccgcttctgcagcggcaaggagcagatggaggcatacttacgccggatcgaggcgaacctgcccgacaagggcgagatccacatattgagcttcaccgaccgccaatatgagaatatcatccgcttcgccggccaatctcgccggcagccgcgcaaaaaccccgatcaattggccctattctgatgattcgcgaccgttttgactatgctggatgggggatttcgtcgttgcggatcaacgcgataccccaccatcaagcatagccgctcagagattgcggtccagcgacaaccatggctggcgctcggccttctcgaccatcagcatagccgctcagagattgcggtccagcgacaacgacggacacgacggcggcgcgggtgacgctagcatagccgctcagagattgcggtccagcgacaacgcaactcaaggcgttcctggaccactacaaagcatagccgctcagagattgcggtccagcgacaaccgacttcatcttgttcaggtcacccagcgcagcatagccgctcagagattgcggtccagcgacaacggctgccgccataataggtttccccgatcaagcatagccgctcagagattgcggtccagcgacaaccgagcggtcggattggtcgcagctccccgagcatagccgctcagagattgcggtccagcgacaacgaacgccaggacgtagcgaacgccgccggcagcatagccgctcagagattgcggtccagcgacaacgacgttcccgccgccaccgtcgccgagatgagcatagccgctcagagattgcggtccagcgacaacgacctccgtctcccacgacacgacacccggagcatagccgctcagagattgcggtccagcgacaactacggctccagcaccctgatctacgacaagcagcatagccgctcagagattgcggtccagcgacaacgtaatgacggtggcgggggtcagcgttcgcagcatagccgctcagagattgcggtccagcgacaactcgatctggggacggtcgaaccgcaccccagcatagccgctcagagattgcggtccagcgacaactggtcgatgaacgtctcgatcgcggccgccagcatagccgctcagagattgcggtccagcgacaacggatgtcgttctcttcctgataggagcgggagcatagccgctcagagattgcggtccagcgacaacttctttatcgtttgcgtcggtgctgcgtcgagcatagccgctcagagattgcggtccagcgacaactggtctggcgaggtcgcggtcgaacaattcagcatagccgctcagagattgcggtccagcgacaacgatcagccacaggtcaagtccgtggacggtagcatagccgctcagagattgcggtccagcgacaactctctagcacaacgtcaaggtgcgcgtcggagcatagccgctcagagattgcggtccagcgacaacgggatcgaggccggtcgcctccatgtcgagagcatagccgctcagagattgcggtccagcgacaacggtgtcgactatctgtcggcgctttcggcgagcatagccgctcagagattgcggtccagcgacaactgctccagatacagggcgaccttgcgaccaagcatagccgctcagagattgcggtccagcgacaactcgctgcgtatcgtcagccgggcaatcggtagcatagccgctcagagattgcggtccagcgacaacagggtcagatcacggctcttggcggacagagcatagccgctcagagattgcggtccagcgacaacatacgtttggtgctttgatgaaggatgcgcagcatagccgctcagagattgcggtccagcgacaaccttatggtcgagactcaatcagagccagaatgcgagcgcggttgcgatggcgacgcctgagaggaagttgacggcgagtttgtcgtagcgggttgcg

SEQ ID NO: 3092 - DNA, 15743 bp, synthetic construct
  source 1..15743: mol_type = other DNA
  misc_feature 1..15743: note = Synthetic
gaggaggcacagccgctacagattacacccaaggccgcctgaaaatgcagcccagtggccacacccgattttacaccacattgacggacgcgaccgagaaaaccgccaatgcccagttgcggcttccagttgctatgcttcgccaagctgagcggatcgcgataatgaaattgtttcgttccgatcgagacctcgccgccgaactgccaggcgcggctttggaagcccgtcggcgcatcgcgcttggtcgcgctgtaacgggacaggctgaaagacagggacggtccgtccgacagcccgtcgagcaattgcgggtcgatgaggtcggtatcgttggccagggggacggacaatgtcagggcatagctggtctgtcggaagcggacggcgccatcggcgtccgatgggcaaatgcgtggcagcagcttgccgccatagctgagactggtccgtgcctcgccattattgacttccatttcgccactcagaccctggagtagcgacgcggtccgggcggtgggtgccgccatctggtcccgcgacggttccagctccatggcttgtttcttggcagccgccgttatgttctgcccgttctgaagggatgggcaggaaggcagccattcttgcgcggcggcggtcgcgggaacacccattagcgacagggcaagcaggaggtggccgctgcgcctcataccaggaactcggcgacaagatgcttgccggtgcggttattgggcacctccagcttcaacggccaggtcgcgccggcgggctgcaccaatgtggcaccatcgatgctgacggtcaccgtcgctccgctgccgtcggcatcgatcaccagtcgatgctcgccctttcccagagtgaccagcgattcgaagtctcgattgaagttcgtgatcgggcggcggtcgatgaagatcgcccacgccaggacatcctcgctggggtctacgcgcaacagaacagccatgcctgcctccacaacatcattgtttcgaagtcgtaacatgcacgaatggcaattaatgaccactttaattgcatctgaaatggatcaactctggtggcatcgatgccgcgattggccgtggtgatgaagctcggatggtcgcgtcccaagataagctattttgcctttctctacttcacaggtagatagggtttcgagcgtttcgctccgcggcttttgaaggatgtcaacttgctccgcgtcaccaacggctaaagcgcacggtacccaagcgacaacgcccggtttcgtgttcctcccgcacaaggagaagacgatgacccataagcaagttcgtgtccgccagcggcggcaggtcaaggcctcgcaaatccatatcccccacagcagttggtcgcgcgtcgaacctattcgcggcgctgagactgtgctggcaccgggcgatttctgggcgcggctggggctttaacacccgttcgcttcgcgcttgtccagaaggggcgtatagggttctcgacaggctcgaaccgaacggatgttgggccgctcggccttcctaccggaacaccaccgtcttgccgccattgcgcagcacgcggcggtcggcgagccagtcgacggcgcgggccagcacctgggcctcgatatcgcggccgatgcggatcatgtcgtcggcggtggcgcgatggtcgacgcgctcgaccgcctgctcgatgatcgggccttcgtcgaggtcggcggtgacgaaatgggcggtcgcgccgatcagttttacaccgcgctcatgcgcgcgatgataggggcgggcgcccttgaagccgggcaggaagctgtgatggatattgacgcagcgacccgccagtcgatcgaccagattttccgaaagcacctgcatgtagcgggcgaggatcagatattccgaccggctgcgatcgaacaggtcgagcagagcggcctcctgcgcggccttgtcgccattgggcggcagttcatgataggggatgccgtgccattcggtgatgcggcgcatgtcggggtggttggacaccactcccatgatgtcgaccgccagcgtgccggtctgccagcggtggagcaggtcggcgaggcagtgtgaccccttcgatacggcgatcagcatgcgcgggcgttcggccgcttcagtgaggcgccagtccatagcgaagcgggtgccgatgtcggcaaattcgtcgcgcaggccggcggtgtcgaagcgcatgccggtgtcggtcgcctcgaacgcgacgcgcatgaagaagaggccggcctcgcgatcggcatattgctggctgtcagtgatgaagccgccccgttcggcgaggaactggctgaccgctgcaacgatgccgacgcggtcggcgcagaccagggtcaatatccaggacgggatggtcttttcgttcactctgcggctcccagcaattctgccgaggcgttgccccaagccgaggctgcgatcaagccttggcgctggtcatggcgaagatgccggtggcgttgccggtgtcgaaggcaaggtccagtcggccggtgtccgggtcgatgtcgcggctaatgaattcgtagaaggagccgggcacgttgcgcaggttgcgatcggcgaacaggcgttcgacgctgtcggcgcggaaggcggtctgacgcacgcggccggtggcggagatttcgagcttgggcttcatcggccggtcttccgccttcagccgttcggccagcgccgcgacgtcaggcacgcggtcggtcgcatggttgaaggcattgccctcggtcgcgatccaggcggcttcgttggagcgggagagcagcagttcataatcggcaaaggccggcggctcatgctggcggtcgaacgcggagacgatgacgggcagggcggcggcggcggcatcgaagccgaccggttcgccggcggcatagcgaccgagcagggcaatggtcggggcgtcgagcgggtcgcgcgaggtgccgaagatgcgggtcgcggccgcgccaaattccgcgtcgaaccggtcgacatggagttcggacaggaagaattgcgggatcgcctcgggcgcgtcgacatgggcataggcccggccggtcatcctgaggcgatcgagcggatagagggcggccaagcgatagcccagcggcaggaagatgcgggtgaaggcatcctggccggcgggcagggcgccggtcggtccctcggcaaagcggatggtgcgcagcgcgccatggtcgaacatgacccgatcgccgcgcgccagcgtgtcggcgacataggccgcgccgctcggcacccgttcgagcaggtcgtgaaacaggatgacgttcatcgccatggcaaaggcggcgcggctgacggtcgggccgctttgcgcgagcagcgcgggatcgatcgcgagcgcgtccagcgcggccttgccggcgtcttcgcccagcaccgacttgaccagggcgacgatgtttccttcattctgcgacgacataagaacgctccacgatgacagcgcctttatcgcaggatagggtgggtcgcgcaaatagggagctgtcatcacttgatgcggaacgggaatggatagggcgcgcaaatggctgccgccgatgagcgcgctcaacagttttgacgcggccgcgacccatggcagcttctcgcgcgccggggtggaggtggggctgacccagagtgcggtcagtcgccagatcgcgctgttggaggattggttgcagacgcccctgttcgaccgggtcgggcggcgggtgcaactgaacgaggcggggcgagcctatgccgaggagatccgcccggcgctcgatagaattcggcgcgcgacgcggcgtgtggcggcgcggcgggcgcagggggcgctgcggatcgcgaccctgcccagtttcggcatgcgctggctggcgccgcgcctgccggggctgagcgcgctgcatcccgaactggtggtggatttcgcagcgcgatccgacccgttcgatttcgctcaggaggaatttgacgcggcgatccattatggcctgccggaagaatggcccggcgtggcacaggattatctgtttcgcgagcagatggtgccggtctgcgcaccggcctggctggcggcaaatccactaggcgcgccagccgacctgctcggcaagccgctgctgagccagagttcgcggcgcgatgcctgggcgcactggttcgcggcggcgggcgtcgaggcggggccgttgccgccgggaccggcgttcgagcatttcctgatgctggcgcaggcggttgtcgccggggcgggcgtggccctgatccccagcttcctgatccggccggagctggacgcgggcagcctggtcatccccttcgaccggcccttgtcgagcgagcaggcctattatctggtctatcccacgggacttggtgggcatccgggactggcgcgttttcgcgcctggatgctggcgcgcgcgggcgagggacaaacgcccgcgcgggtttagttctttttcggcatgcagtccgcgccggtggccttgatgctgctgcataagcgcgaagcgtcggcgctgctggcgatcggtccggcctggaggcgggtgacggtgccggccttgaccagatagggttggtagctggagaggccgctgaccttgcgggtcaattggccccacagtgcgcgggcacggccttcatcgccaaacgcgccgagctgcacgcgccagtcgccgccggcggccggggccggtgttctgggggcagtgggcttggccggggcaagtttggccggttccggcttgggcgtggtcggctgtggcttggcggcggcgacctgtgtcacgggcgcaggcgctgccttgattggtgtcggggccggggaagccgggcgaggttgtgccgctgtcgcgggcagggtcaggctggcgctggccaggctcttttcctgcgcttccatcgacgatgccagggccagaccctgcttgcgctggtcggcggggatatatttgtccatctgttgcaggctggtggtcgcctgcggcaggccggaggcggaggcgcgggtcatcagcgcataggcgcggacccagtccttgccgaccatgtcgccgttgaacagggcagtgccgacaatatattgcgcacggctttcgccgcgggccgccgcgtgctggagatagggcatcgccccggcgcgatcgccctgctggaacatcagcaggcccagattatcttctgcgcgggcatgcccctgcgccgtcgccttgcgataccagtcgagcgcgttgttgagatcggccggaacgccacggcccagcttataggcctggccaagattgaactgggcgtcgggatcgccggcattggcgagcggacgccattcggcgatcgccttggcatagtcgccctgctgccaggcgtcgacgccggccttcacatcggcaagggccggcaaggcgaccgtcagtagcgtgccgaatgcaacggctccccagatacgcttcatatccatgctccagaccggaataatcgtccggcactatcgccaaacaaggttaacggcttcttagcattgccgggtccatgatgtgaaaccggggataggtgatccccaacaaggttgccagaccagttaaccgaattttaggcggcgccatgccaaatcgtttcggaactagatttacttgggggaaggcgcgtgcgcatattggcattggcatcgcaaaaaggcggatcgggcaagacgaccctgtccggtcatctggccgtacaggcccagttggccggggccggtccggtcgtgctgatcgacatcgatccccagggttcgctggcggactggtggaacgaacgcgaggccgaatatcccgcctttgcccagaccacggtcgcgcggctggccgccgatcttgaaatcctgcgccagcaggggttcaagctggccgtcatcgatacgccgccggcgatcaccatggcgatccagagtgttatttcggtcgccgaactgatcgtcgtgccgacccggccgagcccacatgacctgcgcgccgtcggtgccacggtcgacctgtgcgagcgcgcgggaaagccgctgatcttcgtcgtcaacgccgcgacacccaaggcgcgcatcacctccgaagctgctgtcgctctctcgcagcatggcacggtggcgccggtgacgctgcaccatcgcaccgatttcgcggcctcgatgatcgacgggcgcacggtgatggaggtcgatcccaagggcaagtcggccgccgaggtgaccggcttgtggtcctatatttcggatcgcctggaaaagaatttccgccgcacggtgttttccgtgccccagaacagcgtcggcaccgccgccgcttcgcgtcccgccggtggtggcttcggccgccgcgtcgtgcagtaagagaggggactatcatggctgaagccaaaccgatcgcttccctgacgtccggcttgctggcgcgcaagggcgccgccacgccggcaatgcgccgcccgatgctgggctttggtcgcccgaccaatggcggcatggtatccgacgatctgggctggaacgacatgggtttcgacgtgccgatgcacgatgacgagcctgccgcgccgaccgcgcccgtcgccactggcctgacgccgatgactgtggtgattgcgccgacacctgttcctgcagtggttatggagcgcgaggaactggccgaccgtgtggcgcaagtcattgtgcccgagacggtggaagccgagccggagccgaccgaacgggtgatcgctgccaggccaccgcgcgccaagccgaccccggttcgtgctgcgctgcccaaggcgatggcaatcgacaacgcccgcaaggccgccttcacgctgcggctggactccggccgtcatctgaagctgcgcctggcggcggccgtaaccggtcggtcggcgcaacaggttgttaccgaagcactggatgcatttctcgaagggctgcccgagattgatcggcttgcccagcaattgccgcactgacgcggcgatcattgattatagggtgggtaaggtcatgaaacgaacggcattcggcaaggcggccgtttcctccttgatggtggcgacgacgatggtcggctgcaccggcgcggcattccatccgcgcacggcggcggtcaagcacgccaatcccggcaagccggccgaggcggcggaaaaggcgctggccgatcgcgacggcgcaaaggccgtgcaggctgcggaagcggccgtgcaggccgcacccgacaatgcccaatatcgccagttgctgggccgcgcctatgtgctggatggtcgtttcgtgtcggcggaggccgcatttaccgacgcgatgacgctgggtaaccgcgattcgcgcaccatcgtcagtctggcgctggttcaggtggcgcttggcaagaatgatgccgcgcgcgatctgctcgctgccaatgccgacaatgtgccggctggcgattatggcctggcgctggccatggccggtgacccgaccgagggtgtccgcatgctgtccgccgcgatccaggatccatcggccaatgcccgcacccgtcagaatctggcctatgcctatgcgctggccgggcgctggaaggatgcacggctggttgccgggctcgacttggcaccgctcgccgccaaccagcgtatcgcccaatgggccggcatggccgacccggcattggcgccgcagcgcgtcgccgcgctgatgggcgtgaccatcaatggcgcggatcaggggcagccggccgtgctggcactggcgccggcttcgccggatgccgcgccggtggcgctggcggcggcatcgaccgaagaaccggctcccgtgctggacctgcccaccggatcgccgattgagatggcggcggctgagcccatcccggccgtgccggcgctgaccacccgcatcatcgaaactgccgtgcctgcctcgacgccggccccggtggtcaaggtcgcaccgaagcccgcgccggtacgggttgctgccaagcgcgacttcgtcgtcgaagggctggcggcgaaggccaagccggtcaagggcaaggcggtcccgggcgccactccggcggcacggatgcagcaggtcgcctatatcaagccggtgatcgcgggcgcgagcgcctgggtcgtccagcttggcgcctacgcctcgccagcgatcgccaaggacaagtggatgtcgatggcgcgggtaaacgaccgtctagctgcattcccggttttgacgagccaggcgacggtcaatggcaaaatctatcatcgcctcgcaatcagtggttttggcaaccggggtgatgcgcagacgctctgccaggcgatcaaggcgcagcgcggccaatgtttcgtgcgtgaaggtgcgccgaacgcgacgccgcagcgctgggcagtcgccgcgacgcgcggccgccagttcgcatcgcgctgatcgacgcgcgcttttgggcgttgcgatgtcgtttcgtgggccgggccgaaaggttccggcccgcaaccatgtttgcctatgacagagatgccgttcgcactgggcgttacgaatgtaagtgccccttctgacgtgcaggctggcaacgaaaatccctgcaactggccgtaatgcgctgtgatttgcaatccaccatatggtgcgttcaaatgacgcgctttgtagcttggagcgaatgcgacttggcaaaatatgcaattgaatgaaaaaaaaggcgacgccggagcgtcgcccttatctggtgcgtactgacacttgttaactgccagaccgcgatctctgaactgcaagagtgatggataaggatgccaaggtcaagatgttcctttgagacctcgttcatttcggtatcgattttatcttgacgaaattgactgcgcctgccccactgccaaatccatatggggtgaggaatgatggccgaacagaaaaagcctgtctggcgactgggcgccgacctgggcgccaattcgctgggttgggccgcgatcgaactgagcgcggcggtgaatggcaagccgctctccatcctggccgcggggtcgcgtatcttcagcgacggtcgagatcccaagtccggcgcatcgctggcggtcgaccggcgcgatgcgcgcgccatgcgccgtcgccgcgatcgctttcagcagcggcaaaaggcactgatcaaatatctgatcgccgacggcctgtttccggcagacgaggccgcgcgcaaggcgatggcggcgatcgatccctatgccgtgcgtgcccgggcgctggacgaggcactttcgctgcccgaactgggccgcgcgctgtttcacctcaaccagcggcgcggcttcaaatcgaaccgcaaggccgatcgcaaggcggatgatgacgccggcaagatcgccatcggcatcgaccggacccgcgacgccatcgccgaggatgaaacggcagccggcgcggagccgggcagttggacctttggcaaatggctgtatgagcgccagttgaaaggacagtccgtgcgcacccggtcgcgccccgaaagcggcgaagatgccaagggcgacggctatgacttctacccaggccgtgcgctgatggaggaggagttcgatgtcatctgggctgcgcaggcgccgcatcatcccgatgtgctgaccaatgatgtccatgaccgattgcatgagatcattttctatcagcggccgctgaaggcgccgcaggtcggcatgtgtaccttgatacccggcgaccgacgcctacccaaggcgcaccccctgtttcagcgtcgtcgcctgctggaggaactcaatgcgctgatgatcgtgcggccgggcgaagtcgcgcagcgattgacgcgggaggagcgcgacatcctgttcctcaagctcaaggacaagaacaaggtcagctttgcgagcctgcgcaaggcattgaagctcgatcctgacgcccgcttcaacaaggagagcgagaaccgcaccgacctgaaaggggatgaggaggcggctgtgatggggagcaagacgcgcttcggcaatcactgggtccatttgtcggtcgaagcccaatgggatgtcctcgcgcggctggacgatgtcgaaagcgaggcggaggatgccgcctttcgcgcctggctgtccgaaacctatgcgttgacgccggaagaggcgcgggcggtcgccaatgccccgctgccgcccggctatggccggttcggcgagacggcgacctgcaaactgatcgaagcgctacgcgatggcaagaaggacgggtgcgtattggtctatagcgaagcagtcaccgacgcgggtcttggtcatcatagcgaccggcgtaccggcgaggtgttcgaggatgcgaaggggcgcccgcagctaccctattatggcgtcgcgctggaacggcacatcatgccggggaccggagatccatccgatccggaggaaatgcgggttggccgcctcaccaatccaaccgttcatatcggtctcaaccagttgcgtcggatcgtgaacagcctgatccgcgcctatggcccgcccgccgagatcgcgatcgaactggcacgcgaactgaagctgaccgacgacgacaagaagcgcatcaatcgggagaataacgagaaccggttgaacgcgcagcggcggtcggaaaagctgctggccatcggccaggccgataccggcgccaaccgcgcgctgctcaagctatgggaggaacttaatcccgccaatgtgctggatcggcgctgcatttacagcgggcagcagatttccatcgacatgctcttttccgcagcggtggaggtcgatcatatcctgcccttcagcgcaacgctggatgacagcaatggcaacaagatcgtctgcctgcgcgaggccaatcgggaaaagcgcaaacgctccccttatgaagcatggggccacaatgcgcgctgggacgagattgcggcgcgcgcggcgcaactgccccgcaacaagcgctggcgtttcgagccggatgcgatggacaagttcagcgacgaaggcggctttcaggcgcgccacctggtcgacacccaatatctggcccggctgtcgcgcgaatatctggcgacgctctatcccgaaaagggcgagggcagtggtcatatctgggtgtcgccggggcgtctgaccgaaatggtgcggcgcaagctggggctcaacgacctgctgcccgatcataatttcggcggcggcgcggatcaggccaagaaccggctcgaccatcgccaccatgccatcgacgccgtggtcgtggcgatcgtcgatcggggcatgctgaatgcgattgcgcgggcatccgggcaggaaggggccgaagggcgcgaacggatcatcattccggaaccctgggacgggtttcgcgatgcgttgcgcgagacggtcaaccgcatcaccgtcagccatcgcaccgatcatggcacggcgtccaaggcggggttgccaaagggcaaggatgcgaccgccggtcggctgcataatgacaccgcctatggcctcaccggcgaaaccgatgccaagggcaacagcatcgtcgtgcgccgcgtgcccctgtccagcttcaagaaactggccgacctcgaccgcattcgcgatgttgatctgaaagctgcgctttaccgccatctcgacggtagggaggggaaggcgttcgaacaggcgatcgcggcgttccccgatctggaatggcatccctttcgtggcgtgcgtcgcgtgcgcgtgaccgaaccgctaaccgtcatcccgatcaaggaccggaatgggcgcatctacaaaggctataagggcgattccaactatcgttatgatgtgtgggaattgccggatgggaagtgggtgaatgaagtcgtctccatgttcgacgcgcaccagcctggctggcaatcggccattcgcagtgccaatccgaccgctcgcaagataatgagcctgcatcgcgacgatgttctggctatcgaacgcgatggcggtggccgggaactggtccgggtcgtcaaattttccgagaaacaattcgctgtcgctccaccgaatgaaggcggatcgcttaaggttcgcgacgcggacaaggacgatccgttcaaatatcgctatccctctcccaacacgctcaaggcatggcgcgcgcggcaggttcggatcgatgagattggtcgagtcctggaccccgatttcccggcccgcactgcccgccgcaagacacgcaagcagccgtgagcagaggataggccagaacagcgatggaccggatcgtcgatatcgctaccgatggccgccatctttcggcctatcgcggcttcctgatcgtgtcggaggatcgggccgaagtggggcgtatcccgctcgatgatgtcgccgccgtcatcgtccatgcccatggcatcacctggtccaccaacctcatcgtcgccctggcacagcgcggggttgtgatgctgctgtgcggcagcaatcatgcgccggttgccgtatgcctgccgctggagggtcatcatgcccagaacagccggatgcgcgcgcagtgggaggcgggcaagccattgtccaagcaattgtggcgccggatcatcatcgccaagatccgctggcaggcggccgtgctggacgccaatggcatatccgcatcggcgtttgacttgctggcccggcgcgtcggttcgggcgaccccgataatgtcgaagcacaggctgcacgacgttactggccgctcttgatgggggaggggttccggcgcgatcgcgatgcagaggatatcaacgccctgctcaactatggctatacgatattgcggtcgctatgcgcccgtgcggtggtcgccgccggcctgcatccctcgatcggagtgcatcatgccaaccggaccaatgccttcgctctcgccgacgacctgatcgagccatttcgtccactcgtcgatgcgttggcggtgcggctgctcgcgcgcggtgtggatacggtaacgcccgaagccaagcgcgcctttgccggattgatcgcactcgacttgccgggcacgaccgtggcgggcgcggcgaaccgggccgcgcaaagcctggcgcgtgccttcgaaagtgggcaggcgggagacatcatacttccttctccgccatccacactggaactggccggactcgacgcgttgctaccatgagcgcgagccaattgagcggatatcgactgatgtggattttcgtaatgttcgacttgcccgtaacgaccagagaacaggcccgcgccgccaccaaattccgcgagttcctgttggacgaaggctttgagaagagtcagttttcggtctatgctcgcttctgcaacggtaaggaacagttcgaaacctatatgcggcgggtcgagtcgagcttgcccgatagcggcgacgtccacatcctcagcttcacggatcggcaatatgaaaatatcgtgcgattttcaggacagcgccggcggcggcaacgcaaaaaccccgatcagctcgcgctattttagtgattcgggcgattttcacaacgatggatcaacggttattgccttgtctttcaatgcaataaccgttgatccatcatagctgttcagagatcgcggtccagcggcaaccagttgaccggtaagaactaccgcgacgatatcatagctgttcagagatcgcggtccagcggcaacagatcctctcccgccaggaatggccgggacatcatagctgttcagagatcgcggtccagcggcaacggcgacgccaaggccccatggataccggcgatcatagctgttcagagatcgcggtccagcggcaactaggtcttcgacgaaaacaccgcgttctcgatcatagctgttcagagatcgcggtccagcggcaaccaactgcggcgagcggtaccgcgcgggcctatcatagctgttcagagatcgcggtccagcggcaacaggccggcgccgaggtcgcccagcccgatcatcatagctgttcagagatcgcggtccagcggcaaccgtagaaggtcatgatcttcttccgccggcatcatagctgttcagagatcgcggtccagcggcaaccgcgctgtccatgcgcgaaccgaccgtggcatcatagctgttcagagatcgcggtccagcggcaacccggtcggccactatattttcaatcgccctatcatagctgttcagagatcgcggtccagcggcaacccttggcagccgcgaccgccatttccttggatcatagctgttcagagatcgcggtccagcggcaacgcatcccggctgcggtaaagcggggaacagatcatagctgttcagagatcgcggtccagcggcaacttcgatcgcatcgtgatcgacggcatggaaatcatagctgttcagagatcgcggtccagcggcaactgcgccttgttcttggcaatctcggcatcgatcatagctgttcagagatcgcggtccagcggcaacctgttgcagctatcaggcatgttctgcggcatcatagctgttcagagatcgcggtccagcggcaactccccgaacttggcaatgaggtcgtcctcaatcatagctgttcagagatcgcggtccagcggcaacgaggcggcgggcaaggttctccttgtcgagatcatagctgttcagagatcgcggtccagtagcaacggaacgggcgggggccagtcgtcgatcgcgtcagtgccggcaagcgtgttacgtattctaagttcaaattcgattaatgtgaactaggatcaggacctattaaatttcttgccgagcaggtgattggttgattcaatggcggcgtcaggaggcgtcgccatgagtgatctgatctggttgtcggaggcgcagatgcgccggatcgagccctatttcccgctgtcacacggggtcccacgggtcgatgaccgacggatcatcagcggtatcatttttgtcatcaggaacggcctgcggtggcgtgatgcgcccgctgactatggtccgcccaaaacgatctacaaccgcttcatccggtggagccgacttggcgtgttcaacaggatcttcgcagcactctcggcccagggtggcaaacccgaccagttgatgatcgatgcgacgcatctgaaggctcaccggaccgccgccagcctgctaaaaaggggttgttccccgacgtatcggacgcactaagggcggcctgaactcgaagctccatgccgtgtgcgacggcaagggcaggccgctggtcatgctgctgagcgagggccagatgagcgactacaagggagccgccctgatgctcgacgctttgcctcacgccaaagccctgctcggcgatcgaggctatgacgccgactggtttcgcacggcgctcgccgaacgcaacatcgcggcctgcatcccgtcaaagaggaaccggaagatcccgatcccacacgacgctgtgttatatcgccagcgccacaggatcgagaatatgttcggtaggctcaaggactggcggcgcatccatacccgctacgatcgatgcgcccacacattcatgtccgccatctgcatcgcagcaaccgtcatcttctggatcaatcaatgagtcctgatcttagatcatttatgcgcgaattaagctgacatgatgctgaatgtccgtcagcgaaacttggccaatggtgtcaatcggcgtgcaaacgggaccccttatcggcgcgcaaaagggaccccctgtcaggatggcggaacgttgatgtgacgggcttccttgcgct

SEQ ID NO: 3093 - DNA, 15273 bp, synthetic construct
  misc_feature 1..15273: note = Synthetic
  source 1..15273: mol_type = other DNA
gcgcgatggatcggctcgccggtcgcccggtcccagacgaccgccgtctcgcgctggttggtgatgccgatcgcggcaaggtcctgcgcggtcagcccgctcgccgccagtgcgtcgcgcgccgtagcgagcgcgtcgcgccagatgtcctctgggtcgtgctcgacccagcccggctggggataatgctgcgcgaattcggcctgtgcgatgccgacccgccgtgccgcgtgatcgaagacgatgctgcgcgtcgacgtggtgccctgatcgatcaccaggatatgcgtcttggccacgtcgcctctcccatagtatttcgctcgaaagttcggatcgtttcgaacgaaggtcaagtgtttcggttcgtcgcgggatgcgttaggctcgccgacgacaacgaagggtgtagcacgatggagcgatggccggacgaccccctggacctgctcatcgtcggcggcggcatcaacggcaccggcatcgcccgcgacgccgccggacgcggcctgtcggtgctgctggtcgagcaggacgatctcgccagccacacctcctcggcgtcgaccaagctgatccacggcgggctccgctacctcgaatatggcgaattccggctggtgcgcgaggcgctgatcgagcgcgaacggctgtggggcatggcgccgcacatcatctggccgctgcgcttcgtcctgccgcagacccaatcgccgcgccccgcctggatggtacggctcggcctgttcctctacgatcacctcggcgggcggaagcgcctgccgggcacgcagagcgtcgcgctcgccgcctcgccgctgggggcggggctgtcgccgcgggcgggcagggcgttcgtctattcggactgctgggtcgaggacagccgcctcgtcgtgctcaacgcgctcgacgcggcggagcgtggcgcgacgatcgccacccgcacgcgcctgatcgccgcgagccggacgggcacgggctggaccgccgatctggaacaggcggacggcacccgccggcaggtcgcggcgcgcgcgctggtcaacgccgccgggccgtgggtcgccgacgtgatcggacggacagcgggcgcacgcaacgaccggtcggtgcggctggtcaagggcagccatatcgtcgtgccgcgcctctacgagggcgatcacgccttcatgctgcagaatgccgatcgccgcatcgtcttcgccatcccctatgagggcgcgttcacgctggtcggcaccaccgacgagccatggaccgacccgcccggccgcgcgacgatcgacgcggaggagacgcgctatctgctcgacaccatccgccattatttcgcgcgcccggtggcggcggcggatatcgtctggagctattcgggaatccggccgctctacgacgacaaggcggccaatgcctccgcggtgacgcgcgactatgtcctcgatctcgacgcggacgaggggcgggcgccgatgctgagcgtctatggcggcaagatcaccacctatcgcaagctcgccgaacatgcgctgcgcgatctcgcgccgctgttgcccgacgcaggtccggcgtggaccgcgggcgcgccgctgcccggcggtgacatgcccgatgccgatttcgggcggttcgcggacgcactggcggcacgccatccgcaattgccgccggcgctgctgcgccgcctcgcccgggcctatggcacgcgggtggaggcgatcctcgcgagcgccgcgaccgtggaggaccttggccccgatctcggtggcgggctgcatgcggcggaggtcgattatctcgtcgcgcacgaatgggcgcgcaccgtggaggacgtgctgtggcgccgcagcaagctcggcctgcacgtgcccgccggcaccgcggagcggctggcggcgtatctcgcatgagcgacgcggacgtgccgacgcgccatgcgcgcatcgtcgatctcgcgcggcaggcggggcgcgtctcggtcgaggggctggccgatacgctcggcgtgacgccgcagacgatccgaaaggacctgacgtcgctcgaacgccgcgccttgctcacccgcgtccatggcggtgcggtgccgggttcggggaccgacaatctcgcctatgccgagcggcgcggtatcgccgtcgccgcaaaatcggcgattggcgcggccgcggcggcgctggtcccggacggggccagcctgttcatcaacatcggcaccaccaccgaggcgatcgcccgccatctggtcgaccggaccaggctgatggtcatcaccaacaacctcaacgtcgtcgacatcctcgccgaccggccggggatcgcggtgatcgctgccggcggtcgcgtccgcccgagcgaccgcgcggtgaccggcggcatcgcgatggacttcatccgcggcttcaaggtcgatatcgcgctgatcggcgcatcggggatcgaagccaatggcgacttcctcgattacgacgtggacgaggtgcgcgtgtcgcagacgatcatccataacgcgcgtcaggtgatcctggcgatcgacgcctccaagctcgaccggccggcgcccgtgcgcatcggcaccctcgacgatatcgactggctggtgaccgatcgcgcgccaccggcgttgcgcgccgcctgcgtcgcggcgggcgtccgtatcgccgaaaccgatgccgaccggggtggcactgccgcggcgtgacacgcacgggcgacgttgcacctgcgaaacggctttcgtccgggtggcgggtcggctaggggcgcgcgcatggtacacaaacgcaacgtgatcgccgcacgactgccccagcccgaattcgacggccggtggggcctgcgttcggcgctggacggccggtggctgccggtggtctatgccagcgaggcggaggcgagcgccgccgccagcggccttcgcgcgtcgcccgtcaacgacaatggctcggtgccgtccgcgcggctgtcatggggctgacacagcgctgagctaagggtcgcctccgtcatccggaggtcgaaatcgtgaagagtgccagcccgttgatggccgacgaactggtcgcctgcgtcgcgagcggcatccccgcgacgccggcgcaggtctcgcatctcgcggcgcggatctgggcggaggcggcatgccaccgctccgcctttgcatggggcgacctgccgcccggtgcggcggaccggacgttcgccctgcgatcggcgacgttggcgctgaacggcggctgatcgagagccgttcgcgagggacgcgaacttttttgggttcgggccgggtcaggcgaccatggcttcgccggcatgaatgacgtctgagcgggttttcgacggtgatgggtttcgacttcgccgcgcgtcgctgccgatggctgtgacagccgccgctggtgacccctacgagaatcgaactcgtgcttacgccgtgagagggcgtcgtcctaaccgctagacgaaggggccatgtgcggtgaagcgcgctcctaagcggcgggcggtggggcgtcaagagacttctctcgacgccccaccggaaacgcgtcaggcggcggcccggcggcgctccgccatttcctcgttgagcatctcggcgagcaggaacgcgagttccaggctctgccccgcattgaggcgcgggtcgcaatgcgtgtggtagcggtcggcgagcgactgttcggtgacgtcgatcgcgccgccggtgcattcggtgacgttctggccggtcatttcggcatggatgccgccggcatgcgtcccctcggcgcggtggacggcgaagaagccgcgcacctcggcgaggatgcggtcgaacggccgcgtcttgtagccggtcaccgccttgacggtgttgccgtgcatcggatcgcagctccacaccaccggatgcccctcgagcgtcaccgcgcgcaccagcttcggcagatgcgtttcgatcttgtcatagccgtagcgggtgatgagcgtcatccgccccggcacccggcccggattgagcgtgtcgagcatgcgcagcagattgtccggctccaggctggggccgcacttgacgccgatcgggttgccgatgccgcgcaggaattcgacgtgcgccgagccctcgaaacgggtgcggtcgccgatccacaggaagtgcgccgacgtgtcgtaccagtcgccggtcagcgaatcctgccgggtcagcgcctgttcgaacggcagcagcaatgcttcgtggctggtgtagaaatgcgtctgcgcgagctgcggcaccgtctcgggatcgatcccgcaggcggccatgaattcgagcgcctcgccgatccggtccgccgtctcggcatatttcttcgtccacgggctgcggcccatgaagtcgtgcgtccagcgatggacctgatgcagattggcatagccgccctgcgcgaaggcgcgcagcaggttgagcgtcgccgccgattgcgaataggcgcggatcatccgctgcggatcggggatgcggctttcggcggtgaaggcgatgtcgttgacgttgtcgccgcgatagctcggcagttcgacgccatcgatcgtctcgttgggcgcggagcggggcttggcgaactggcccgccatccggccgagcttcaccaccggcagcttcgaggcgaaggtcagcacgaccgccatctgcaggatgacgcggaaggtgtcgcgaatgttgttggcgctatgttccgcgaacgattcggcgcagtcgccgccctgcagcaggaacgccttgccctcggcgaccttgcccagttccgcggtcaggttgcgcgcctcgccggcgaagacgagcggcggaaacgtctccagcgcgtcggtcgcgcgggtgagcgcggcggcatcgggatagtcggggagctggcgggcctcggccttggtccagctgtcgggggcccagttcgcggccataatcatgtcgtccttcggggtgtaaacgccgggcgacatgcgcccaaaacggtctttgcgcaatgaaggaacgcttgggggtggcgatggtcatggcgtgccggccccgctagaggagcgcgatgagcaagctgacgatgcgcctcgccctggttgcgctggcgaccgcgacccctgcgatcggcgtggcggcggacgacaccgccgcgaccttcgacgcgctgcgcgcggtggacgggcggatggcggggatcgcctatcgcctgacgaccgccaatgcgacgctgtgccgcgaccgggcgccgacgccgggctgggcgatccatgcgatcgggcaatatgacgccggtttgcgcgatcaggcgcggcgcagcttcggcttcgaaacgccgatcgctgtggagacggtggtgccgggctcgcccgccgcgagcgccggcgtgcgcgccaatgacggcatcgtgtcggtcgacggccggccgctcgacgccgtaccgccggcgaagggggcgagcagcgccggccgcgacgcggcggtggacgcgatcgcggcgctgccggccgaccgcccgctcgacatggtgctgcggcgcgacgggcagacgcgcaccgtccgcatccccgcatcgccggggtgccgcagcgcgttcgaggtgctgctcgggccggggatggaggcgtccgccgacggccggatcgtccagatcggcgtccgcttcttcgaacgctacagcgacgacgaggtcgcggtggtggtcgcgcacgagctgtcgcacaatatcctgcatcatgcccgccggctcgacgcggcgggcgtcaagcgcgggttgctggcggaggtggggcgcaacggccggctgttccggctgaccgaggatcaggcggacctgctcggcatgtatctgctgcgcaacgccggctacgatccgcagatcgcggtgcgcttctggcgcgatcacggcggcgacgtcgacggcgggctgttccgcagccgcacgcacccctcgtccaccgcgcgcgcgaaggcgatcgaggcggagatcgcgcggatcccggcgggggcggggcggccgtacgtgccgccgctgatcgccgacgcggaacgcccgcttcaatagccggatgcgaggtcggcgacgttgcgcatcggccggccggcgacgaaggcatgcgcgttttcgaggaacagtgcggcgccgcgctggaacatctgggtctggctgcggccggacatgtgcatggagatcatgcaattgggtgcggtccacagcgggtggccggcgggcaaaggttcgggatcggtgggatcgaggaaggcgccggcgatgctgccgtcggtaagcgcagcgtggagcgcctgctggtcgatcatgtcgccccgggcgatgttgacgagccatgccgagggcttcatcgccgccagctcctgcgcaccgatcagcgccttggtggcgtcggtcgagggcgcggcgagcaccagccagtcatagtcgccgagccgttccacccaggcatcgggcgtcagcgtgccgtcgcgccccgaccgggtgacgccggtcacctcgaccccgaacgccgccagccggtcgccgatcaaccgcccgatcgtgccgtagccgaccaccagcgttttggtgccgtcgagctcgatcttgcccggcgcgtccttgagccagtcctgccggtcggcggcgcggagcaccacgtcgagccgcttcgccgctgccaatatgccgagcaccgcatattcggctaccgtgaccgcgttgatcccggcgccgttggtcagcgtcacatcccggtcgcgcagcagatcgagcgggaaggcatcgaggccggcatagatggtcgacacccatttgagatccggccccgccgcgcggatcgcgtcggcgaccagcgcggtcggttgcatgtcgacccaggcgatcgccgcatccgcgatcatcgcgttcgcttccgcgggcgtcgtgaaccacgccggcgcgatggcggcgggcagatgcggttcgagcaagccgcgtgcgacggcggggagcactgccttcatgatatgaccttccagtcccagcccagcggatcgccgtccatcacctcgacgcccagcgccgcgagttcgtcccggatcgcgtcggagcgcgggaaatccttcgccgcccgcgcctcgcgtcgttcgaccagccgcgcggcgacccccgccgcgtcgatcccggcatccttcggtcgcacacgcagatcctcgcgcgacagcgtcagcaggccgagcccgagcaccgcgtcgaaatcggccagcgccgccagccggtcggccggaccgatccgcttgtcggcgagcagttcgtcaagcaccggcagggcctttggcgtgttgagatcgtcggacagggccgcatccagccgctcggcatagggttgcgcggacgccgcccccttcgcctcgccgcgggcgcgcagcgccgcgaccgtctgcaccagccgcttcagccgcgtctgcgccgccgccagattgtcccacgaaaattccagctcgctgcgataatgcgcctgcaggcacatcaggcgataggcgagggggtggaaaccgcgctcgaccagcgccggcaggatcaggaattcgcccgacgacttggacatcttgcccgcccggtcgacgaggaagttgttgtgcatccacaccgtcgcgccgctgtcggcggtgccgctataggcctggttctgcgcgatctcgttggggtggtggatctcgcgatggtcgatgccgccggtatggatgtcgaaatggggcccaagatactggcggctcatcaccgaacattcgaggtgccagcccggtgcgccgcggccccaggggctgtcccattccatctgccggttctcgcccggcgcgctcgtccgccagatcgcgaaatcggcggcgtggcgcttgccctcgaccgtctggatccgcccctcgaccggcccctcgtcgcgcacgcccgccagccggccgtagtcgggcaccgtcgaggtgtcgaaatagagcccgtccggcaagcggtagcaatgcttgtcggcgatcgcctcgccgaacgcgatcatcccctcgacatggtcggtcgccagcggaaagcgcgccggatcgcggacgttgaggtccctgaggttcgccttgaacgcctgcgtataatggtcggcgaccgcccagatatcctggccgctcgccttcgccgccgcctccatcttgtcgtcgccggcatcggcgtcgctggtcaggtggccgacgtcggtgatgttgatgatgtgggtgaggccatggcccttccacgtcagcgtccgccccagcgtgtcggtgaacagataggcgcgcagattgccgagatgggcgtagtgatagaccgtcggcccgcacgaatagatgcgcacgttggccggatcggcgggctggaacagctcgaggctgcgggtcaggctgttgtagagcgtcagcggcgtcatgccgtatgccttagcccgccccgcacgccgccgccaaggcttagcgcgccagtccgatcagcgcgctgccggtatagcccgccgcgacgctgccggtcagcgtcgggatctgctgcgccagctgcgcggcgctgttgtcgccgaacacattgtcgctggacagcgacacgcgggcgaaattggtcgcgctcgacggataggtcgcggtgtcggcatagaccgtgctgcacaccgccgccgggatcgccagctgcgacaccagcgaggcgtagcggccgctggtggcggtcgacaggctggagaagacctcgaagtggatgtgcggccagcggccgtcgtaacagcccgggacgatcatcgtgaacgtcacctgcccgttggcgtcggtgacctggataccgcgcagatagctttccgccgcgaccgtatagagcgaatagcggccctgccggtcgcagcaccagatgtagaccgcatagcccgccagcggcgcgcagctcgcgttgacgttcaccacggtcagcgtcagcgtcagcgtgacgccggtggcgaccgtgttggtgccgaggaaactcgaccggatgtcgctgcggacgatcccgctcgcggtcagcgcgttgctggtcgatcccgacgaggtgttggtgccgtcggcggggtaggggccgttggtttcggtcggatcgacgaggcagccggtcgccgtcgctgtcgcggtgggcgtgggtgtcgccgtcgtggtggcggtcggggtcggcgtggccgtggcggtgccgctgaccaccgcgacgctgccgctctccgatccgctgccgccgcagccggcgaccagcgccgcggtaccggcgcccgcgaaccatttcagcgcccgccgccgcgctacctgcgcctcgagcagcggcaggtcgtcggcgaggctatgaccgtgcgcatgggggccgtgcgcatgggaaccgtgtgcatgggggctgtctgtatcgtgatgcggcatgagggttcctcccggtgatgtgagggaaggcatgtcgcagccagatcaccgcgatatgtccggtgcggctggttttgtttcaccatgttgcagcggcatcgccggcaggcgtccggcgcgacgcgcgtggtcgccgcccccgaccgatcccgaggtcgcgcctatcgacgagcctcgcgccgagccggatcccgtcattgcgagcgcagcgaagcaatccagagccggacccggacgtcctggattgcttcgctgcgctcgcaatgacggatgggtggaacagccacccgatcatgctgtccctgtctgcattcgtgggtgaccgatgggctgcacgaaccggcagataagaccggacggttgcatctcgatgccgaaccgccgggcaatccccaaacgaaaaaaggcgacgccgcagcgtcgcccttatctggtgcgaattgacacttgttaactgccagaccgcgatctctgagaactcggaatgccttctccggtagatgtcgtcaagtggcgattgctccacgtcggttcgatccggacgcagatcctgcttgacgtcgatagagcagcttgcacgatggcaacgaacaccgggggttacagacgatgggacaggataatcggccatggcgccttggcgtcgacctcggcgcgaattcactcggctgggtggcgatcgaactcgatgcgccggtcgatggcaagcccgtatcgatcctcgccgccggttctcgcatcttcagctcgggtgcgaacggggccggccgcgacgccaagtccggcgagtccctcgccgtcgcgcgccgtgacgcacgggcgatgcgacggcgtcgcgatcggttccagcagcgccagcgcgggctgctcaaatatctcgtcgcggacggcctgttccccgcggaggaggaggaacgcaaggcgctggccgcgctcgatccctatgcgctgcgggcccgcgcgctggacgaggcgctgaccctgcccgaactcggtcgggcgctgttccacctcaaccagcgtcgcggcttcaaatcgaaccgcaaggcggatcgcaaggccgacgacgacgccggcaagatcgcggtcgggatcgatcgcacccgcgaggctatcgccgaggcggaggaaaaagccggtgccgaaccgggcagctggacctacggcaaatggctgcacgaacgccgcgcctcggcgagcgatgccaacgccatcccgagcgtccgcacccgcctgcgccccgaaaccggcgagggcgcgaagggcgacggctacgacttctatcccggccgcgccctgatcgcggaggaattcgacgcaatctggcaggcgcaggcgccgcatcatcccgacgtgctgaccgaccaggtctatgcgcgcctgcacgagatcgtctttgaccagcgcccgctgaaggcgccgcagatcggcatgtgcacgctgatcgccggtgaccgccgcctgcccaaggcgcaccccttgttccagcgccgccggctgctggaagaaatcaacgcgctgatgatcgtccgtcccggcgaggtcgcgcagcgcctgacccgcgaggaacgcgaccggctgtacctcaagctcaaggacaaggcgaaggtcaccttcctgagcctgcgcaaggagttgaagctcgaccccgacgcccgtttcaacaaggagagcgagaaccgtcccgacctgaagggggacgaggtcgccgccgtcatgcaggcgaagacgcgcttcggcacgcgctggctgcatctgtcggtcgaggagcaatgggcggtgatcgaggcccgcgaacaggtcgagagcgatgccgaggatgcgacgttccgcgagtggcttgcggcgacctacgatctgacgccggagcaggcccgcgccatcgccaacgcgccccggccgcagggctatggccgtttcgggcaaaccgccaccgaacgcctgatcgacgctttgcgcgacggcgaacgcgacgggcgcgtgctcgtctacagcgaggcggtggcggaggcggggctggggcatcacagcgatcaccgcaccggcgaggtgttcgaggatgggcagggccgcccgcaattgccctattatggcgtcgcgctggagcggcatatcatgccgggcaccggcgatcccaccgatcccgaggaaatgcggatcggccgcctgaccaacccgaccgtgcatatcgggctcaaccagctgcgtcgcgtcgtcaaccgcctgatccgggcctatggtccgccggcggagatcgcgatcgaactcgcgcgcgaactcaagctgaccgacgacgacaagcagcggcagaatcgcgagaacaacaccaaccgcatcgcctccgagcgccgctccgaaaagctgatcgcgatcggccagcccgataccggcggcaatcgcgcattgttgaagttgtgggaagaactgaatgccgacaacgtcctcgaccggcgctgcgtctatagcggcgtgcggatctcgatcgacatgctgttttccgctgcggtcgaggtcgatcacatcctgccgttcagcgcgacgttggacgacagcaacggcaacaagatcctctgcacgcgggaggccaatcgcgacaagcgcaagcgctcgccctatcaggcatggggccataccgaccgctgggacgccatagccgcccgcgcggcgcaactgccgcgcaacaagcgctggcggtttgaaccggacgcgatggagaagttcgcggacgccagcggctttcaggcccggcatctggtcgacacgcaatatctggcgcggctgtcgcgcgaatatctggcgacgctctatccgggcaagggcgaggggagtggccatgtctgggtatcgccgggtcggctgaccgaaatggtgcggcgcaagctcggcctcaacgacctgctgcccgaccacaattatgcgggcggtgcggatcaggccaagaaccggcgcgatcatcgccaccatgcgatcgacgccgcggtggtcgcgatcgtcgaccgcgggctgctcaacgaaatgtcccgcgtgtcggggcaattgggtgccgagggccgcgagaggatcgaggtgccgctgccgtggccgagcttccgcgacgacctgcgcgatgcgatcaacgccatcaccgtcagccatcgcaccgatcacggcaccgtctccaaggccgggctcgcgaagggcaaggacgcgaccgccgggcggctgcacaacgacaccgcttacggcctgaccggggagacggacgccaagggcaacagcatcgtcgtccgccgggtgccgctggcctcgttcaagaagctcgccgacctcgaccggatccgcgacacggacctgcgcgccgcgctctatcgccagctggaagggctggagggcaaggcattcgaacgggcactcgcggaattcccagaccgcgattggcacccttatggacgcattcgccgcgtccgcgtcgtcgaaccgcttgccgtcatcccgatccgtgaccggaatggacatatctacaagggctataagggcgattccaactatcgttacgacgtgtgggaattgccggacgggaagtgggtgacgagctggaaggatcgcgagggcaaggcggtgtcgagcgtcgtgtcgatgttcgacgcgcaccagtccgccgaccagccgcgaccgcatccggccgcgcgcaaggtgctcagcctgcatcagaacgacctgctcgcgatcgaacgcgacggcgaggcgcggcggctgatgcgcgtcgtcaagttcgggcagaacgggcagatcacgctcgccgagccgcagcaggcgggcgacctcaagcgtcgcgatgccgcgtcgaacgacgacgatccgttcaaatatatcgcgccgacctgcggcggtctgaagagcgcgcgggcgcggcaggtgcgggtcgacgagctcggccgcgtgctcgatcccgggttcccggcacgcaccgcccgacgcgcgtcgcggggctgacgggccggggaatggagcggatcgtcgatatcgccaccgacggccgccatctctccgcgcaccgcggcttcctgatcgtgtcggacaaacgcgtcgaggtcggccgcatcccgctcgacgatatcgccgcgataatcgtgaatgcccacggcatcacctggtccaccaacgtcgtcgttgcgctggcgcagcgcggggcggtgatgctgctgtgcggctccaatcacgcgccggtggcggtgtgcctgccgctcgacggccatcacgcgcagaacagccggatgcgtgcgcaatgggaggcggggcggccgctgtccaagcaattgtggcgacggatcgtcatcgccaagatccgctggcaggcggcggcgctggaggcgaacggcgtatccgcgaccgccttcgactttctcgcgcggcgtgtcggatcgggcgatcccgacaatgtcgaggcgcaggcggcgcggcggtattggccgttgctgatgggcgaggggtttcgccgcgatcgcgatgcggacgacgtcaatgccctcctcaattacggttatacggtgctgcgttcgctgtgcgcacgggcggtggtcgcgtccgggctgcatccgtcgatcggcgtccaccatgccaaccgtacgaacccattcgcactggccgacgacctgatcgagccgttccgggcgctggtcgacctgctcgcggtgcggctggtggcgcggggtgtgacgacgctgacccccgcggcgaagcacgccttcgccgggttgatcgcgctcgatttgcccgggacggatgggacgaccacggttgcaggcgccgccaaccgcgcggcgcaaagcctcgcgcgtgcgttccagagtgggcaggcggccgacatcgtgctgcccgtccccccgtccgcgctggaactggccgggctcgatacattgatcgcggcgtgaccgcgatccagctcagcggatatcgcctgatgtggatcttcgtgatgttcgacctgccggtgaccacgaaggaccaggcccgcgccgccaccaagtttcgcgaattcctgctcgacgaggggttcgagaagagccagttctccgtctacgcgcgcttctgcaacggcaaggagcagttcgagacgtatatgcggcgggtggaatcgcatctgcccgatcggggcgaggtgcacatcctcagtttcaccgaccggcagtatgagaatatcgtccgcttctcggggcagagccgccgcaggccgcggacgaatcccggccagctggcgctattttgatggatgcggggtgttttttggattggcgatcggccgctatcgtgttgaagatcaatacgatagcggctgatgcactatagccgctcagagatcgcggtctagcggcaacagcttctgcgcgcccttccacttacggggcactatagccgctcagagatcgcggtctagcggcaactgcccgttccatccggcccgcgccacgcgactatagccgctcagagatcgcggtctagcggcaactcaatcgccgctcgttgttgagcttgtggtactatagccgctcagagatcgcggtctagcggcaactgatctgataccggccaacggacgccgacaactatagccgctcagagatcgcggtctagcggcaacgctacgaccgttacggcgctcccaaggaccactatagccgctcagagatcgcggtctagcggcaactcgtggctggagccgtatgtctatatccagcactatagccgctcagagatcgcggtctagcggcaacgatcgcacgcctcggcgaggtgttcgagcaactatagccgctcagagatcgcggtctagcggcaactgggcgggttgcagcacgaggacgtgacggactatagccgctcagagatcgcggtctagcggcaac

SEQ ID NO: 3094 - DNA, 15232 bp, synthetic construct
  source 1..15232: mol_type = other DNA
  misc_feature 1..15232: note = Synthetic
tcatccaatatcctgctgaccacggcgacatggccgagcaccattgcccccactggccggaaggcaagcaccgcccccttcttcggcttgtggccgcgcttataatgatcctgcgcctgatcccaccaggtgagcgcatcgccatagatgtccacgcccgaaacgatgcgggcataaggcacgcactgcagcgccgtggctcctagaacaggcgcagccgtcaagctggacagcagcgccacccagcggacaaatcgaaacatttatgcgacctcaaacaccgagaatcgccccaccgggatcgaccctagagctccatccgtaaggaagaggttaacagcttagaaagcacctcgggcgctgtccgcaccagccgtcgcgcggtcggccagggcgatctggaccggctgatcgatacccggcttgccggcataaatgaagccgttagcggggttggaacgcaggccgacattgccgagcgggccataccagacgcgtacgtcggtccagtcattgttcggcgacacatcgatcgcgcggacattacgctcgacaccgccacgataggaccagttggcatgggtcagcagcacttcgcgctcactgacgaccttgctgaccatggcgacatggccgaccggcatggcacggctcgccgcaaacgacagaacggcaccaacgcgcggctcatggccgcgatcatattgaccggccgcctggttccaccaggtattggcattgccgaaaagctggataccggagacttcgcgcgcgaagggcgcgcattgcaggacacctgcggtggccggaacggcagagaaggcaccgagcgcaagcatggcggctgcgaacagcgcgcgaaaaccaccgatcattccttgcgacccccgacttgtaggtaggtataatccccgatgacctccttagggcagacgccgttcgtcttgaaaaccgccgagcgatgagtcgttgctgcgatgcgtcatgctgcggaacgaaaaacatgcccggccgttacatggagccgggttgcaccgttcaactcgttgaaaaggctgtcttccgtgccggtcatccagacttggccgccggttccgcgcaatcgatcgaacagcgcagcgcgtcgcgacgggtcgagatgcgccgccacttcgtcgagcaacagcacaggcggctggccacgatccgtcgagaccagggccgcatgcgccagcaggatcgagagcagcaacgccttttgctcgccagtcgaacagagtgcggcggcctgattcttggcaatgtggataacgtcgagatcgtggcgatgcggccccgacagggtgcgaccggcagccgaatctcgacgccgctcgcgggcgagccgctggctgagcggttcgccgctcgcaccatcctcctgcgcgatccgaatgagcggccgggcgaaaggctcgtcgggctggtcgatcagttgcgtgttgaggcgcgcgaccagatcagcacgagcggcggcgagtatcgtgccatgctcgtccatctgtgcctccagcgcgccgatccaggccgggtccgcccggcgaagatcggtgagcagccggttgcgcgcgcgcatcgcagcttcatagcgggcactgtgcgcggcatggccgggatgcagcgccagcgtcagccgatcgaggaagcggcggcgaccgccggggctgtccaggaacagccggtccatcgccggcgtcagccagacgatcgcaagatgatcggccagcgcattggcggacgaggggacaccgccgatccgcacctgccgccggtcgggcgcatccgcgctgatgccggtgcccagcaccacgccatccacctccgccgcgatgccgaagctgccacccccatcctgccgcgccatcgcgcgcagcgctgcgccgcgcaggccccggccgggtgccagcatcgatagcgcttccaatatgttggtcttgcccgcgccattgtcgccggtcagcagcacgaacggctgatcgggcacgatcagcgcgtccgcatggttgcggaaatcactcagggtgaggcggccgatcatcgcgccgccttagcgaggactgcgcgccgggggaagcggttcaggccgccggggtacagcgcttgcgtacgatcgccgtgccgtcattggcgatggtgagttgctggccatcggtcgagggacgcagcatcaaggtccgggtccagctgtcgccctcgccggtgaaattggcgacgaccgccagccgcccctccccctcgcgcgtgacgcgctgcaccgtgccgacgctttcatggaagatcaggctccctgccgtcagttcaagcgcctgcgcagccgccttatcgccgcagcgttcgctggtgccggtccagcgcccctgcagcgcgatcgggatcgcattggcgtggatcgcgtcgcccttggccaccggcaggtcgggcgcgggctcgaccggcgtgatggcattggcaccgggcggaacgtcgcgcgtgctgggcaaggcctggtccaatatgttggtgaccatgccggactgattttgatccttgccgccgcaaccggcgagcagcagcagcggaagggcgagaaagaaatggttacgcatgcgatgccaacccggcagggccgcatcgggttccccccccctatcgcccgcgtgaccgccaatcacgcccatgctatcaacgccgcgacaatcgaggagggatgccatgccggttttgggaatggacggacttttctttcgcgcacgcgatcccgtggcgctatcggcctggtatcgcacccatctgggcgttggcggcggatgcagcgccgaccccgacattccggcggtcaacgaatatgtctggcagacgctgggcggaccgatggtcttttcgccgttcaaacaggacagcgactatttcgccgccgacaagcgcttcatgatcaatctgcgtgtggccgatctcgacgggctgctggcggacttgcgcgcggcggacgttgaggtcatcaccaagcccgaatgggatcatcccgatgtcgggcgctttgcccgcatccatgaccccgagggcaacgccatcgaattgtgggaaccgcccgtccccgccgcctgaccgacccatgggagttagaaaatgaagcgcgcaaagattatcctggccctggcggccgcagtcctgggcacgcaaagcggcatggctgcgctcgccgtcggcgccaaggcacccgatttcaccacgcgcggcgcgatcgccggcaagaccttcaccgttaccctgtcgcatcagctcaagcgcgggccggtggtgctctatttcttccccaaggccttcacgccgggctgctcagccgaggcgcgcgagttcgccgagaatatcgacaagttcaaggcggcgggcgccaccgtcatcggcatgtcggccgatccggtcgatgatctggttgccttctccaccaaggaatgcgccggcaagttcgcggtcgcctcggccgggccgaccatcgtgtcgggctatgatgtcgcgctcaagatgcggccgggcatgaccgaccgcacctcctatgtcatcgcgcccagcggccgcatcgccttcgtccatagcgagatgagctatgccggccatgtgaagagcacgctggccgcggtcgaggcgatgaagcagaaataagggccgggcgatgaaggggtgacgcgatcaccccttcacatatttgtcgaaccagccgagcgtttcggtccaggcggcctgcgccgccgcttcattatagctgggccggtaatcggccatgaaaccatggtcggcgccggcatgaacggtgatggcatcgggcggcgacttgcccgctgtcttgagcgcggcacgcatcgcctcgacatcggcctggggtatgcccttgtccagggcgccatattggccgagcaccggcgccttgagcttggccacctcctcgatcgccgacagggtttggagatcattcttctgcgtcaccagccgaccatagaaagcgacgcccgcgtcgagtgcggcactatgcgcggcatagagccagaccactcgtccaccccaacagaagccggtgatgccgcgccgcgacacatcgccgccatgggcgccggcaaaggcataggtggaatcgatgtcggacagcacctgtgcatcgggcgtcttgctgacgatctccgccaccagttgcttgaagtcgctgaccttggtggcgtcgccatggcgcgcgaacagatcgggtgcaatcgcatgataacccgccttggcgaaacggcggcacatgtcgcggatccattcatggacgccgaaaatctcgtgaaccacgacgatcaccggcgccttcttcttgcctgccggtcgggcgacatagcccggcatggcaaagccgtcgctggtcgggatcgagaccgcttcctccaccagcccctctatcggggtctgtatggtgctggccgcgaccggttgacaggcggcagcaaacccggcggcaaaggcgccaccggcgaggatatgacgccgactaaggccagtcgaatcaatccagttgcgatcttcgggcaggcgttcgacggggggctgtacgtcctgacgatcgacggtcatccacattctcctctgcccggcgggcctgccgtggtttgccgcagactagccatgccgccgcctggcgcaaccgcgccctgcgcggaccaggaggataaatcatcccggttatatcggcccaaaccaagggctatgcccagccggtaatgcgtgtatcaattgtcatccggagagattgatatgcagaagcagcttacggaggttatcgcccagctggtcgagcagatgaccagcatggccgcatccattgcccgtgctgacggcgcgcgcatggcgcatcgccacatgatcgcgcgcctcctcaccgatttgcctgcaccctatatcgaacgcaccctccgggatttgcgacaggtcgtggaggaaagcgaaggcgcgctgggcgcccatcggacgtccagctacctccaggaactcgacgctatcgaggcacagtcgcttcgtagccgaggaaatcaggggctgaactaggaaatagttacacccgtcccgccgccaggaaatccccgcccgcgatcaccgaatgtccggtaacggacagagcgtacagatagacccaggcctcgaccgggccgtcgggcgtttccacgacgcactgctggcgcgaatattcatgcggctgcggatgatcggatgtgcattcctcataggcgtccagctgcgcaagctgcgcttccgcatcggtcagaacaaacagatcgccacgtacgcgccctgcccctcccgggacgaatccgggataatccaccacctgatatagcgcgccctgcatccagcctggtcccacccattgtgcgatatcggccagccagcgcgccatcactccatcaaagcccggtcgcagcgttccatatacgaagaggagcggtggatttagaggcacggctgtgatttttcaccgattgacggtgaattttcccaaagaacagatttttcctcaatgaggaaaatcgtgacccttggcaaaatccacgattttacgccaaaaatcgaaattggcacgcctcctgcaatcctgtttggcatcaaggccggatggtccggccaagacatcaagggagtaaatatcatgtccatcgccaagttccagagcgtcgccattgcctttgtcggcgccgtcatcttcgccagcctcttcgtgagcgccgctgtcccgcttgccccgatcgcctgatcgggcaaccgccatcatccccctctccaacaagagttgaaggccagattcatgaacaacagcttcaccctcgaccgccgcaacgcgaagatcatgggcgtgtgcgcgggcatcgccaaccgcaccgggctggatgtcacgctgatccgcgtcgccctggtgctgctgaccctgtgcgccctcggtccgatcggcgtcgtggcctatctgctcgccggctggctggccgagggttgatccctcgccgccgccgggcgcagggctccggatacaaaagcgccgccccggcatatgccctgggcggcctttttatgccccgcactgacgggacaaagacatgcgcaaaaatgcgcttaagcgtacagcaccgagtagaaggtcagcatctgaacgctgaccgcaaccaccagcgcagtcgcctgaaaggcctgacgcatattggactccatcattggatgacaccccggatcgggatgcagtgccatatgatgatttcatggaattgtaacaatcgcaaagcctgacattccaattgcattaaacgcaattatgtcacagctgttgctccagagccatgatggtggccagcgctgcggccggattccgtatcttggccccgcttatatagaagatataggcgtcacccagcaccgcctgctcccttgcccgatcggtccagccggaaatctctgacaggctgtagcctgcttcctcctcttcgctgctgcacatcagccggttgtaggaaaagccgacgtcatggccggcgatcgcaggataggcatcatggtcggccagcaccactgccacgccggcatcccgcgccagagcaagaaaggcgggatcattgaagctttcatgtcgcacttccagggcatggcgcaacgccacgccatcgacgctcgtcggcaacagcttaaggaacgcacccaagtcgtcgggatcgaatgtcttggtcggcatgaattgccacaagatcggccccagccggtcccccagttcgatgatcccctgcttgacgaatttctcgatcgactcgcccgcatccgcaagcacgcgacgattggtacagaagcgcgacgccttgaccgcgaactggaagccatcgggtacggcccgcgcccagccggcaaaggtggccggcttctggctgctataataggtcgcattgatctccgtcgcggtcagatgggcaccgacataggccagctcgtccttctgacgcatgccaaccggatagaagctgccccgccagggctcatagacccacccgccgatgccgactctgatccgtcccgccataagcgcctcctggcgccatattgatcgccgcagacgatcagagccagcgggaaaagccattggcgattattgcgaacaattcttaactaccaaggcacagctttcaaagggtttccgccatgccgctcgatctcatcaagaccgtcacttatctgtcgatccatctgaccgtgggcttcaccgtagcctatttgatgactggatcgatgaccatcgcgggcggcatcgccctggtcgaaccggtgatcaatgcggtcgccttcttcttccatgaacaggcctggaagcgcttcaccgcccggccgccgcagggggccggacgaagctggttgcgcagccaggcagctatcgcctgacggctatttggcgggacgcggctgcgcccgcgggatcaaccagggcttgaccttgccggtgggtcgggctgcgccgtccagccttttggtatggaggatggtgatcggcttgacgatcatctgcccgcgcatcgggccagtgccgcagcaggtcggcactgccagaatatggcgcacgacatccatgccgcctacgacatggccaaaggcggcatagccgatatagtcgccctgcgcgtccatgcgcggggtcgcgccgatagtgatgaagaaattgccgctcgccgaattgctccggtccggccgggccatcgagagggtagcgtccagatgcttgagccctgtctggctggtcggctcatgccggaccggcggcagcgcgcgacgaagatcggtatcgatgccgccctggatcaggccgagccgtggatcattcttgcggcgggccgcgcggtagaaattggtgccgtcgaagcgctggtcatcgacataggccaggaaattggcgctggtcagcggcgcatgacgttgatcgacggcaacgatgatggtcccgaccgatgtttcgatcgcgacccgggtgaagccgggcgtaagacgattggcaggctgggcaagagcgaggccgggcagcagcagaaacagcagggcgatgaggttgcgaacaggaaaaaacattgacgggcaagcactcaaattgcgggagattggcggccgcccgaccctataagccgtgcaggaccggcgcaaccgcccgctctgccgatcagcgcaccagcgcgaagccgatgcgcagacgggtcacctggcgtcgatagtcgagcagattttcgccatagccggcaaagccctgggcgaagagatagatgtccggcccgccgcccagcaggcgcggcagcggataggatagctcggcattgaccgcgcccttgccggtgctgaaattcaaccggctctgggtcgacagccgcagcccctcatcatcgcccacttccaggaatagcgcgctatggccgcgataatcggcgatatcgggattgtccgacttgtcgccgacgtagaaggacaggcgcggcgccgcaatcaggcgatatttgccgctcagcggcaccgccaccatcggcgcgatatagaggctgttgatgctgcgcgattccgcaccatcgcgaccgttggattcatgccgggcgccgacctgggcgctgagcgacaggccgttgctcaggccggtcgacggggcgatgtagatgatctcgggctgataatcgatattgcggaagggcgaggattgcgccgccacgtcccaaaacatgcgctgcgtataggccagataaagaccatcgcgccaggatgcgggcagatcggcccgttcgcgcgatccaaacaactgatatttgaagctgatctgcagccgcgcatcgctgttggtacctggcccataggcgccatagatcggctcataggcggacatattgtcgagaaaggcgttgccaatcgtccgatccgccggagagggcgcagcaggcgggggcataggagcaggcgatagcgccggcgccgcgacggcgagcgccacgggcgctgcgggcgccaatgccgtttgtggaacacgccattgcggaatcgacagcaacccaccatgggccgcctgatcagccgccaggcgatatgccgccgaaacgaagccatgcggaggcacggcgagatcagccggcgtcccggacgcgcgctcaagccagacattgcgtatatcgccgtccctatccaaccgcgcctcgacccgatccggcagcgatatatgctgcaccacagcatcatcgttgagcagcctcaaggcgatcatcagtgccccgtccgacgcccgttcatcactgtgggcgaccagtatctcgactggcccagcggcctgggccgatggcgcgagcgcaaccagatcgagcaacaggcccactagaatccatcggttccgcgaaagcgcacggaagatcatttccatttcggacttgcgggccatggaaccgcctttcgtagccagcaaccgcatggcttaaccgccctgcacgcaagccataggaattctgacggaggctaacaaggttgtcgcgactagagcgtaatccgttcatactgaatcggatcacgctctatttttcttttgttttccgcattttccgagccagcagatgatgccatctgcttcgaaaatgctctagccgccgcacagatgttcgacagccgccgagcgtcaccatgcgcccaacgcacatctcgatcgccagcacgacaggaatgaagagatgccaacttgatggcgccgcagatagaactgcccacttccaaccaggatcgcccgaatagaccaacaaaaaaggcgacgccggagcgtcgcccttatctggtgcgtactgacacttgttaactgccagaccgcgatctctgaagcccgacaatgacggatagcgaagtcatggtcaagatgttcgtcagattgcgcgttcatttcggttccgatttcaacttgactgcattggcagagcctgccccactgtaaaactcatgtgggtgaggaacgatggcagaaggaaaaaagcgcatatggcgcctgggtgccgatctgggcgcgaactcgcttggttgggctgcaatcgaactgagcgctccggtcaatggcaagccgattgctatccttgctgcgggatcgcgcattttcagcgacggccgcgatcccaagtccggcgcatcgctggcggtcgaccggcgcgatgcccgtgccatgcgccgccgccgcgaccggtttaagcagcggcaaaaggcgctgatcaaatatctgatcgccgacggcctgtttccagcagacgaggccgcgcgcaatgcgatggctgcgatcgacccctatgcagtccgcgcgcgggcgctggacgaagcgctgtcgctgcccgaactgggacgcgcgctattccatctcaatcagcggcgcggattcaagtcgaaccgcaaggccgatcgcaaggcggatgacgatgccggcaagatcgccatcggcatcgaccggacgcgcgacgccatcgccgaggacgaagcagatgccggtgcggaaccgggaagctggaccttcggcaaatggctgcatgagcgtcggctgaaaggacagtccgtgcgcacccggctgcgtcccgaaagcggcgaggatgccaagggcgacggctatgatttctatcccgatcgcgcgctgatggaggaggagttcgatgccatctgggccgcgcaggcgccccatcatcccgatgtgctgaccaatgatgtccatgaccgattgcatgagatcatcttctatcagcggccgttgaaggcgccgcaggttggcatgtgtagcttgatccccggcgaccgacgcctgcccaaggcgcaccctttgttccagcgtcgtcgcttgctggaggaactcaatgcgctgatgatcgtgcgaccaggtgaggttgctcagcggctgacgcgggaagagcgggatatcctgcttctgaagctcaaggacaagaacaaggtcagcttcgcgaccctgcgcaaggcgttgaagctcgatcctgacgcccgcttcaacaaggagagcgaggaccgcaccgacctgaaaggggacgaggtggcggctgtaatggggagcaagacgcgcttcggcaatctctgggtccatttgtcgatcgaagcccaatgggatgtccttgcgcggctggacgctgtcgaaagcgatgcggaggatgcggctttttgcgcctggctggtcgaaacctatgcgttaacgccggagcaggcacgggctgtcgctaatgccccgctgccgcccggctatggccggttcggcgaaaccgcgacccgcaagctgatcgaagcactgcgcgatggcaaaaaggacgaccgcgtgctcgtctatagtgaagccgtcaccgaagcgggtcttggccatcatagcgaccggcggaccggcgaggtgttcgaggatgcgaaggggcggccgcagttgccatattatggcgtggcgctggaacggcacatcatgccggggaccggagatccatccgatccggaggagatgcgggtcggccgcctcaccaatccgaccgtccatatcggactcaaccagttgcgccggatcctcaacgtcctgatccgcgcctatggtccgcccgctgagatcgcgatcgaactggcgcgcgagctgaagctgaccgatgaggacaagaaacggatcaatcgcgagaataatgacaaccggatcgccgcggaacggcggtcggaaaaactactggccatcggccaggccgacagcggcgccaaccgcgcactgctcaagctgtgggaggaacttaatcccgccaatgtgctggatcggcgctgcatttatagcgggcggcagatttccatcgacatgctcttttctgcggcggtcgaggtcgatcacatcctgcccttcgccgcaacgctggacgacagcaatggcaacaagatcgtctgcctgcgcgaggccaatcgggaaaagcgcaaacgctccccccatgatgcctggggccacagcgcgcgctgggacgagattgcggcgcgcgcggcgcaattgccgcgcaacaagcgctggcgtttcgagccggacgcgatggacaaattcagggacgagggcggctttcaggcgcgtcatctggtcgacacccaatatctcgcccggctgtcgcgcgaatatctggcgacgctttatcccgaaaagggcgagggcagcggccatatctgggtatcaccggggcgtctaaccgaaatggtgcggcgcaagctgggcctcaacgacctgctgcccgaccataatttcggcggcggcgcggatcaggccaagaaccggctggaccatcggcatcatgccatcgacgccgtggtcgtggcgatcgtcgatcgggggatgctcaatgcgattgcgcgagcatccgggcaggaaggggccgaaggtcgcgaacggatcatcattccggaaccctgggacgggtttcgcgacgcgttacgcgagacggtcaaccgcatcaccgtcagccatcgcaccgatcatggcacggcgtccaaggcggggttgccaaagggcaaggatgcgaccgccggtcgactgcataacgacacagcctatggcttcaccggcgacaccgatgccaagggcaacagcatcgtcgtgcggcgcgtgccgttgtcgagtttcaaaaagcttgccgatctggatcgcatccgggacgccgatctgaaggccgcgctctatcagcatttgaacgggctggagggcaaggccttcgagaaggcgctggccgaatttcacaagctggaatggcataattttggtggcgtgcgccgcgtgcgcgtgaccgaaccgctgaccgtcatcccgatcaaggaccggaatggacgcatctacaaaggctataagggcgattccaactatcgttatgatgtgtgggaattgccggacgggaaatgggtgaccaattggaaaaatgaggcaggtgaagcgatgtccagcgtcatatccatgttcgacgcgcatcaatcaagcgaacccccgcgcccgcaccctgctgcacgaaagatattgagcctccatcagaatgatcttctggcgatcgaacgcgaaggtgaggacaggaagcttatgcgggtggtgaaattcggccagagtggacagattacgctggctgagcatcaacaggctggcgatctgaaaaagcgcgatgcggtgtccaatgatgacgatccgttcaaatatttcgcgccgacgagcggcggcttgaaaaaagtcaaggcacggcaggttcggatcgacgagatcggccgggttctggaccccggatttcccgcccgcaccgcgcgccgcaagacgcggggctgatcgagaaacagcaggacagcgatggaccggatcgtcgatattgctaccgatggccgccatctttcggcctatcgcggcttcctgatcgtgtcggaggatcggacggaagtcggacggatcccactcgacgatgttgccgccgtcatcgtccatgcccatggtatcacctggtccaccaacttgatcgtcgccctggcccagcgcggggccgtgatgctgctgtgcggcagcaatcatgcgccggtcgccgtatgcctgccactggagggccatcatgcccagaacagccggatgcgcgcgcagtgggaggcgggcaaaccgctatccaagcaattatggcgccggatcatcatcgccaagatccgctggcaggcggccgtgctggacgccaacggcatgtccgcatcggccttcgacttgctggcccggcgcgtgggatcgggcgaccccgacaatgtcgaggcgcaggccgcccgccgatactggccgctcttgatgggggaagggttccggcgcgatcgggaggccgaggacatcaacgccatgctcaactatggctatacggtattgcgatccttgtgcgcacgcgccgtggtcgcagccggtctgcacccctcgataggggtacatcatgccaaccggacgaacgcctttgccctcgccgacgacctgatcgagccgttccgaccactggtcgatgcgttggcggtgcgactggtcgcgcgcgggatcgatacggtaacgcccgaagccaagcgcgcctttgccggattgatcgcgctcgacttgccgggaccgagcggcacgacgaccgtagcgggcgcggcaaaccgggcagcgcaaagcctggcgcgtgcctttgaaagcgggcaggcgggagacattgtacttccctccccaccttccgcgctggaactggccggactcgacgcattgctaccatgagcgcgagccaattgagcggatatcggctgatgtggattttcgtgatgttcgacttgcccgtaacaactagggaacaggcgcgcgccgccacgaaattccgggagttcctgctggatgaaggctttgagaagagtcagttttcggtctatgctcgcttttgcaacggcaaggaacagttcgaaacctatatgcggcgggtcgagtcgagcctgcccgatcgtggtgatgttcacatcctcagcttcacggatcggcaatatgaaaatatcgtgcgattttcaggacagcgccggcggcggcaacggaaaaatccggatcagctggctctattctagcgatttgcctgattttcacagtgatagaaccatggatattgcattgcttttcaatacattatccatggttcgatcatagccgctcagagatcgcggtccagcggcaacagcgccggtcctggggtgacgcatggcctaatcatagccgctcagagatcgcggtccagcggcaacgacatgcgggaagcgttagccagcacgagatcatagccgctcagagatcgcggtccagcggcaaccttatcccggcgtcctcgacgctcaaaaggatcatagccgctcagagatcgcggtccagcggcaacccagcgcgttgatcttgaaattcgcctcaaatcatagccgctcagagatcgcggtccagcggcaactcggatgatcgctggcttgatcgcagcgaaatcatagccgctcagagatcgcggtccagcggcaacgccttggcgtcgtagccgatggcgtcgccgatcatagccgctcagagatcgcggtccagcggcaacgctgcgccttgaacggctcccccatgtcgagatcatagccgctcagagatcgcggtccagcggcaacgtgccgcatgttgcgcggctggacggcggaatcatagccgctcagagat

SEQ ID NO: 3095 - DNA, 15035 bp, synthetic construct
  misc_feature 1..15035: note = Synthetic
  source 1..15035: mol_type = other DNA
ccgtgcatggtgaaaacctggttgtaggtctcctgcccgagcacctggttgagcggcagcgcgagctgcagccggatcagcagcgcgaggatgccggcgagcacgaagaacagcagcgccgcgccgacgtagaacggcccgatatagttgttgttgacgacggagaagagccgccagcctttcggtggctcccacaccttttcgagcagctccagctcgccctcgggccgcggacggcgatcgggcatgttgcgcatcgccgcggcgaaggcttcctcctcgcgagtcacttcagccccgcgagataagcggcgagcgcgtcgagctcgctcgggtgaaggcggtcgaagggcggcatgatgacgccgggcttataggcgtgcgcgttggcggtgaagccgcgcaggttcgcggcggtgttggggaggatgcccgcgccgatccgcgtgcggcttgcgacatgggtcaggtccggcccgcgcgaacccgcctggcccgtgcccgcgactcggtggcatccgccgcagccgaggctgcggaacagcccctcgccttcctgcgccgcgagcgaggcggaaacggcggccggacggcgctggttcgcggaccaggcatcaaaattggcgggcctcaacgcgcggacgcggaactgcatcagcgcatgcggcccgccgcaatattcggcgcagatcgcgaaatactcgcccggccgctccgcttcgatcagcaggcggttgagcttgccggggatcatgtcgcgcttgcccgcgagctgcgggacccagaagctgtggatcacgtccgccgccgccagctcgagcatcaccggccgtcccgcggggatgaccagctcgttggcagtgaggaagtcgggatagcgcacgctccaccaccagcggtacccggtgacgcggacgatcagcgtgtctgccgcggtcttgccgagcgccgacgtcatcgtcagtccgacgacgagcagcaccgacagcacgacgaccggaaaggcgaagccgagccccagcacgaaccgctccgacgccatccgcgcgcgccaccgcgcgggaccggcgagcgcgaccgcgagcagcacgagcaccagcagcatgatcgccgccccgccccacagcaggatgtgcgtcaacgacgcgaccggcgcggcctgcgaccccgccgcgtcgagtgtcagcgcgccgcccatcttcgtcattccgcggctggtcaggagcgattccttctgcgatcaccatcagctagcccgtgccgggccatgaccgcaacgagggatcgcaccagcacttgccgcagctcttcccttcaaaggcggaccgctggctgcggacggggctcgcgctcgcggggattgcaatcgtgctgctcgtcgccgggctgctctaccatgcgcggtcggacgcccggtggaacgtcggcaagccgctgcctcagccgatcggctttccgcacagcgtccacgcgggcaagctcggcatcgcgtgccgctattgccacgtcaccgcgaccgcccaggccgcggcgggcatgccctcggtgcagagctgcctgacctgccacgcgcagatctggcgcggtacgccccagctcgccccgctccacgccgcggcgggtgcgggcgcgccgatcacctgggcgtcggtcagccgactgccggtccacgcgcgcttccaccacggcgcgcacgcccgcgcgggcgtgacctgcgcgacctgccacggcgcggttgagacgatgacgcggacggtcaagaccgagacgctgtcgatgggctggtgcctcgactgccaccgtgcgcccgaggattccggcatccgcccgatccgcgccgcgagcgcgcccaagtcgcactatgacgggcgcgacctgacggactgttcggtgtgccaccattgatccgcgctcatccccttcgaacagtattctcgtcatgctgaaagtgtttgcgcatccatgtgcgacggcttgcggcaagctcgcggctgtcgctcggacatctaccctgactccgtcaccccggccttgtgccggggtccagggctgggctgggcgacgtgcgacgcgcctcaagccgcatcgctcgttgacggctggaccccggaacaagtccggggtgacgaaggagtcgcctacatgttcaagtgatccaacgacgaaacaagttcaggaagacgatccgctctgcgttacgtaccctggcgcatgacggacccccttccctggcgctcgctggacgagctcggcggcgaagccggcgacctgctgcccgagctcgcgcgcgccgcgctcatcgatcggcggatggcgatgcggctgatgggggcgagcctggcgctcgccgcggcggggtgcgaccgcgcgcccaaaccgccgctccgctccgccccgcgcacgtcggtcgatcccgagcacctcgattacgcgacgacgctcgaccgcgaggggcacggcttcggcgtggtggtgcgcaccatcggcggacggccggtcaagatcgagggcaacccgcttcacccgctgagccgcggggcaagcgacgttgcgtgccaggccgaactcctgtcgctctacgaccccgaccgctcgcgcacgcccatccatcgcggtcgcgcggcgtcgtgggcggaggcgcggcgggccctttttccctggatcaccgacctacgcgcgcgacagggcgcggggctgcacgtcgtgctgcggccgagcgcgtcgccgaccctggagcgcatgctcgccgcggcgcgcgccgcgcttccaggcgcgcgctggtacggccaccgcgcgatcgaggcgcgactggacctacccccggtcggcgaggctgaggtgatcgtcagcctgggcgacccgttcctcgaccccggcgcgtttcaggtccgactcgcgcgcgactgggccgaggcgcgacggcgggcgctcgccgagggcaggtctccggcgcgcctcgtcgtcgtagagagcgtgccgacgctgaccggcgcgcgcgccgacgagcggatcgtgatgggacccgacgcgatgctcgcgctcagccgcgccgtcgccgcggagcgcgctggacgcgcgagcggcgacccgctcgccgctcgcctcgccgccgcgctcggcccgcggggactgctcctcgctgggcgcgaccagcctaccgagccgcgcgtgcccgcctggcgaggggtgatcaggggcgcaatggagctggaaccctttgcggcgtttgacggcgcggaggcggcggacgtgctgctgctgggggccaacccggcttatgacgcgccgcgaccggagcacgtcgccgcatcgctggcgcgggccggacgtacggttcacgtcgggtcggcgcaagacgagaccgcgcgcgcgtgcggctggcacctcccccaacgtcacgcgctcgagagctgggccgacttccgcgcgcccgacggccgtatcggcctcgcgcagccggtggtcgcccccgctcccggcgtgtcgatcacggagatgctggcgctgctcgcgggccaacgcccggatggccgcacgctcgtccgaacgacctggtcagggatcgctgacgagacgtggctccgcgcgctcgaggacggcgtgctgttcgatccggacgcaacgccggagccgccggtcgcgttcgccccaaatccaccgcccgcgctcggcgacctcgtcgtcctgttccgtcctgcggcgcatctcggcgacggcgcagcggcgaacaatgcctggttgcaggagctgcccgacccgatcaccaaattggtctggggcaacgccgcgacattgagccccacgaccgcccgcgcccacggccttgtcaacggcgacataatcgcgatcacctccgaggggcggacgatcgaggccccggtgtggatgctccccgggcaggccgacgatacggtggcgctgacgctcggctacggccgcaccgcggcggggcaggtcggcgacggggtcggttacgacgcgtaccgcctacgcaccgccgccaagccgtgggccgcgccctgcacgatccgcgcgaccgggcggcgcgagcggctgatctcgaccgaacgcgaccacgctgtccctgacgcccgcgcgcaccgccgcgtcgcccccggcgagcgcgccgagccgccacgcgccgcgccgccgacgctccatcccgaccgcaagccgcgcggaacgcgcgcctgggcgatgacgatcgacctcgacgcgtgcatcggctgcgccgcctgcacggtcgcctgccaggcggagaacaacatccccgcggtcggcgcggacgaggcggcgcgcgggcgcaccatgcactggcttcgcgtcgaccgcgcattctcagggacggcggaggcgcccgcgatctcgttccagcccgtcccctgcatgcactgcgagaccgcgccctgcgagcccgtctgccccgtcgaggcgacggtgcactccagcgaagggctcaaccagatggtatacgaccgctgcatcggcacgcggtcttgcgccaacaactgcccctacaaggtccgccgcttcaactggttcgactatcaggcgcaagcccccgccgcgcccgaggaggcgcagaacccgcgcgtccgcatccgcgagcgcggggtgatcgagaaatgcaccttctgcgtccagcggatcgaggcgtcgcgcgcgcccggcagcccgccgccggccaccgcctgccagcaggcgtgcccgacgcaggcgatccgcttcggcgacctaaacgacgccgtgagcgaagtcgcgcgcgaccggcaggacccgcgccactaccagttgctcggcgaattgaacctcaagccccgcaccacctatctcgcccgagtcgagccgggcgatggttgagcccgcgtccgtcgccgcggtcgcctcgccgccactccggcgccgcttcgggcgcgggtggcgctggggcctggcggcatcgatcgccggactgggcctccttctctacggcctgctcgcgcccgcgctggtcggcgtcggcctgtggggcaacaattcggcctacccctggggcttcgacatcgccaattacgtctggtgggtcggcgtcgccaacggcgcgagcctgttcgcctcgatcctggtcctccgcgaacacaatctgcgcaccgcgaccaaccgctttgcggaggcgacggcgctcgccacggtggccgcagcggcgctctttcccgtcatccatctcggacggccgtggctggccggttggatgttcccctacccgtcgacgacaggcttgtggccgcaattcatcagcgcgctgacctgggatttttgggcgatcctcgcgcacctgctcgtcaccgggctgttctggtacgtcgggctgatccccgacctagcgctgctccgcgatcgcgcgcgaacgatgcgcaccaagcgcatctacggccttctcgcgatcggctggcgcgggtcggcgcggcactgggcgctccagcagcgcgcgcaccggctggtcgccttgagcgtcattccgatgatcttcgtggtgcagagcgcggtcgccttcatgctcagcgcgatgatcgttcctgactggcacgacacccggctgccgctctcgcttaccgtcggcggcttcacgaccgggctggccgccaccctgctgctcgcccacgcgctgcgcgaaggcctcgacctccacgcgcacatcgacgacggcgacatccggctgctcggcatcctcgtcgcctcggccgggctctgcggcatgctgctgacgggcacggacctgtatctcagcctgctcggcgacgcgcccgatcgcgacgcctttctcgcgcgcgtcgccgggccgcgggcgtggctgccgatccttggtctcgccctgctgctgctcgcgcctcaggcgttgtggtgggaacgggtccggcgcagcgccttgctcgcgaccctcgtcgccacagcggtgctcgccggcgcgtggctggagcgggtgtcgatcgtcgcggacgggctgatccgcgatcggctgtggcagcaggatacgctttacatgccgacgctcagcgagtgggtgctgctgctcggcacgctcgcgatggtcgccttctggctgctgatcttcgcgcggaccttgccggtcgtgtcgatctacgaaagccgcgagcacgcggagcgggagaacctgccgtgagcgcggggctgctcgccgccttcgccgacgccgacgcgctgacccgcgcgatcctgcgattgcgcgacgttggctacaccgcgctcgacgcgttcaccccctaccccgtcgcagaggtctccgacgcgctcggcgaacgcggcgaccggatgccgtggatcgcaggcgtgtcgatgctgggcggcgcggcggtcatgctggcggtgcagtggtgggcgggcgcggcctacccgttggatgtcggcggccgctcgcccgtgccctggcccgcgttcgtttcgacaacggtgatcgtcgcgattctgtgggcggcgctgggcagcttcgtcgggctgctcctcgcgaccgggctgccgcggctccaccatccggtgttcgcggtcgaagggtttgagcgactctgggacgagcgcttcttcctgctggtcgaggcgcgcgacccgcgcttcgacgcggacgcaaccgcggcgctcctcgcagcgcttggcgcgacggggatcgacgccgcatgagagcgctttccctgctgctcgcgctcgcggcctgcgacgcggcgaccgagcgctcggtgtcgagcgacggagtgcgccacgcgcgtctcctgccgccgccccccggcgcggtcgcgcgaggcgcagcggctgtccgcgccgacctgaagcagccgcgcgcgctatccgccgccgtcggcgcaagcggctttcgcgacttctgcgccgcctgccacggcgccgagggacgcggcgacggcatcgtcatccgctacgggctcgcgcagccgcgcccgctccaggaggtcgaccgcagccccgcgcgcaccatcgcggtgatcacccgcggctatcgcaccatgctgccgatggcggggcagatcacccccgccgagcgctgggcgatcgccgcgcacgtcgcgcggctgccccgatgatcgccgtgatcctctcgctcgcgaccgcagcaacggtggcggcggggttcgcgttcgccgacgacgcgttgctcgccgcatggcgactcgcggtgacgctgaccgggggtatcgcggtcggcgcgctcgggctgctcgcgatcggacggctgctcgccaacgactggcatgacgcgatcaaggacgagctgctgccgatggcggcgaccgcgccgctcctcgcgatcctcgccgcgccgctgatcctggccgcgccggacacgcccgccgcgctgttcggcgaggcgctgacgcctgcgcgcgccgtgtggttccagccggaagcgcggcagtggcggctggcggtctgccttctcgcctggctcgtcgcgaccgtgctgctggtccgctcggagcggcacgcggccgcggcgatcgcgcttgcgctgacggtcgcgggggcgctggtcgcgacggtcgattgggtcatggtcgcgcagcctttgtggtggtcgaacctgctgcccttctgcgtctcggtgacccagctcggcggcgcgctggcgctcgcctatgtcgtcaatctcctccagcgcgagacgctggacgatgcgcccggacgcagccttgcatcgggactggtcgcgctggccctccttggtctgtgggtgtggtacgcgcagttcctgaccgcttggaacggcgacttgcccgcggaggcgcgctggtacgccgcccggatggggccgggcgcgccgctcctcgccgccgccgcggcagcgcaggcggcgggggcggcggtgctggtcgtgctgtcgcgcaagaagtggacgatgctcgccgccgcggcgctgatgctgttcgcctacgtcgcgcacgggctatggctgctgcggcctgcgcggatgaacccggcgacgccgcttgacctcgcggtgctggcgggcgtcacggcgctgtggctggcatggctcgcatgggccgcggcgctccacgaccgccgccgcgcgcgttaggctcgctgcgcgcgtccggcggggcgcaccagcgccgccacggcgcgcaagccgaccgcgaggaacaggaacagccccggcacccacatcaacagcccgcccaattgctgatcggcgagcggcgtcatcccccaggccgcggtcgtcagcaggtgcggcgcgaacaacggcgtgggcgcgagcgcgagcaccgcgcccagcagccccatcccgatcgacgccgccgcgcccgccaggagcgcgcgcccggcctgctcggcacgcgcgtggagcagcgtcgcccacagccacagcgcgctgccgaacagcgtcaggtgcatcgcccagtagagcgcatcgctcgcaaagctcgccgcatacggcgcaggcagatgccaaacccacaccgccagcgtgaacgccgccgccgcggcgagcgccccccgcgcccgcggcagcgcgctcgcaacgagcggcgcggcgacgagcagcaggatcatatgctgcgccacccgcgccgagaacaacgacaccgacagcgcgcacagcggcgacaccagcgccgccgcggtcaccgcccagccgcaagccgccgccgtcaccgggcgcctgctccgccgcaggacgacaaggtgaacccccgccgagagcgcaagcgcgaccagcagcaccgggtcgagattgaaccgcccagccagcgccccaggcagcggcggcgctccgcaataagggaaggtgatcaccggcgcgctcccgcttgttcgcgtggtgacgctttaaccgtgcgcgcccctggggtcgagaccggtcaggtcgaggcagtcgacgcaatccgatcagacagcaaaaaggccagcgccgtagcgctggccctatctggtgcgtacctgacgcttgttaaccgccagaccgcgatctctgaggtacctagattagccgactttctgcagtcgtcaagccgcgaaaacagctggcggtcgaggactccaatgtggatcattctccgcttgagcccggcggcgagtcgccgatggtggctggaaaatgggggaattcgcgtggttgactggcggctcggagtcgatctgggaaccaattcgctcggctgggcggccatcgggctgacgaagcggggcgatgatcttgagccgaccagcataatcgccgcgggctcgcgcatcttcagcgacggtcgcgatccgaagtccggcgcttcgctggcggtcgaccgccgcgacgcgcgtgcgatgcgccgccgccgcgaccgtttgcagcagcgccagcgcgcgctgatgaagtatctcgtcgacgacgacttgttcccggccgacgtggccgagcgcaagaagctggagacgctcgacccgttcgagctccgcgcccgcgcgctcgatgaagcgctgccgctgccgcatctcggccgtgcgatctggcacctgaaccagcgccgcgggttcaaatccaaccgcaagacagacaaacccgatgacgacgccggcaagatcaagaccggcgtcggccgcctgcgcgaacgcatggaggcggacggcgcgcgcaccttcggcgagtggctccacatgcgccgccggccgaccgaggatcaccccgacggcctctcggtccgcacccgcctgcgccccgagcagggcgaggacgcgaagggaacgggctacgatttctatcccggtcgcgacctcttggaggacgagttcaacgagatctggaacgcgcaggcaccgcaccatccggacgtgctcacgcccgaggtccatgaccgcctctacgagatcgtcttccaccagcgcccgctcaagcagccgcagatcggcacctgcaccttcggcaacggcgagccccgcttggccaaagcgcacccgctgttccagcgccgccgtctgctcgaggaggtcaacgcgctcaagatcgtccgcgcggggcaggtcgcagagcggctgacgcccgagcagcgcgacattctcgttctgaagctcaaggacaaggccaaggtcgccttcgcgagcctgcgcaaggcgcttcgcctcgacgaggacgcccggttcaacaaggagagcgagaaccggaccgatctgaaaggcgatgaggtcgccgcggttatgggcgcaaagactcgcttcgacacacgctggcagcacctgactcccgacgagcagtggaaggttgtctttggacttgaagcggtcgagagcgacgaccaactcaccgccttccgcacttgggtcgccgagttatatggcctcaccccggagcaggccgccgcggtctccaacgctcgtctgccccagggttacggccgcttcggtaaaaccgtgacccgcgggctcatcgacgcactcactcacgagcgcgacgcggacggacgggtgatcgtctacagcgaggcggtggagcggctcggactccatcacagcgatttccgcacaggcgagatccgcgacgaactgccctattacggtgaagttctcgaccgccacatcatgcccggcagcggagacgcctccgaaacggatatgatcaagcgtgtcggtcgcttgaccaatccgaccgtccacatcggcctcaaccagctccgccgcaccgtaaacgcgctcatcacgcgctacggcccgcccgccgagatcgcgatcgagctcgctcgcgaattgaagcttacggacgaggagaagaagaagcgcaatcgcgagaacaacgacaaccggcttgcggcggagaagcggtcacaaaagctgctcggggtcgacgaccggggcgagcagatcggttgcaagatcgccgacgataccggcgcgaaccgcgcgctgctgaaactctgggaggagctgaacccgggcaatatcgccgaccgccgctgcatctacaccggcaggcagatttcgatcgacatgctgttcaacggcgaggtcgaggtcgaccacatccttccgttcaccgcgacgctcgacgacagcaacgccaacaagatcgtatgtacgcgtgaggcgaaccgcttgaaacgcaaacgctcgccgttcgaagcctggggtcacaccgaggagtgggaggagatcgcctctcgagccgcccgcctgccgcgcaacaagcgctggcggtttgagcccgacgcaatgacgcagcagcaggaaaagggcgacttcctcgcgcggcagctcgtcgacacgcaatacctgtctcgcctcgctcgcgagtatctggcctcgctctacccggacaagggcgaaggcagcagcaacgtgtgggtctcgcccggccgcctgaccgaaatggtccgccgcaagctcgggctgaacgatctgctccccgaccacaatttcgcgggcggcgccgatcagccgaagaaccgcctcgaccatcgccaccacgccatcgacgcgatcgtcatcgccatcgtcgaccggtcgatgctccagaagatcgcgcgcgagtcgggcctcgaaggcgagacagggcgcgagcggatcaagattccggaaccttggcacggcttccgtaacggcgttgccgatgccgttcgcgcgattgtcgtcagtcaccgtcccgaccacggcaccgcaggtcacggcgccggctcgaccgcagggcgactccacaacgacaccgcttacggcctgaccggatcgactgatccgaaagggaacaccatcgtcgtccggcggaaaagcttcgagagtctcacgcctgccgacgttccatgcatccgcgacccggacctgcgcgccgcgctgcacgccgccatcaatggattggacggaaaggcgctggcgtccgcgctcgccgacttcaggcgcaagggccccgcccagttccgcggcgtccgccgcgtccgcgtgaccgagccgctcacggttattccgatccgcgaccgcgaaggccgtgtgtacaaaggctacaagggcgattccaactaccgatacgacatctgggagatgcccgacggcaaatggcgggccagtgtcgtctcaatgttcgacgcccaccagccaggtgagcagccccgcccgcatcctgccgctcgccgcatcatggggctacaccgcgacgacatgctcgcgatcgagcgcgacggcagtccgcgcgaactcgtgcgcatcgtcaagttttcggaaaagcagttcgccgtcgcgccaccgaacgagggcggcgcgctcaaagcgcgcgacgccgacaagagcgatccgttcaaatacacctatccgtcgccgaataccttgaaggcgtggcgtgcccgtaaggttggtatcgacgagatcggccaggtccgagaccccggctttggtgcccgcacccgtcgtcgccccacccgtccaaaagcggccgagtagcaggtggagcggatcgtcgacatcgccatcgacggccgtcacctgtccgcgcaccgcggctttctcatcgtcgccgagggccgggtggaggtcggccgcgttccgctcgacgatgtcgcggcggtgatcgtccacgcccatggcgtcacctggtcgaccaatctcgtcgtcgcgctcgccgagcgcggcgcgatcctgctgctgtgcggctccaatcactcgccggtcgcggtctgcctgccgctcgacggccaccatgcgcagaacggccggatgcgggcgcagtgggaggcgggcaggcccttgtccaagcagctttggcgccgcttcgtggtcgccaagatccgatggcaagcggcggcgctggccgcgaccggcaagccgcacttcgcctttgaacacctcgtccgccgggtcggctcgggcgatcccgacaatgtcgaggcgcaggccgcgcgccgctactggccgctgctgatgggccaagactttcgccgcgaccgcgacgctgccggagcaaacgcgctgctgaactacggctacgcgatcctgcgctcgctatgcgcccgcgcggtcgtcgcggcgggcttgcacccgtcgatcggcgtccaccacgccaatcgcggcaacccctttgcgctcgccgacgatgtgatcgagccgttccggccgctcgtcgatctgctcgcgctgcgcctgctcgccgagggcgcgaccggggtcacgccggaagcgaaacgcgccttcgcccggctgatcgcactcgatctggcgggcgaagcgggaacgacgacgctgaccaacgcggtcgcgcgagtcgcgcagacgctcgcgacctcgttccagaccggccgcgcggccgatctctggcttccggagccgccctcggcgctcgagatcgcggggatcggccagctcctggccgatccgtgaccgggactcagctgagcggctatcgcctgatgtggatcttcgtcatgttcgacctgccggtcaccacgagagagcaggcgcgcgcggcgacgaagtttcgcgaatatctgctcgacgagggcttcgagaagagccaattctcggtctacgcgcgtttctgcaacggcaaggaacatgtcgaggcgtacctcaggcgaatcgagtcgcacctgccggagaaaggcgatgtccacatcctcaccttcaccgaccgtcaatacgagaacatcgtccgcttctcgggccagaggcgaagaaggacgcgcaaaaacccggatcaactggcgctattctagtgattcgcggcgattcgggatggtgcagatgtgccgttatccgttgaggaccaacgggataacggcacatccgtcatagccgctcagagatcgcggtccaacggcaaccgcgagcgcgctggaggcggcgctgactgcgtcatagccgctcagagatcgcggtccaacggcaaccgaccggggcccacggtgatgcgggccggtgtcatagccgctcagagatcgcggtccaacggcaaccttgccgacgccgttgcgctcgcctgcgtcgtcatagccgctcagagatcgcggtccaacggcaactcgtcattcttgcggacgatgccgacgccggtcatagccgctcagagatcgcggtccaacggcaacggcggggagacggtgaaggcgtaggacccggtcatagccgctcagagatcgcggtccaacggcaaccgcggatcgcgagtgacgcccgcgggcgaggtcatagccgctcagagatcgcggtccaacggcaacccgccgccgatgcttccgagccgtcccgcggtcatagccgctcagagatcgcggtccaacggcaactcgccgatcgtgtcgatcgagccgatcccggtcatagccgctcagagatcgcggtccaacggcaacactccctcgggcgacggggcgacggcccaagtcatagccgctcagagatcgcggtccaacggcaacaaaggatgcgccggaccccacgccttctgcgtcatagccgctcagagatcgcggtccagcggcaactggcgacacctggtgcgacacgaccaacgtgtcatagccgctcagagatcgcggtccaacggcaaccgatgcgacgccgggtagctcgtttcggtggtcatagccgctcagagatcgcggtccaacggcaacgcacgtgattacgaggtcgccccggtttcggtcatagccgctcagagatcgcggtccaacggcaacctaccggttcgacgaggagaaggcgggccggtcatagccgctcagagatcgcggtccaacggcaacaacaaggtcgtcgtatccgctccctgctccgtcatagccgctcagagatcgcggtccaacggcaacccctgacgacgcccggtcgcgcggtgcgctgtcatagccgctcagagatcgcggtccaacggcaacagactgtgatcgcgctatctgcgacgccctgtcatagccgctcagagatcgcggtccaacggcaacctaccgtgaccgcatccctgcgatcgcggagtcatagccgctcagagatcgcggtccaacggcaacgagaacgcgacgacatgcgcgcccggtttggtcatagccgctcagagatcgcggtccaacggcaaccggctc

SEQ ID NO: 3096 - DNA, 14862 bp, synthetic construct
  source 1..14862: mol_type = other DNA
  misc_feature 1..14862: note = Synthetic
ataatcccacaccgaaagcccggcatccttggcggggcccgcggcgggctcccacatcgcctcgccccagaacaccgccagcgacgtggcctcgctctccagtccccagcgatggtcccagccgcgcagcaggccgatcggcccggccagcgccggatcgggcgcgcggtcataggcggcgaccaggccggggatcagccgcgcgaaggcggtgagatagggatcgtaagcggccgcgatcagcgtttcgggcgtgaaccgcgcctgcgcgttcagcacccgctcggcatgcggcccgcgcggattttcgcccacctgatccatgtagcggggataatccgccgccctggggctgtccttgccggcggccgtccacggccagttgttggtgttgaaggcccagccattcttcgggttcactgcctgcggcaggctggccaggctgtgcagccccttccagtcggtcgccggatcgctgccgtccacggggcggcgatagtcgaagcgatcgtcgcggaccggcacgaactggggatggagataggcgatgtccccatcggcgctcgcgaacagcgtgttgttggaggaattggccttgcgttcggccaccttcaggaagcccgcataatcgcgcgccttggtgcgcagatagctctgctccagcgccggcaccggccggttcatcagggcggtggcgatccatttgccgtccgcctcgcgcacgatcggcccgtgatgcgtggcataggtggtgaagctgcgctcggccatcgtcccgtccgccacgcgataggccagccggatcgtcctttcggcaacggggcgcagcgccttgccgtagcgataggcgagcccgccgtccggccggcgcacgatcgtctcggcgaactcgtcgacattgtcgatcccgctcgacgtgtgcatccagccgatccggtcgttgaacccctgatagatgaagaactggccccaggtggccgcgccataggcgttcagcccctcgccgctcttcacctgctgctcggcgcggaagaagaagctggtgtgcgggttgatcagcagcagcgcgtggccgtccttcgtgtggccgggcgcgatggcgatgccgttcgatccttgcggctcgcgatagaggaggcccttctcgtcggccgtcatggcgatctgcttcctgccgtaaaaggcttcgagctggctcagcggcacccgctccacatcgccgccgatgctgccttcggtgaagctcagcgccatccacggctcgaaacggcggatcacgcgggggcggacatcgggatgggtggcgagataatggttgaggccatccgcccaggcctgcatcagcgccttcagccattgcgggctgcgcgcataatcggccttcagccgttcgggatcgacgaacaggcgctggcgcagatcctgccagatcgccttttcgccctcggcttccgccagccggccgagattgaccagatagttggtctcgatccggttgaagtcgtcctcggcctgggcatagatcatgccgaacacggcgtccgcatcggtcttgccgtcgatatgggcgatcccccaatcgtcgcgggtgatggtgacattgccgatatgcgcggcgggatcggccagggccgatgcggcgaaaccgaaagcgagcaggggaaaggcaaggcggcgggcggagcggacgatggcaggcatgcccgtccgctagaacgcgcggcgcctcatcgcaatggcgcgcgaccggggatggggcagccgcaccccccatcccattcgcctcgggctgccggtcagcggcttccggttcgatcggcaaccagcgcgatcgcctgatcgaccagctgggcgatgcgcgccgggggaagcgggcgtcgcaggatggcgacatggtaggtcacgctgccgatcagcgtgtggcaggcgaattcgatgtccgccagcgcggcggccggggccagccgccggaactcgcggatgtagaaggtccgttcctgatcggcatgccggccgatcgccgccgccagatcgggcaggtgcgcgatcgtgaagcccagcttcaggatcgcctggccccgctcgcccgaaagatagtcggcggctgcgctggcatggccgatcaggatattgcggggggattcgccggcggcgaaacccggttcgatcgctcgcgaggtttcgtgcaggatcgccgtgatcagctcgtccttggaagcgaagcgccgatagagggtggcgcggctgcacccggccagctcggcgatcgcctcgaaggtcagcccctcatagcccttgtcggccaggacgcgccatgccgcgtcccggatcgtcgcatccttctgcgtgtcgcgcggccggccgcggccgcgcgtgatgcctgcatccattatttcgctcgccatttccgtgcagctttcgtgcagcaaatctgtcatagaataacgatacacgcccgtctcgtaaatggtccatggagatcgggtcgtgcgcaagttccttttttcttccagcctgttgatattggcggcggcgcaggctcacgccgcgccggaagcagctcccgccccggatgcgatgggcggcgacatcatcgtcaccgcgcagaagcgcgaacagcgaatcaccgatgttcccatgtcgatcagcgcttacggctccggcttcctcgaccagatcggcggcaccgagctttccaagatatcggccatcacccccggcttcgtcatccagttgcaggacaagttcgcccccggcttctccgtgcgcggcatcacctccaacgaattctccccccaggcggaacagcgcgtcgccgtgttccaggatggcgtcgcggtggtgcagaccgcctcggcctatggcgagctgttcgacatcgaccgcgtcgaggtggagaaggggccgcaatccaccctccacggtcgctccgcgctcaacggcggcgtctcgatcttccagaagcggccgaccgacgatctctcggtcgagctcaaggccggcggcggcaattatgattattacagcctgcagggcgtggtgaacctgccggtcagcgacacgctcggcatccgtttcggcgcgctcaagcgcaagcgcgacggcttcgtcaaggacagcgacggccgcggcacctacaacgcgctcgacgcccaggcctatcgcttcgcgggcaagtgggaaccgaccagcgatttcagcttcaacctgatcgccacctatgacgtggacgacaccaagggcggcgttcccttcaagtcgcgcaccttcctgccgctcgatcaggcgaccggcgcggtggtcggcgatcttcgcttctggacgcccacccacctcgataccttcggcaccttgccctcgccttatttccatcgcgagatcgtcggcatcagcggcacggcggactggcgcctgaacgatcgcctcagcttcacctcgatcagcggctatcgctggttcgatgcctgccagtcgggcgataatgacggcacgccgaccaacctgatcgcctatcatcagtgcaacgacggcaagcaatattcggaggagctgcgcctcaacttcaaggatgtcggcatcttcgaaggcttcatcggcggcagcgtgttccatgccaataacggcatgagcatggagatgggatatgacgagcgtgcgatggcgctgctgctgggcggcaccttgcagaatctcgccccgcgcggcctcaccaatgcggagatcaacgccctgctcgggccggccgccaatgtgctgaaggcgttccagctcgatcagcagatcaccggcgccaagatcaccacctacgatatcttcgcggatgtgaccgcccacctcaccgaccggctggaattgttcgccggcgcgcgcgcgacgtgggacaagaaggatctcaccctccagggcctcaccccgctcgggccgtccagcctcaccggcggcggcctgctgctccagcccacgcccggcaacgcggtgctgaccggcagcaacagctccagcaacgtcaccggccgcgcgggcctgcgcttcaagctgacgccggacgtcaatctctacgcggtctacggcattggcaagcggccggaggtgctgcagctcaaccccaccacgccggcgcaactgatccccacggagacgctgaaatcggcggaggcgggcgtcaagttccgcctgctgggcggccgcctggtcggcgatgcctcggtctatcattatgaatatgagaatttccagacgctgggcctgaaggacggcatcgtcgccacggtgaatgccggcaaggcggacgccaccggcttcgaggcgcagctgagctacgagctcacccccggcatctcggtcttcggcagctacggctataaccatgcccgcttccgcgccggcctttatgacggcaacatgttccgcaacagccccgatcacaagttcgcgatcggcggcaatttcgaggcgccgttgaagggcggcacggtcgccttcgcgccgctctacagctggcagtccaagatgttcttcttcgaggataatgaccggctcgatctgcagcagcgcgtgccggcggcctattccgatcgcgttgtcgatgaattccagaacggctacggcctgttgagcgcgcggatcaccttcaccccgcgcgacaagaaatggtccttcgcgctggtcggcgacaacctcaccgacaagaagttcctcgtcgatgccggcaataccggcgattatttcggcatccccaccttcatcgccggatcgcgccgcacctatcgcgccgaattcggcgtcaccttctgatttccctgcaaggagaaagcatgatgtcccgatatatgcgcctgttccgcggctgcgccctgatcgccaccgtgctggcgacggcgccgctcgccgccaaggatggcagcttcaccatcgcggtgatccccgacacgcagaattatgtcgattacacgcaccagaccgccgagggctttcccttcgacgcgcgcgacatgttcatgcagcagctgcaatatgtcgccgacaatgtggagagcgcgggcggcgacatcgccttcgtgacggcgctgggcgacgtgtggcagcaccagacgatcgccatggaccccgatcatgccaagcgcggtttcaagcgggcggctaatcccatgctcgacgcccatttcgcgccgaccgagaaggtgaagtcggtggagatgcccgccgcgcgctcgggctatatgctgctcgccggcaaggttcccttctccgtcgtgccgggcaatcatgattatgacgcgatgtggacggactccaaattcccgccggccgcgaagttcgatcccaaggacatggcgtcgctcggcatgctccatcccggcgggctcaacaatttccgcagcgtgttcggcgatcagtcccccttcttcaagggccagccctggtatgtcgcctcgcatgacggcggggcggacagcgcccagatcttcaccgccggcggctacaggttccttcacatcggcctgcagttcgatgcccccaacgcctcgctggaatgggcggcctcgatcgtgaagaaatatcccggcctgccgacgatcgtgacgatgcacgattatatggacaaggaagcgcaccgcatccccaacccgatgatcgacggccatgccgccgatccgcaggacaacagcccccagatgatctgggacaagttcatcagccggcacgaccagatattcctggtgctgtgcggccacgaacatggccaggcggtgcgcaccgacaccaacagcttcggccacaaggtgcaccaggtgctcgccgactatcaggatcgcggccagaccgccaaggatgcgggcgtgaaatccgaatggccggtggggatcggcgacggctggctgcggctgatgaccttcgacatggccgcccccgtgccgaccatcaaggtccgcacctattccacccactataagagcctgagcgtcgatacggccgactatgccgcctggtacaagcagcaggaaaagccgcagctcagcgacgccgatttccacggcgaggacgatttctcgctggaactgacggacttccgccagcgattcgcgggagaaacacaaaccgtgcgctgagggcgtcgcctcgatcccgccatcgcccggtccggggcgatggcgggatggggcttgcatatcatttcgtgcaaacaatgttggtacattgtcatcaaaattgccgaagtttaaggagaataatgagacaaagaatatgttaactgattcagaatcatcttttccggtatggaagatggggattcgaccgaaatattcattgcgcgctggcggggcggtgaaggtggggcggagcgggcgaactacgccatgttcctcgtggaacttgtcgacctgctggagctgccgcaccctgatccggccggagcaacgcatgaaaataacgactatgtattcgaacgcgcggttcgtgatgccgacgccgaaggcaacatccgcaccggccggatagacttgtatcgccggggctgtttcgtgctggaggcgaagcagagccgttggcgggatcagggcaaggaaatatcgctgccggctgaaaagccgcaatcgcccggctttgccgagcccgagcttctcggccgcaggagcgcgcgccgcgactgggatgtgctgatgcgcaatgctcgcgaccaggccgagcgctatgcccgcgcgctcgatatcgagcatggctggccaccctttctcatcgtctgcgacgtcggccattgcctggagctgtatgccgacttttccggccagggtaagaattaccgccagttccccgatcgaaccggtttccgcatctatctggaggatctgagggacgccaaggttcgcgatctgctgcgcgcgatctggctcgatccccagggcctcgatcccgcccgtcgttccgccgccgtcacccgcgatattgccgggcggcttgcgacggtgagcaaatcgctggaagggcgcggccaccagccggagaaggtggcccatttcctgatgcgctgcctgttcacgatgttctccgaggatgtcgggctgctcgatcgcggcagctttaccgagatgctcgccgatgcgcgcgacaatcccgaggcctttgcgccgatgcttgaggatctgtggcggacgatgaacacgggcggcatatctccggtgctccgtcgcaaggtgcgctatttcaacggcaatctttttgccaacgcggccgccattcccctgcgccgggaggagattggcgaattatacgaggccgcccgccatctgtggaccgaggtggagccggccattttcggcacgctgctcgaacaggcgctccatcgcgacgagcgtcgtcagctcggcgcccattatacgccgcgcgcttatgtcgagcggctggtggtggccaccgtcatcgcgccgctgcgcgaggagtgggaggcgctggtgctcggcacggtcgagcgcctgcgcctggacaagcccggcgaggcgatcgccctcgtccgcgacttccacgcccgcctcgccgccacccggatactggatccggcctgcggcaccggcaacttcctctatgtcgcgctggaactgatgaagcagctggagggcgaggtcctggaaacgctcgccgcgctcggcgggcaggaggctctcgcgctcgaaacgatgagtgtcgatccccgcaatttcctggggctggaggtcaatccgcgcgctgccgccatcgccgaactggtgctttggctgggctacctgcaatggcatctgcgcaatggcggcggcatctccgatccggtgctccagagtttcggcaatatccgcacgatggatgcggtgctggcgcatgatcccgaacgccccaatgccgatcgcaccgggacggaacgccccaatccccggcggccggattggccggaggccgattacatcatcggcaatccgccctttatcggcggcaaggacctgcgcgcgcggttgccgcaaggttatgccgaggccttgtggaaggcgcatccgcatatcaacaaatccgccgatttcgtgatgtattggtgggatcgcgcggcggcgctgctggcggccaggggttcccgcctcaagcggttcggcttcgtcaccaccaattccgtcacccaggaattcagccgccgcgtcatggcgaagcggctggacgggccatcgccgctccatctggaaatggccgttcccgatcatccctggaccagggcgacgcccgattccgccgctgtccgcatcgccatgacggtggtggcgccaggcgaaggggagggcgtgctctacgaggtcgcgagcgaagccgggctcgacagcgatcagccgcgcatcgccttcatggaagcgcgcgggcggattcatccggatctgacggtgggggcggatgtcacgctcacgcgcccgctgcgcgccaatgcggggctaagttcgccgggcatgaagttgcatggcgcgggcttcatcgtcacgccagccgagggggaatatctcggccttggtcggcgcgaggggctggatcggcatatccgcccctatcgcaacggtcgcgatctcaccgcgcgggcgcgcggcgcgatggtaatggatttcttcggtctcgaggaaggggatgtccgccggcgctttccggaagcctatggccacctccttcgcacggtgaagcctgagcgcgatcgaaacaaccgggctacgtatcgcgataattggtgggccttcggagagccgcgccgtgaactgcgtcctgcgcttgaggggctgttgcgctatatcgccactgtggagacggcgaagcatcgcgttttccagtttctggatgcggaaatccttccggataacaagttgctctccatcgcccttgatgatgcctacatcctcgggattctgtcgtcgtcgtatcatatagcctggtcgcttcgcgcgggtggttggctgggtgttggcaatgactcggtgtatgtgaagagcagggtcttcgatcctttccccttcccggaagccgatcgggcgagccgcaaggcaatcgccgacctcgcggaggaactggatgccacccgcaaggccgtgctggccgagcatggggatctcaccctgaccggcctttacaatctgcgcgacaggatcgttgcaggcgggacgctgaacgcggccgaggaggggcagcgcatacgcggccgggtggatatcatcgccgaactgcatgcccggctcgatctggccgtgacggccgcttatggatggccggccacattgtccgacgaagaagtcgtcgcccgcctcgtcgcgctcaatgcggagcgcgcgcgggaggagcagtccggccgcgtgcgctggctccggccagaatatcagcttgcccgcagcggcgtggaaatgctcgcgcccaagcccgcggccgtgcagatcgaggcggagttggctgccgcggcggctggcaagccccccttcccgcgcgatgcgatcgggcagacggcggcggtgctggagagcctgcgcgatggccgcgcctggagcgccaccgaccttgccagccgctacgcccagggccggaaggcggtgccccgcatcgaggcgaccctcgccgcactggcgcgcctgggccatgtcgccgtggagcagggcggctatcggttacgcagggtggcataatcggggtgggctgtggtgcggacgaccctggagagagcggcacgtgcgttacgcagggtggcataatcggggtgggctgtggttggatcgcgatctctgaacgtccttgcagggcgttaaaaaggcggcgccgcagcgccgcctttatctggtgcggactagctgcttgttagccgccagaccacgatctctgaagatttgtgaataagcctgcctattagtgcggtcaagagtattttcagaagtgaggtataaaattcataacgcctcacgatcatgtcttgaatcatgccgaatctcctgctgtcatttcaagttcaggggaattgcatatgaaatggcgcttgggtggggatctcggaaccaattcgttcggctgggcggcgatcggcctcgatgaggagggtaagccttgcaccatcctcgctgccggttctcgcatctttagcgacggccgcgatcccaaatccggcgcctcgctcgcggttgatcgccgtgacgcgcgtgccatgcgtcgtcgtcgcgatcgtttcaagcagcggcagcgggctctgcttgaccatctcacccgtgacgggttgttcccggcggatatcgcggggcgcaagacgctggaaaggctggaccccttcgaactgcgcgcccgcgcgctcgatgaggcactgccgctccaccatatcggtcgcgccttcttccatctcaaccagcggcgcggcttcaagtccaatcgcaagaccgatcgccgggcggatgacgatgccggcaagatcgcgatcggcatcgatcgcctgcgcgacgccatcgttgaaagcggcgcgcgcacttttggggaatttctccaccgccgccgcgccgcggcgagcgatcccaatgcgatccctagcgtccgcgcgcgcctgcgccccgaaaccggcgagggcgcgaagggcgatggctatgatttttatcccggccgcaccctgatcgagcatgagttccgggagatatgggatgcgcaggcgccgcatcatcccgatatcctgacgcgggatgtctataagcgtttgttcgagatcgtctttcaccagcgcccgctcaaggccccccaagtcggcacctgcacgctggttccgggcgagaagcggctgcccaaggcccacccgctattccagcgccgtcgcctgctggaagaactgaacgcgctgatgatcgtccgccccggcgaaaaggccgaacggctgacgcgcgaggagcgcgatctcctgcttctcaagctgaaggacaagggcaaggtcgctttcgccagcctgcgcaagctgctgaagctcgatcccgacgcgcgcttcaacaaggaaagcgagaaccgcactgatctaaagggggatgaggtcgccgcgctgatgggggcgaaagcccgtttcggcaatctctgggcgcatctttcggccgaggcgcaatgggaggtcgtcgaacggctgggcgccgttgaaagcgacgaggatgatcgcgttttccgcgaatggctcatcgccgctcacggcctttcccccgatcaggcaaaggctgtcgccgccgcgcatctgccgcagggctatggccggttcggcctcaccgccactacaaggctgatcgacgcacttcgcgatgcagcgaacgtcgacggccgcgtcatcgtctatagcgaggcggtagagcgggccggccttggccatcacagcgatttccgcaccggcgcagtgcatgtggaactgccttattatggcgccgtgctggaacggcacatcatgccgggcaccggcgagccttcggacccggaggagatgcgcatcggccggctgaccaacccgaccgtgcatatcggcctcaaccagcttcgccgcgtcgtcaatcggctgatccgcatctatggcccgcccgccgagatcgcgatcgaactggcgcgtgacctgaagctcaccgatgacgacaagaagcggctgaaccgcgagaataacgagaaccgcctggccgccgaacgccgatcggagaagctgatggcgataggccagccggataccggcgccaatcgcgcgctgctgaggctgtgggaggagttgaaccccggcaatgtcctcgatcggcgctgtgtctataccggccagcagatatcgatcgagatgctcttttccggcgcggtcgatatcgatcacatcttgcccttctcggacacgctggatgacagcaacgccaacaagatcgtctgcatgcgcgaggcgaaccgggccaagcgcaagcgatcgccctacgaggcgtgggggcatatgccgcagtgggaggagatcgccgcccgggcggcgcagcttccccgcaacaagcgctggcgtttcgaaccggacgccatggagcgcttcagggacggcggaggctttctggcccggcatctcgtggatacccagtatcttgcccgcctcgcccgtgaatatctcgcatcgctctatcccgaaaccggcgagggcagcggccatatatgggtttcacccggccggttgaccgagatggtccgccgcaagttgggcctcaacgatctgctgccggatcataattatgccggcggcgatcaggccaagaaccggctcgatcaccgtcatcatgcgatcgatgcggtggtggtggcgatcgtcgatcgcgcgatgctgcagaagatcgcgcgcgcatcgggccaggagggcgccgagggccgcgaacgcatcatcatcccggagccgtggcaagggtttcgcgatgatctccgcatcgcgattaatagcatcatcgtcagccaccgtgcggatcacggaactgccgccaaagccggcctcgccaaggggctcgatgccaccgccggccggctccacaacgatatcgcttatggcctgaccggtgagagggatgcgcgcggcaacaatatcgtcgtccatcgcgtgccgctcggtagcctgaagaagccggcggatatcgatcgcgtgcgcgatcccgagctcagggttgcgctcggcgacttcgcccgtgggttggagggtaagctattcgagcgggcgatccacgaattctcgacgcgcgggcctctgcccttccgtggcatccgccgcgtgcgtgtggtcgaaccgctcacagtcattccaatccgggatcgcgaagggcgtatatacaaaggttataagggtgactccaactatcgctatgatgtgtgggaactgcctgacggcaaatgggtaacgaactggaaagacaaagacggtaatagtctttccagcattgtttcgatgttcgatgcccatcagtctcagggtcagccccgtccgcaccccgccgcgcgcaaggtgctgagcctgcaccagaatgatttgctggcgatcgaacgcgaaggtgaggaacgcaaactgatgcgtgtcgtgaaattcggccagaacggccagatcacgctggccgagccacagcaggcgggcgacctcaagcggcgcgatgcgatgccgaacgatcaggaccccttcaaatatttcgcgcctacctgcggcgggctcaagcgggcgcgggcgcggcaagttcgtgtcgacgaactgggccgcatcgtcgatcccggcttcccggcccgcacggcacggcgacggactcgcggctgaagcggaaagggcggtggcgtggagcgtatcgtggatatcgccaccgatggccggcatctttcggcctatcgcggtttcctgatcgtatccgaggatcgcgaggaggtcggccgtgtgccgctcgacgatgtcgcggcggtggtcgtccacgcccatggcgtcacctggtcgaccaacctcgtcgtagcattggcggaacgcggcgcgattctgctgctgtgcggttcgaaccacgcgccggtggcggtgtgtctgccgctcgaagggcatcacgcccagaacggccggatgcgggcgcaatgggaagcgggcaggccgctcgccaagcagctctggcgccgtctggtcgtcgccaagatcggctggcaggcggcggtgctcaccgcgaacggcaagccggcgtccgccttcgatctgcttgcccgccgtgtagggtcgggcgaccccgaaaatgtcgaggcgcaggcggcgcggcgctactggccgctgttgatgggggaggatttccgccgcgatcgcgatgctggcggcgtcaacgcgatgctcaactacggctatgcgatcctgcgctcgatgtgcgcgcgggcggtggtcgccgcggggcttcacccgtcgatcggtgtgcaccatgccaatcgcggcaaccccttcgcgctcgcggatgatttgatcgagccgttccgcccgcttgccgatgcactcaccatccgccttctcgcgcagggcattgatagcgtcacgccggcagccaagcgcgctttcgccggcatgatcgctctcgatcttcccggcgaaaacggcattaccaccgtttccggcgccgccacccgcgccgcgcagacgctagcggcctgcttccagaacgggcgcgccgcggatctcattctcccgccgccaccctcggcatccgagctcgccgggctcgatctgctgcttgcgtgaagcgatggcgacgcagctcagcggctatcggctgatgtggatatttgtgatgttcgatctgccggtgatgacccgcgaacaatcgcgcgccgccaccaagttccgcgaattcctgctggacgaaggcttcgaaaagagccagttttccgtctatgcgcgcttctgcaacggcaaggaacagttcgaagcctatatgcggcggatcgaatcgcatttgccggaaaagggcgatatccacatattgtccttcaccgaccggcaatatgaaaacatcgtccgcttctccggccaacgccgccgacgccagcgcaaaaatcccgaccaactcgcattattctgacgattccgggtatttctgtccattcaggacggtggttatcccgtttccaatcaacgagataaccacacatccaagaatagcgcttcagagatcgcggtccagcggcaactccaacgagcgtctcgcgtcggcaccgcgcaagaatagcgcttcagagatcgcggtccagcggcaacccgtccaggcgaattgacggtggagctggtaagaatagcgcttcagagatcgcggtccagcggcaacttgtcgcccaacgcttctctccttcctgccaagaatagcgcttcagagatcg

SEQ ID NO: 3097 - DNA, 13529 bp, synthetic construct
  source 1..13529: mol_type = other DNA
  misc_feature 1..13529: note = Synthetic
ccttcctcctgccggtgcgcgtcctcggcatgctgttccggcgcttgttcctcgaagggctcaccgagttgcaccgcgcgggcaagctcaggttctatggcgcgcgcgccagattgaaggacccgcgcctgttccagcgccatctcgcgccgatccgcaggacgcgctgggtcgtgtatgccaagccgccctttgctggccccgaggccgtgctcgcctatctcgcccgctacacccatcgcgtcgcgatctcgaaccgccgcctcatcgcccatgacgggaacggcgtcacattccgctataaggattaccgtcgtgaaggtgcggcccggcagcaggtgatgacacttgccaccgacgagttcatccgccgcttcctgctgcacaccctgccgcgcggattccatcgcatccgtcactatgggctgctggcgagctcagcgcgcaaggaatgccttgcccgcgcacgagagttgctcgccgaggcgccgaagccggaaacgaccatcaaggctgaggctatcgagcctgacgcccccgaccaccgcccgccttgcccctgctgcggtggccgcatgagcatcatcgagctcgtcacccgttcccaccgatcgcgaggaccgcccgatcagggagcacaggaccgggagcacgcgccatgacccggcatggattgaatgaacgatacgccaaagcaccatgcttttggctacgtgaggctcatgtcgcccattctgctgaccaggcagaaagcggcagcatcagcaccaatcaagagcgctacacagcccgtgaagggctgaaaatccagcggcttgggcgcaatatgagccaaccggctgtcggcccgagagacgcagaccagaccgaagtcatcaaatccccataagccggagaggcggaccgcgggttcgttcctcggggactttcgtacgcttgccagcgcccgaaactcttcacgattgcggaaaggacggtttcaggaaaattcggacgcaagcaggaatgcccaaaacaaaaaaggcgacgccggagcgccgcccttatctggtgcagactggctgcttgttaaccgccagaccacgatctctgaaggcttgatggtagcacttcggagatcgcggtcaagggacgggacggagcggcaagctgcgccagtttcgaagagcgcgaggcccttcagagatcgaggtccggagacaactaaccaccgctcagggggatgcattttcctgatcagcaattggacaccgagcgctgcagtgcccgattaagtcagcaaattcttatggaaggaatcgccgatatttcgatcatactcgctcactcgaaaaattcaattccctaaccaccgctaatttttttctaattgacatcgtcgatttttggagtctaaattcctacaagaccacaatcggacgctcccatttgcaaagggacgaccatgctcagaccccgttttcgctaccgcctcggcctcgatttgggcaccaattctctgggctggtgtgcgctcaagctcgatggaaacaacataccatacggcatcctcgccactggctcgcgtattttcagcgacgggcgcgaccccaagtccggtgcttcactggcgaatgaccgcagagatgcccgcgccatgcggcgtcggcgcgaccgcttcctacggcggcgcacggccctcatcaaacacctcacactggcgggattttttcctgaaaccgagcacggacgcaaggcgctccaatcgctggatcccttcgccctacgcgcccgcgcgctggatgagaaactgaacccgcatgagatcgggcgcgccttctttcacctcaaccagcggcgcggcttcaaatccaaccgcaaggcggacaagaaagacggtgaggatggcaagatcgccatcggcattgaccggcttcgcgccgccatcgaggagaacggcgcgcgcaccttcggcgagttcctgcacaagcgccgcgcgggtgcagggagccagagcgcaatcccggcggtccgcacgcggctgcgcgaggaaagcggtgagggcgcgaagggcgatggctatgatttctacccctcccgcgcgctgctggaggaggaattcaccgatatctgggaggcacaggctccgcattacccagaggtgatgacggaagaagtctacaagcgcctcttcgaggtggtgttccaccaacgcccgctcagggccccgaaaatcggccaatgcacgttgctggacggcgaacgcctgcccagggcgcatccactgttccagaaacgccgcctgctggaagaactcaacgcgctgcgcattgtccgcaccgggcaggtggccgaaccgctcaccaaggagcagcgtgatctgctgtttctgaagctgaaggatcagcgcaaatccgccttcaccgctctgcgtaaagagctgaagctggagcggacggcgcgcttcaacaaggaaagcgaaaaccggaaagacctcgcgggggatgaagttgccgccgaaatgggcgccaaaacccgcttcgccaatcgctgggcgcatttttcgtggcggcagcaatgggagattgtctcccgcgtccgcgcagtggagagcgaaaaggacgaagcggcgtgcctgaactggctgatgaccaccttcgcgcttgaggaggagcgggcgaaagccgtcctgagcgcgcatctgccgcagggctacgggcgcttcgggctggaagccaccgagcggttgatcgaggcgctggaggcggaggtcatcacctacgacaaggcggtggttgccgcaggccttggccaccactcggatttccgccccggattggtgttcgaggatgcgcaaggcaaccccgccctgccctattacggcgtgacactggagcgtcacatcacgcccggaaccgccgatcccaacgacaacggcgaggccagtcgcgtggggcgcatcaccaaccccacggtgcatattggcctcaaccagttgcgccgccttgtcaatgcgctgatccgcgcctatggcccacctgcagaaatcgcgcttgagctggcgcgcgagctgaagctctcggaagacgagaagaaagaagtcaacgcgcgcaacaccaagaaccggcgagaggccgagaaacgctcggaaaagctgagggagatcgggcaggcggacaacggcgccaatcgcgcgctgctgaagctgtgggaggaactcaacccggagaacgttctagatcgccgatgtgtctacacgggccaacaaatttccatcgagatgctgttctcccccggcgtagagatcgaccacatcctgccctttgacgccacgctggacgattccaacgccaacaagatcgtctgcctgcgagaagccaaccgtcttaaacgcaagcgctcaccctacgaggcatggggacataccgcggaatgggaggagattgccgcccgggcatccaggctgccgcgtgagaagcgctggcgcttcgagccggtgaccgcaccggtcaccacccgccgcaccctggtgttcgcgccgggcggctgaggcgcagggcggtagcgccgggccacgcccggcagttcttcatggcaaggcccggcgcgtccgggccttgttcgcttttcagccggtgccatcgatcagccgctgcagggccgggtcgcgcgccgccagcacctggaacagccccagcgcatgcagcgcgggcagcagggcgcgcaggtcggcttcggccacggcacgggtagccgcatcgcgggccggatcctgccagtcgcgcacgctggcaaggaaggcaccgacactgcccttgcgcacggtcacgccgttcacctgcacgtcgttctggtggtcgggaaggatgtcctgcggctgcatggtgaggctctcctctggagggaaagcccagtgtcggcgcatgccgccgacggttctgccgtataactgccaatcaatatggcataccagacatctcctaccctgatcgaccccgcgctggccgatgacgcccccggaccggcggtgctggcggcacagctgcgcctgcccggaccccgccgcacggcccgccaccggcacgcccgtgggcagttgctgggcgcgcaccagggcctgctgcggatcgaggccggcgagctgcactggctgctgccggcgggtcacatggcgtggataccaccctcactgccccacgcgctggccagcaccgcggctttcgatggctggagcctgtacttcggtgccggtgcctgcgccgggctgcccgcgacgccacgcatcttccagcccggcctgctgctgcaggcggccgtgacgcgggcactgcagtggccgcaacgtgcactggatgccacgcaatcgcgcctggccggggtgatcagcgatgagatcgccgccagcacgccattgccgctggccctgccgcagccccgcgatcgccgcctgcgccggatcgcagccgccctggcgcgtgccccgcatgacacccgcagcgtcgcggactgggcaggcgccagcggcctgtccagccgcagcctcgcccgccgttggcaggccgaaacccacatgacgctgagccagtggcggcaacgcctgcgcgtgctgctgtcgctgccacgcctgctggcgggtgagcccgtgatcaatgttgcgctgtcgatgggctacgacacgcccagcgccttcatcaccgtgttcaagcgcgagatgggggtgacgccggcgcggtatgccggtggctgaggaaaatcaccgctgtcgttgcgcctgcggcatccgccgggcatggcccggcgctcccccggtcaaccggagatcgccaggcgctcgttgtggtagcggcgcacggcggcgaaccacagcagcgcggccaggcccaggctggcgcccaggtagatcgcccagatcgtcggtgtgatcgcctcgtggcggatcaccttcagcagcatctggttctgcgacaggaacggcacggcgtactgccacggctcgctcttgagcgggtaggccaccagcgcgtagccgggcagcatcggcagcagcatcagccaggtcatgtggctctgcgcctccttcatgctcttggccgctgccgacaggaaggtcagcagcgaggtgccgatcagcagcatcggcagcatcaccagcagcatccgcagcatcgagccgacgttcatgttgaactggcggccgatgttgcccggcgcgatctgcgcgctgaccttgaacgcgaccagggtcagcagcagcgacacgaagccgaccacgcaggcggcggcgatcttgccgctgacgatggcgctgcgcgagccgggcgtggccagcaggggctccagcgactgccgctcgcgctcgccggcagtggcatccatcaccaggtaggcgccaccgatgaacgaggtcagcgtcagcagcaccggcagcagcagcgacaggatcatgccgcgcttggcctcggcgctggccaggtcctgccgggccacgtccagcggccgcgcgacctgggcatcgatgccacgggccatcaggcgcaaggcaccgacctggccgttgtaggccgccagcgccacctccagccgtgcgctgggcacttcggcggcgcgccgggtgctgtccttgatcacctccaccagcgcgggcttgccggcggcccagtcctcgccgaagccgtcgctgatgcgcaatgccacgtcgatgtcctgggcgcggatcgccccggccaggtccttcggtgccgcggtggcattgaggccctgcgcggccaggaaacgcaccaggttgggcgcgttgtccgcgccgatggtcgggatctgcagcggctgctcgatctgggtgcgcacgcggctctcggccagcttgcccatgcccagcagcagcaccgggtacagcagcggcccgaacagcaacgtcagcagcagcgtgcggcggtcacgggaaaggtcgcgcagttccttgcgcatcaccgtcaccagggtcgacatcatgctcatgcgtgcaggccctcttcactgccgatcagtttcacgaatgcgtcttccaggttggcctcgcccgcctgcgcgcgcagttcatcggcactgccggcagccgtcacggtgcccttggcgatgatcacgatgtggtcgcacagcgcggccacctcctgcatgatgtggctggacaggatcacgcagcgtccttcctcgcgcaggcccagcaggaagcggcgcagcgcgcgggtggtcatcacgtccaggccgttggtcggctcgtccaggatcacgttgcgcgggtcgtggaccagggcgcgggcgatcgcggtcttggtccgctggccctgggagaagccctcggtctgccggtccaggatgtcgtccatgtccagcgccgccgacagggtggcgatgcgcgcggcggtgcgctgcggcgacaggccgtgcaggcgggcgaagtaggcgatgttctcgcgcgcggtcaggcgcttgtagacgccgcgcgcatccggcagcacgcccagcgcgcggcgcaccgcgaccgggtccttggccgtgtccacgccgtccacctcgatgctgccgcggtcgggcttcatcagggtgtagagcatgcgcagggtggtggtcttgccggcgccattgggtccgagcaggccggtgatctggccatcgtgggcgtcgaagccgaccccggccaccgcttccacggtgccggtcttggtcttgaagctcttgtgcaggtcgtgggcgcggatcatggcgcggctccggctggattgtgtcggcgcatcagggttcccatccgttgaaactggtgaagggcggtacgtagctcagggtgtccaggcaggtggtatccagcgccttggcgtcggccgactccatgaactggccgagcaggcgcggcatgcagcccagggccaggccaccgtggctctgcccgcgcaggaccaggtggcggccgttgggcaggtcttcgagcacgcgctcgccgtagcgcggcggagtgaccgggtcgaactcgcccgacagcagcagcgccggcgcctccgagcgcagcggctcggtgaagccctgtgggcggctgccgtgcggccagccggcgcagccggcgaagaacatccgtgccacctcgtggccgagcagggtgttccgggtcgcggcgtcctccaccaggcggtcggcatcctcggcgcagatcaccgaccactgcatgccgcgcgccatcgagccggaggtgttgcggcccatcagttccgacagcgacatcagcggcgcatagcggccgtggtcggcctcgtccagcaccaggggcagcagcgaggcggtctgcggcatgtacgagaacatgaaggccaggccggtgacggtgtcggcatcgaccgtgccggtgcggctctcgccgctggccggatcgcggaactcgacgtccaccggcgcgtccttcagccgcgccaccagcgaaccgagctgggtgcgcgcgtccctggggaagcgctgcgcgcaggccggcagcttgcggcactgttcggactgcagcgcgatcgcatcctcgaaggtacgcgcgaactcgccgccgaccaccaggtcgttcggcgccaccgcgtccagcacgatgctgcgcacgtgcgcggggaagttggcggcgtactgctgcgccacgcgggtgccgtaggagacgccgaccaggttgatcttcgccgcgccgagcgcctctcgtaccgcatccaggtcggcgatcgcgtcggtggtggtgtagaagcgcggatcggcgcggtcggccaccgcttcggcgcaatcgcgcgccagcgcggcgatggcgtcggcatcgggcaccttgtcccgtgcatcttccggcggcgcgcactcgagcgcgttggagccgccggtgccgcgctggtcgaccaggaccacgtggcgctgcttgcgcaccgcggcgaaggccgggtccagttgcggccacacctgcaccgcggactggcccgggccgccggcgaggaagaacaccgggtcgtcgctggcggcgccctcttcggtggccggcagccaggccaggttgagcgtgatccggcggccatcgggcgcggcgcggtcctccggcacctcgaacgtggcgcattgcgcctgcacgttgcgcgcaccctggccgctggccagggtgcagggctcgaaggcgatgtcgccgtaatggcgggtggcggtgctggcggcgccggccgtttcggtaccggaatcgcagccgcccagcagcgcggccgcggcggccagcgcggcgatggcgggcagggttcgggtcttgcgcaacttcatcggaacgacctctcgtggtccggtcggaaagggaatcggcaaaggaaagcggaaacgcgggtggaagtcatgtgccatccggcaggaaaacgtcctcgatgcgcaaaccgaacaggcgcgcgatccggaatgccagcggcaggctgggatcgtacttgccggtctccagcgcgttgaccgtctgccgcgagacctccagccgctcggccagttcgccctgggaccagccctgcgcgtcgcgcagttcgcgcaggcgattgttcatcggcgcctgcccatgagcgctggcctgctcaccggtagcgcctgaccacggcgatcttggccaggccatagctgaagcaaaccagcgggaacatccagatcatcgccgcagcggcgggcacatcgatcaccttcgccgcctgcaggaagccgccgcccatgtacagcaaggacacgaaggcggtggccaggcacaccgcttccagttcgatgcgttgctgcatttcgtcggcatcgcggatgtagcgcacgatcgcgcgcagggccagcgcgatcggcggcagcggcgccagcgcgaccagggcgcgcagcgccggcgcctgcacgtgcctgagcagccagaccgaggcgaacaggaccagcacgtaggcagccatcgccagcatcagttcgcgggtgtagcgccggcgcagggtcggcggcgcggtatcgcaggcttcgggcaggttgccgcgcagcagggcgacgaaggccagcatcagcgcggtggcgtacaggaaagcggtggccacggcggggatcccgcccggcaccagccgcggcaggccgaacccggccaggccgaggatcacggcgacggccagcaggtgcggggatttgatgcggtccatgatgcgggtgccgggtgtcaagcaagcttgacagcgaaggtacgacgcctccgcccggctgtcaagcgacctttacagccgcctcaggcgttgcccacgcattgtttgcgccggatccgtagcactcgcagaccgtgttgcctccaagcctcgaaccagtcatccccccttgcgggtggtgccgcctggtttgttgcgccgggcaaatgccgccacgctatcatgcgatgttcatgatgggcgtacgtcctcgcccgctttgcgactgcggcatcgcgaacggttcgctgatcgtgtcttgcccgccaaacggcccacaagaggcatcaaggatggcttcaagtgctttggtctggctgcgccgcgatctgcgctgcgaagaccatgctgcgctgtaccacgcgctgcggcgtttccagcgggtgtattgcgccttcgtgttcgataccgacatcctcgacgccctgccctcgcgcagtgaccggcgcgtggagttcatccatgccagcgtgctcgaattgcaccagcgcttgcagcagctggccgcgcaggccggcgccccggggggtgggctgatcgtgcgccatggccctgcgacgcgatgcatcgtgcaactggcgcagtcgctgggggtgcaggaggtgctggtcaaccgcgattacgagccccaggcacgggcccgcgaccagcaggtggcccaggcgctgcaggcggccgggattgccttcagcgactacaaggatcaggtgctgcttgaccgggatgaggtgctgacacggcaagaccggccctacagcgtgttcacgccctacaagcgcgcgtggctgcaaaagctggacccgttccagctgatgccctacgccgtggagcgccatgcccggcacctggcaccgccaccgaccgacgagcgcctgcccacattgtccgagctgggctttgcgcgcaccaacctgaaccagctgccgctgcccaccgggatgggcggcgcacagcaattgctgcaggccttcctgccacgcatgcacgcctacgacgtggcgcgcgactaccccgggcgcaaaggcgtgtcctacctgtcggtgcacctgcgctttggcaccgtgtccgtgcgccagttggcggcactggcccacgcccaggccgccctgggcagcgtcggggcgcagacctggctgtcggagctggcgtggcgcgacttctacttcatgatcctgtggcaccacccgcaggtagtcacccagtcgttcaagcccgagtacgaccgcgtgcagtgggacccggcaccggcactgtggcaggcctggtgcgaggcccgcaccggctatccgctggtcgatgcggccatgcgccagctgctgcagaccggctacatgcacaaccgcctgcgcatggtggtagcgagcttcctgaccaaggatctgggcatcgactggcgccgtggcgagcgcttttttgcccgccacctgaacgattacgacctggctgccaacaacggcggctggcagtgggccgcctccaccgggtgcgatgcgcagccctggttccggatcttcaacccggtgacccagtctgagcgcttcgacccgcagggaagcttcattcgccgctacctgcccgagctggcgcgcgttgccgacgcccacatccactttccagcagcaatgaagcccgcagcgttggccgcctgtggcctgcgcctgggcgtggactacccgttgcccgtcgtcgaccatgcccaggcaagggccgacaccctgcaccggttctcgcggatggccaggagcgaggccccatgatcccgcgcggcgtttgcttctaatcgatcagccactgctggcgcagcgattgcgcttccacgccgccggcgcgctcctgctgcagccgctgcgcacaaaggcggcggatgccgccacgcagcagcacgtcaggcacccagccacgttaagcggggcaggtccaccgattcaaccggggtgatgggggactgcctggcatcggcgcaggcggtgagcgcggcggccagcaacagcggcacggcgagcaggaccaacacgcgcatctcggtcacccgcagcaaataggacaaccatgcatacgcagcccgggcgccagtggatgcatccgcgcgcgccgtcctgcgcagtgggtgtcggtgctacggcgtcgagctcacgtacttctcgcgccggatccgcgccaccggcaggccgtgttccttcagggcctcgaagcaggcgtcgaccatgtccgggttgccgcacaggtaggcgatgtcatgggccggatccggggcgaacccggccaggtgctgctgcacgtagccgtggcggacatcggtgtgggcgtgcgccgagcccggctgcggcagctcgcgcgacaggcaggtcacgaagcggaagccgggatgggcctgggcgaaggcgcggaactcgtctccatagagcagttcggccggagtccgtgcgcccagcagcaggaccacctccaggccgcgttcgacgatctgccgttccagctccggcagcatcgagcggtacggggtgaccccggtgccggtggcgatcagcaggtagcggcggttgctgtcggccggcaccaggcagaagcggccaaacggaccgctggcctggatccggtcgcccagggccaagccttcgaacaaggcggtagccgcgccaccggggaggtggctgaccgcgatctccaccgcttcgcccggcccgagcgcgtggtcgtggcgggtggccagggagtagctgcggcgcaccgcggtgccgtcggcgcgttcgaaatggatctggatgaactggccgggatggaagtccagcggctggccatcgtcgcgggcgagcgtgtagtggccgacgttcggcgccagctggcggcggccgacgaggcggagcgggaaaagggcgggcacgatggcggttttcgcaacagtccgtagccgggacgaggcccggcggcgacctataatagccgcagccccccgaatcaggcgccggcaccggcgcgaaggcctgcatgagtttccccggcgaggcagcggttcccgcgctgcgcgtgcgtcagttgcgcaagacctacgacactggcgtgcaggcgctcaagggcgtctcgctcgacgtcatgcccggcgatttcttcgccctgctcggccccaacggcgccggcaagtcgaccctgatcggcatcgtcagctcgctggtgaacctgagcgaaggcagcgtgcaggtgttcggcaccgacctggtggcgcagcgcagcgaggccatgcgcctggtcgggctggtgccgcaggagatcaacttcaacctgttcgagcagccgttcgacatcctggtcaactacgccggtttctacggcatcccgcgcgccgagcaggacgagcttgcggtcgcctcccatcagcgggccgtcgccgcacgggcattcgacgtcactcggtacttgctgcccttggcggcgcagaccaatgtcggccaggtggtcagcattcggacgctcgaaaaacagatcacccgtttcttgtcgtcgcagattcccgaacttcgtcagatcggggaggatttacaggatgcctgtcgaaagccgcccgtgaatgtgtggggagagctgtgcggtcagtcggccggtgccggggaagcgatggccccgacgctggcgcggtatgcgaaaccgaatgtctatcaggccgaggtctatagtgacctggcccgctatgcgaaggatgcgctcaagggcacgggattggaccaaccctctgcctggggagccgcagagtcggtcgatttgattgagccgcatgatccgctggatgaggtggtcacgacgctgctctatcgcgcctcgcaagccccctatcggaagatcctcgcggtggttcgtgactggacggagaagcaaaagcaggacactctggaagtcgcctttcgcaaacgcggcccgtacgacgaattgatcaaggaattccggagcgggtacgcattgatcttcgacgtgatgatggatatcggtggcaggcgcgacatgcaccggcaccggcgctgtcagcaggtgcagcaaaatttcaccacggtgcatggcttcgacactccacccatgctgatcgatgccggccttgagcgggagtaccgcgaggcgatggggcatgtgaaggcagatatcgaacagttgcggaagtcgagccaagaagccgccctctacgctattccctttggtttctccgtgcgctgtctgttcaagatggactttgctgaggcggaatacatcgccaaattacgatccggggtgaaggggcactggtcctatcgcaccatcgcctggctcatgaaagaaaaaattaccgcacggtaccccatcctcggcgcgcgcatgcaggcgacc

SEQ ID NO: 3098 - DNA, 23474 bp, synthetic construct
  source 1..23474: mol_type = other DNA
  misc_feature 1..23474: note = Synthetic
gatgtaaaaatagtagctaatgattttttggctgaatttaaatcgatagagtctcttttgattactataaataacttcaaaaatactcaaacaaaagagtctattcacaaaatgtattctcatttagaagatgagggtgcacttattatatttcctgcgggagaggtcagccgcatgacgcctgtaggtgtacgcgacggtagatggcaaaaaggttttttaaaaatagctacgcgtacaaacagccctattttacctatatatgtgggtgctaaaaactctaaaacattttactcggtaagcacgttaaataaaaaaatatccacacttctgctttcacacgagatgtttaaacaacgtaacaaaagtataaaaataaatataggcgagcttattccaagtacaaatattcatccgccttcgctgcaaactgcgggtgtgattgaactttacagacaacatatatatcaactaaaaaaaggtcgttcactctttaaaacgcaaaaagccatagcgcatcccgaagatacgaaacagataaaaaaagagttaaaaaatgccgaacttttgggtagtacaaaagacggtaaaagtatatatctttactcaaatacggaagagtctatcattttaaaagagataggcagacttcgtgaggtggcttttagaaaagtgggtgaaggggcaaacgagagacgtgatttagacaagtatgataagtactacaaacacatagttttatgggatgacaacgacttggagattgtagggtcataccgcatcggagagtgtaaagagattattcaaagttttggtatcgacggactttacaattctactttatttgaattctcaggggagtttttagagatgcttcctgatgctatagagttagggagaagttttgtacaaccaaaatattggggcacgcgtgcacttgattatctatggtacgggataggtgcctatctgcataaaaaccctcaaataaaatatatgttcggacccgtgagtttgagtgcatcttactcgccaatgagtaaagatattatttttaacttttttgataattactttggagatgatacgaatcttgttaaagcaaaatctccgtataactttaaaaccgataaaactttattaagagttttaaacaacgaacttgtcaaaaacgactataaacaagattttaaagccatcaaaaagtttcttaaaaactttgacagttcaatacctgttttatacaaacaatatgccgaactttgtgaagatggcggtataaaattttgtgcttataatattgatgaagattttgcgtcttgtgttgatagttttattattgtagatatttcaaaaataaaagattcccaaagacaaagatatataaagtgatgtaatattgtcactttaatgtcatttaataataatctgataatattcgagcaattttttaccaaggattgcttatgaaaagaagagatttttttaaatcatctcttgtagcatcggctgcacttatgggaagctctttaagtgcaggtgttacacatcaacctatagattccagaaaagtttcaaaaatggcttttcctgagaagaaacctcttataacttattctgacagaccacctcttttagaatcgccaagaagtacttttactcaggctttaactccaaatgacgagttttttgtaagatggcatcttccggagattccgacatatatcgatcctgataaatatactatccatatcaacggtttagtagataaagagttacatatatctctaaacgatttaaaaactaattttgaacaagttgaagtagatgcagtactacaatgcggcgggaactcaagaagtgcttttaatccgatcgccggcggtattcaatggggaagcggtgctatgggctgtgctagatggaaaggtgttagactctcagacatcctagctcgtgcaggacttaaaaaagaagcaaaatttattggttttaacggtgaagataaagcagcttactatgaaacaccgaactttgtacgtgaaatggaacttcacgaattggacgatcacgttattttagcatatgagatgaacggtgaagacctgccttacctaaacggatatcctttacgtttagtaattccgggttattactcagacagctgggtaaaaatgattagtaatatcacagttacagataagtatagatctctgttttttatggatgtagcttaccgtgtacctgataatgaaactgagagtgaaactcctgagaacagatttaagccaactaaacctattacgactatgaacgtaaaatcggttataggttaccctgagaacggtgacaaagtttatcataactcacacctagttatacgcggtgttgcatgggatgacggtcacggtattaaagctgttaaaatctcaaccgatgagggtaaaacttgggaagatgcgctaatcaaaaaagcaggacgttacgcatttcaagcgtttagatttgcttacaagccgactaaatacggcaaagtaaaaataatggctaaaacaatcgataacttaggcaacgagcagccattggctaaaaacgtactttggaaccacggcggatacaaatacaacggtatcgacgaagttacgatagaagtgatatagggagcaaagatgaaaaatattttaacaaaaactttaataacagcaacacttagtgcagctccacttctagctcaggtaaaaggcgacgttgcagtaccttatatcccgtatgaaattaaaatgggtaagggttttgatgccgttcaggcaaactgtctaatgtgtcactcttttggttacatcataaaccaaggtccacagtcttatgaattctgggttaaaaaaacacagaagatgattgtacactttaaagctccaatttcaaaagaggatgctaaagctgtaaatgattatctatttgaacactacggaaacggtaaactaaaataataaaacgtccccttaaaaggggatatttttaatctataggtatagcagggcttaaacctgccgtattatgtaaaaagtgacggtgtttttcaaactggtctataatatccgtagcaatcacctcttcatcatatccgtatatatcataagctttatttccgtcttgtaagtaaacttccgctctggcatattcatgttgttcttgtgtcgggtttatagattcgggaaaagcatattcgggtgtatcgtattttttggcacggacttcatatataaagtccatatctcccgaatgttccgctttgaaaaaagatactgaatttttgttatcgtgaataatttcaacatcccagtaatgtgtatttagttcatcttttacaagcttcatagcattcattacatcttcggaaataaatctttttgtctcttgcatcgagggataactgactatcctgcttaaacgtgacttccatgtcccgctaatctttccgtgcctacctgcgttcatatggtgttgcaaactctcataacgtgtgctctccagatgcagagctcggtaaagtccccatgaagctataagcattatcactgcaaagggtaaagctatggtaatagaagcagattgtaaagctccaagaccgcctgccagaagtaaagttgcagctactacaccctctagcacagcccaaaatatacgttgccagacaggtgcttcaagttttgtttttgaagcaatagtatcaactaccaatgaacccgaatctgaagatgtaacaaaaaaagttataactaatatcattgcaacaacggagacaaaacttgacattggaaaatgttccaagaatttaaaaagtgcagttgaaacatcggcagatactgcttcgctaagcgctacaaaaccattgttcataatagcatccaaagcagtattcccaaaaacagtcatccaaataaatgtaaatcctacaggaacaaacataacaccaaagacaaattcacgaatagtcctaccgcgagatactctagctataaacattccgacaaaaggagcccatgctatccaccaagcccagtaaaataaagtccatgaactcatccattttgtatcattatacgcatactgattaaaagtcatatatacaatatcagatagataattaccaatattttgcagccatgcatctagtaaaaagaatgtaggtccggctaaaagtacaaaaagcaacaaactagctgccaaatatagattcaagtttgagagtttttttataccgccttccaaaccaagcactacagatacagtagccatagcagtgattatagctattaatactacttgtacgctcgtactgatagttatatcaaaaagataatttagtcctgcatttacctgcattactccaagaccaagagatgtagctacccctaagatggtcccaagtactgctaccgtatctacagtgtgccctatagagccgtaaatttttttaccgactaaaggataaagtgctgaacgcacagaaagcggcaatccatgacgaaaagaaaaataagctaaaaccaatcccacaactgcataaatagcccaagcatgaaatccccaatgaaaaaaagtaatcttcatagcatctttagccgcttgcatagttccaccatcaccaataggcggtgatgtataatgcataacaggttcggctacactccaaaacatcaaacctatccccatccctgcactaaaaagcattgcaaaccatgacgaataagaaaaatttggttttgactgatccggtcctaatttaaaacgaccatatggagagagagctaaaaataacacgaaaaaggtaaaaacaccaacacttaacatatataaccagccgaacttctgggctataaattgttttatactactaaatatttcacctacatcctgagggtctataacagcaaaaacaaccattataaaaataactgcaacagatggataaaataccggttttaatatagtcgattctctcgacttactggcctctgattcttccattttgtatcccttttatcgtgaactacctatcagagtatcagattcgagcttaaatacaaattgaaagttaacttcagtttaagtcaatattaactacgataggaggaaaaggattccaaatgaaacgccccaataaattcttaagtttaagcctcagttttcttgcaacaagttgttttttagaagcttcttctagttataactccattaaaataggtgactttagtttaggtggagcactaagagtcaactacgtaaatgacagttcaaaaacagatactgcaaatgcttcaaaggggagtcaaggtatatttgatttggatactgcaagagtaaatatagactataaacatgatgattttttaggaaagtttgagtatagatggtatccaggatttggaaatacacaaaacggtaccaactatagttttattcatactgcatggctgggatatgctataaataacactgctcatgtagaggtgggtatcaaccgtgttccatttggtccaactgcttatggagcatctcaaagttggttttttgaccaacactactacgtaggtcttgcagatgatatggacttgggcgtaaaatttagctcaacactaaataatataaaatacgatttagcatactactatggtagtgaggatgacggtatcggtgcaggaggtgagagtacacgttatgcttatgacgttgttgatgattttcatgaaaaaaatcagctctcagcaagagtaatctactctagtaagttatgggataaaaaacaagaatacggtatatcattactatattcacaactcgaagctcaaactcaaggtgtggatgatggttcaaggtttgcagtgtctgctcatatgataaaccgctataaaaactttacacttaccacccaattaacaagatatgagatgagtgttgatgcaaataacgactccgtagatgatgcactaatcaaaatgggtggatttaactatggtgaaggggtagcttcagaagcttggctaccatctgtttcacttaactacaaaatagatacgccaaatatagagtggcttgactatgcactgccgtatatagagtatagcaatataataaaagatgaagatacgtttaacaacagttatatgtggatgataggtactgcatttgcaagaggaaactggtatatatatacggacctagctttagcaaacggtaactactttgtaggaccttatacaggttcggacggagggactaataactttggtgcaaacagttcaaatgatttagaacatcgtcttaatatcaattttggatattatttttaaggatatatgcctttggagataaaccaaacattctggaaaactctctgctaaactgcgagggagattcataccctacttgaaatgcggcttcacttatttcaatatcttttaaaagtaaaagttgtttcgcttcttcaagtctaaggtttttttgaaactgaataggcgacatcgttgttatggttttaaagtgctggtacagcgatgactcactcatatctacactatatgccaactcttttatatttaacttttcatcaaagttttctttgatttgcgatataacttttgttattttatttgaggtagttcccgcttgtgaaaactttcttaaaaaagttccgcctttacttttaaccaaattataaagtatctccttgaccaaaagcggtgaaagatactcaatatcctcttttggtcttttaagaagcatgataaacctatgaatagactcgtacagttcaatatccatatcaccgaagtacaaacctttttgcgcatttttatctagtttttcctcatgtggttttaaagtttttagaagttcatatatatcttctaaagagaattttactctaagcgacatatacggtttatcttctgatgcctctaaaattttcattttagcaggtagatgcgtagaggatatcaaatactcttcattatcataactaagtgtttcatctccaaaaccaacagctttatgcccttgcaaaataacacaaagcgatggctcatacaagatgtttatctgctgggttggagattttgagaagaaaaaatcaagatttgaaatctcactttgaacatcgccttctagtggatatgttgcacttaaaaaatcaatcatttcagatcttaacttttctaaattgctatgcattttaccctccatatagataagcagtattatatactatttatactcatcctacaaaacttcaaatactatatatatttggataatcaggcatctttaatggatttttattatattaatatactgaaacttagtttataatgttgagatgttaaaatttatatttcttattttacttacatttaatttggttgctgatggaaaggaaaaaagtatgcaaatcacgatagaaagcaatggtgaaaaaactatttttgagctaaatgattcagatgcggcaaaagaactttacactcaacttccacttaatatagatgtggaaaattttggaagtaatgaaaagatattttatccgccaaaaaaactatctacgtctaatacaccgccagctaatgcaaaaaacggaactcttgcatattatgcgccttggggagacgtagttatgttttataaagactttggagctgctaaagggttatatgaacttggtagctgcataagtgcttgtgagaatataaaaaatatgtcaggtactataaatatacataagtaaaaggataaaacatgctattacataaatcaaaatcagaccaacaaattcaacatctttttaataacagttttactgagaacaaacccataccatttcctgaacataataaacactatgcatattcaagcctattttattgggctcatttagtagctcatgagagtgctgaatttcctctacacgggcataaaggttttgagataatgacctttgttcttaagggttctttagaacactttgatacggctacaaatgtatggacaccaattaaacagggtggttttcaaattattcaagcaggaagtggcgtcatgcattctgaacgtatagtcaaaggatctgaagtatttcaaatatggttcgatccagatttttcaaaaacacttaaaacagacccaagctatcaagactatactgaagataatctaagcatagataatgctgaaaatgttaaagctattgaatatatcgggacaaaaagtgacattgaacatcaaactgctgatataagcatacgtagagagttttttcaaaaaggaacttatactaaaaaaacaggtatatcatatgtatattctatttatgttatggagggcgaaggcagcataaataaaaaatctgtagtacaagatgattttgtagttatcgacgatacatcttcttttgttgtagatgcaaaagacgagctggagttatttattataaagtctccaaaagtgcttccctaccctagagttaaaatataaactaaaagattttattctaatttgtctaaagagagatgcaccttttgaagtaactctaaaagcttcttagcttcatctttatccaaatctttaataatctcttggtttacttcttgagcacaggcaatagttttttttgccaatgatactccgctatgggttaaaaccagatgcttttttcttttgtcctctgttgattttacccttttaatcaaaccctttgattcgagtctatctataagccttgtaatacttgcttcatcaccgttaacatatttaagcatctctttttgagtttttacattgtttttatatagattcacaaggatactaaactgtaaatgtgtcgcatcataaattttcaacctgctctccatcatcctttttatatttgtaaatataatattgaagtggtagccgtaagattctgataaattaaattcctcttttttcataagaaaattataacacaataaactaaatacttgtctttaacaagttttaagatttttactaatatacttgcatacaacaagtaaataaaaaggagcaaaaatgtctaagaaaaatgtacttataacaggtggagcaagaggtataggagctgcaactgcaaaagaacttggagctcaagggtatagagtatttataaactatgtaaactctacacaagtggcaaacgagttagtagatgaaataaattcaaacggcggggaagcatatgctattcaagctgatgtcagagttgacacgcaagttgaaagtatgtttgatgatattgaatctaaatacggcggtgtagatattttggtatcaaacgcaaacatgaactttactcaaaaaccttttgttgagcaaacttgggatgagttttctcaaaaactaaatgatgagatgcatgcggcatacgtatctgctaaatatgcaacaacttctatgataaagaaaaaattcggtcgtttggtgtttatatctagtactttgtccgagagtcctgcacctagttttatagctcacggttcagccaaaggggcacttgatacttttagtaaatatcttgcacaagagttaggagctcatgggattacatcaaatatcattgcaccgggattggtactaacggatgcaacaagccaagcaccagatgaatttaaagaattcatacgttctatgacacctactcagacaatctcaaaacctgaagatgtggcaaatgctataagctttcttgttaaggatgaaagtgcccaagttacgggagcttatctatctgtaagcggtggggcttatctatcataaataaaaaatttgtacagtgagaattttctcgttgtacatgactattttgttcaataatctactgttttagtaacaaaatgaaatatctagtgtgtatactattcttaatatgatttggtataataatgtgaattattattatatattttataaatattaggaaacattaatgaagagagtattgggtttagatataggtgttgcaagtataggcttttcattaatagatgtgttggaaaaagatggaaaaactgaatttaataatcttacaacaaatagtattatttttgatgttccagaacttgcagaagagagacgtaaagggcgttcttcgagaagattgaacgatagaaaaagcagaagaaaacaacatatacgtaatttattctttgaacatggtttaacagataaatcttttgttactgagccaagtagttacttgaatactttagatgtagagagtgatgtttatattctaagagaaaaggcattacatcaagatttatctaaagcagagtttatcaaagcactttatagcataactacaaggcgtgggtattcaaatcaatttgaatcgaccgagcaagatgaaaatagtgcaaaagaaaatgaaaaaatcaatggctccataagtaaaaacatacagctaatcaaagaaaaaggtttcatcctccctactgaacttttaacatatagacgtactcaaaaagaagaacttggataccaaaacattcctgtacgcaataaaggcggtaattatacaaattcactcaatagaaaactccatgaagatgaattaaaaatcgtaattttcagtcaaaaagataatagaaatatttttgcaagtgaagagaaatgtgaaaagttttatatcgcggtaagagatgtaatgatggaacaacgaccgcttaaaagttttgaagatatggttgcatattgcagttattttgacaaatatcacgaaacaccgcaaaagagaatgtctctttcaagtatttacaatatagaactcactttaaaacaatctctcagcaattataaaactatggataaaaaaagtggtgagataatttctttgtcaaaaaagcaaattgatgaggtggttgcaaaatgggttaatgagccgacaagcgataagatcacatttgcaaatatttttacaaaaacaagtttgaaaaactgtaaacttaatgatgttggtggaagtgcagaagtactgaacatcaaaggatttagagaactatctgctattttcaagcagtataatgtggatttttatactgagcatagagatttttttgaaaaagcacttcttattttgagttactataaaaatatttctaaaagagttgaagagttacaaaaatcttttactggaaaattggagccaaaagatgaattcattaatgaagttgcaaaagtatcttccatagatggattcggttctttttcagttcgttttgcaaaaatggttttagaaaaaatggaacaggggaattcattttcggaggctcttgagagtttgggttattttgataaatatcttggtatgccagcttatgattacttaccaccgtttaaccctacacaagcagatataaaatggttaaaagagaatctctcttactttgatacaaagcatctgtactataaagcaaacagttcaaaaacagttgaacgaattatctcggtaatgagaaaacttatcaatgacataataaaaaaatatgggaaaattgatgagatagcgatagaaggtggaaaagagcttaacagtaaaaaagaagaagataaaattaaagaaaaccaaaaagacgataaaaagatcaacgatgaggcaaaaaatcttttaaaagacaagaatatcaaagattatgataaccctacaaaagttagaaaagctaaaatgcttattgaacaaaaatataaatgtctttacagcaacgaaccgctaaccctcaaagaggcattagatgaagaagaatgtgaaattgaacattttattccacgttcccatttttggaacaactctcaaaaaaacaccattctcgtccttaaaaagcataatcaaaacaaaactgatgtaccacctatggagtatctaaaacagataggaaagtgggaagattataaagcagctgttcataacagctcgatgaaagagagtaaaaaagattggctcacaaatgaagaaaaaatagaagctatttttgatcaagatactaatgtttttctagcaaactatctaaatgatacacgttcaagtataaagattatcaaaaactaccttgaacattatctctatcctaaaacgaatcgttacggaaaagatgaacaaagcaatgtacgggttgtgagtgcaaaagcaattaatgaactaaaacatatttggggaatcaaggaactaattacctcagaagatacaggaaaaaaagacagaacgactaactatcatcacagtatagatgctttaacagttgctttgtgtgataaaaaagggatgtttgctttacataactttttcaaacaaaaagaaaataagtttaaaacaaaagctatgaaagagaatgtttccaagaatgttccttttacaagtgaaggggaaactctacactctttctgtagtcatttagtggaaaaatataagaacaatgaactctatgtatgtccatataacaagattaagacaaataaaaaaggttttaaagatggaaacaaaaagcttgtagtggcacaaaattctaaaggggttaaacagcttcaagaattaaaaaatatcagcttacttccttatgaccttcttcaggagaagaaacagctaaaagtgacagatagaacagatgagggtgtaagaatgtgtgttcaagaaattgtatcgcaacttgatatttttaaacaaaaagggattagagaggctttaccaaaatatggcgaatttttgattgcaaaaagggcagaagaagaaaaatttagtgtactagaaaaagagcttgtgaataaacaaaaagctgataaaaagaaagaagatgtggaactttctaagcagatagatgagataaaatcacaacttcaatccgttagagatgaaatagcgttttcaaattgttattttgtaacgaaaaatggaaccaaacagattgttaaaggtgtgaaaaatttaagtgattcagaaacaaaagcgagtactgtactgattcaaaatggcaatagtattttaatggaaaaattgaatatagaaacttttaaacaagcgcaagaagaggggcacccatttgtatgtaaagagaatgattatacagtttctgtagatatttacagttcttctaaacatcagataatcggacttaaatattttagatctatagaaaatgatatagaaccaaattttaaggaaagttttcaaaatatagataaacagtatgagttttctatacataaaggggaagttgtcgttattttagatgaaaaagagaaagttcagtatttggcggttgctaatggtggaggacaaatagctggtacaaatcataagatacaaattgaaaatattaatacaaatggtgttgtagcagtaactatcaataaaaaaacaatcataaaaaaagcaaaaattgacttttacggaaattttcagattggctaaagatgaattactctaaaattatactcgtatcaaatggggatttgatagtctgcttaagacaaggggtcctctccgcaccccgcaaggtttatcctttcaagcggagaacttcttatgtttaaacatatattcatcaaaaacagatctcacctctactataaaaataattcacttggcataaaaaatgatgattttgacactactatatctttagatgatatagatatgcttatagttgaaaaccaacaaactacgattacatcgtcgttactttcacatctagcacaaaaaaatatctgtaccgtttttgtagacgaaaaatatatgccttcatctatcaatatcccgctttataaaaatagtagagtttcactcgtacaaaaggcacagcaaaaagtttccaaaccaaagcacaaccagttgtggaaacagataatctttgcaaaaataaagcatcagtcttttgtcttggaaaaatataaaaagagtaaagcgatagatggactgtggcataaagtaacctctgccgataaaacaaatatagaagcacttgccgcaaatatatactttccagaactctttggtaaagagttcacaagaagagatgacagcgttataaatgctgcacttaattacggttatagcattataagaagttcaatagcccgttatataattgcttacggaataaatccgacaaatggtatatttcattcaagccagttaaacaattttaatttggcagatgattttatagaagtatttcgtcctgttgtggatgagtttgtacattgtaatattaaaagtaaaagttttggatgggaagaaaaaaagaagttttctgtactactttatgagtatgaattgtttaatatagaagaggaacgtaaaatctctcttgataatgcaataaaaacagttgtcgcctcttatcagtctttttgtctgggtaaaagagaaaacataaatatagcaaaaatgatatgagtagatttagacgtatggttttatttgcaatgtttgatatgcctacagagacaaagggtgatctaaaaagatatagacaatttagaaaagacttgctttcatatggctttataatgtttcagtactctgtatatgtccgattttgtgacagtttgtatatggcagaaaaatatgaagcaaaaattgaagaggttgcacctgaaaaaagttctattcgagtacttcgagttacagaaaatcaatacaaaaatatgataattgttgaaaactatcgagaaaaaccagaggaaaaagtagaagagatgacacaacttgttatggttttttagaaggtaacgtctctaaaaagtcctaaatatagtacctttgagctactctattgtatcaaatggggatttgagagtagctgaagacgaagcgaatagagagcgtagctcgttgtgcattgtatcaaatggggatttgagagtagctgaagaccaaagtgaaagtttagagtattattctaaaattgtatcaaatggggatttgagagtagctgaagacacgagtttagcactataacatcacttttaaattgtatcaaatggggatttgagagtagctgaagacgcatgttctgtagcaccgactatcttcataattgtatcaaatggggatttgagagtagctgaagacagtatgtttttatataaatgatttagaacaattgtatcaaatggggatttgagagtagctgaagactgtgtttcagatggcgaaggggattatgatattgtatcaaatggggatttgagagtagctgaagacttttcgcaagaggacaattcaaccaccagaattgtatcaaatggggatttgagagtagctgaagaccataccatctgaattacatagcactttataattgtatcaaatggggatttgagagtagctgaagacaaactcagtcaagttgatgtcacctgtagtattgtatcaaatggggatttgagagtagctgaagacgcaggtaaacgcattatgatttctttgcgaattgtatcaaatggggatttgagagtagctgaagactgttatctcatcatattagaaaaataaactattgtatcaaatggggatttgagagtagctgaagacatgacaggtgtatttatagcacttggaacaattgtatcaaatggggatttgagagtagctgaagactacctaaaagagctggacgcatacagcttgattgtatcaaatggggatttgagagtagctgaagacactaattctcaattgaaattccaaaatgagattgtatcaaatggggatttgagagtagctgaagacatagcttacaaatggtaaaagcagaatcagattgtatcaaatggggatttgagagtagctgaagacaaaggtgtaataaatgaatctaaaaccaaattgtatcaaatggggatttgagagtagctgaagaccataactttgtcggaggtgttacgaaaagtattgtatcaaatggggatttgagagtagctgaagacggtataactcaactaatggggatgaattaattgtatcaaatggggatttgagagtagctgaagactatgaaaacataattgatagcgttctgcgtattgtatcaaatggggatttgagagtagctgaagactagacttttcgccatcaaaacctttacgttattgtatcaaatggggatttgagagtagctgaagactgtcctactgatatattgatactcatttttattgtatcaaatggggatttgagagtagctgaagacagacaaattaggaaatgaaattacaaaagaattgtatcaaatggggatttgagagtagctgaagactaagcactataacttaccgatatgttaattattgtatcaaatggggatttgagagtagctgaagacagtagtagctgatacgataccgactaagaaattgtatcaaatggggatttgagagtagctgaagacgtacaagctgactactcattcactatgaaattgtatcaaatggggatttgagagtagctgaagacccttgtcttagcttattagctcttttttgaattgtatcaaatggggatttgagagtagctgaagacaaaagtgttttatgatctaaatgcaccggcattgtatcaaatggggatttgagagtagctgaagacatgtttgttggcaaagagcttttaactaaaattgtatcaaatggggatttgagagtagctgaagaccgcgtgggtacaaaaccctaatttaatttattgtatcaaatggggatttgagagtagctgaagacatgagtagagttacttattattcattagatattgtatcaaatggggatttgagagtagctgaagaccgcgtgggtgcaaaaccctaatttaatttattgtatcaaatggggatttgagagtagctgaagacatgagtagagttacttattattcattagatattgtatcaaatgggaatattcattacaacatttaataaatgtatatagttataaaggctttttgcatcaaaattacttacttttagaacaaatatagtatatataactttacttgttccaaatagtgttcaaaaattgaaaatcaacactcccataactatttaatactttttaaacaaacataatcaaaatccataaaaaaataaaatttgtagaattgtgcattttatatggagtatctatctagtagataattttaaaaagttataaaattgtattataaaaccttattaggaggagatagatgcaaacatcgcaaaatccgtctcgaagagattttattaaaacctcggcagcaatcggtgcgggactcatactttggagtcctgttctagcaacagacaaaggagataaaatgaacgctataacaacaaaaggatacgcggcatttgatgagtcgggtgttttaaaaccttggacttttaccagacgccctgtaggtgataacgatgtacttatcgatataaaatttgcaagcatctgccactctgatatacaccaagaaaaaggtcactggggtaaacaacaataccctcaagttcctggtcacgagatagcaggtgtcgtaactgcagtcggtaaaaacgtgactaagttcaaagttggagaccgtgcaggtgtgggttgtatggttgatggatgcactacttgtgaaaatgaggaacagtaccagagcgatacactatttacatacggttatccagataaaagagaacctacgaggatatctcaaggcggatactcaaaacagatagtcgtaagagaccactatgttgttcacattccggatagtcttagttttgaaaatgccgcaccgcttttatgtgcagggattacgacttactcacctattatgagagcagactttaaaaaaggcgataaagtagcagtagcgggaatcggaggcttagggcatatggctgtaaaatttgcgctaagtagaggtgccgaggtttatgcttttactacaagtgccgacaaagtagaagatatcaaagcttttggtgtaaaagaggtaatcgtcgtagatgatactaaaaaactttacgaatacgcaggacaaatggattatatgatttgtacaatcccttatcagtttgatgtcgcagcttatgcatctgtagttaaaccttatggatttttcactcaggtggggatgccagaagcttttgaaatcacactaaacaatcttggtctttctttctcaagggttaattttaatgcttctcttatcggagggatgaaagagactcaggaagtagtagattattgtgcggaaaataaaatatatccgcaaatagagataatagatgctaaagatattactgatgcatggaagaaagttgaaaacaaacaagcaaggttcagatacgtaatcgatacggctacaatttaatagcctcttcaaacatagcacttgcagttttttccgtctctacaattatatgtgagaggtttaaacttgaaagtgcttcttgttcttcatatttatttactttaactattgtctttttattttctctcaaatcttttaccgcctgacatatctgatgaagtttttcggagtttcctatagatataactaccgctgatgcatctttgatatttacggattcgagtacgtttttttgtgcagcgtttccaaatataacaggcttgtttaactttctagcctcttttacgcttaaaatatcattctctatggcaatataatccatattttttttctctattaaccttgatatatttttaccaagtctgccgtaacctatcagcacgatatggttacttagtttttcattgttatcgggagatgtatattcttgggattcttcaggagtgtaactaaacatatcaactattttagatatatttttcaaaacaaaaggcgtcataatcatactgataactaccataactacaagtacttgaccgataactggatcaatcaagttctttgcaaaagagagttcaaatataaccaaaccgaactctccaaactgaaaaagggtaatagcactctttagtgcaactcttgaatccgtagcaaatctaagcaataaatatataattagtatttttgccaaaataagtacaggcaatatcaataaaacagtatatatgttttcaaatatgatgctaaagttaagctgcatccccacagttacaaaaaagacacccagcaaaagatctctaaatggtacaaggtcggcttctacctgatgcttgtagtgagtttcagctatcatcattcctgctataaaagctcctaatgagtatgaaaatccaaacgcatgagccaaatacgatgcacccataacaataagtaaaacagacccaacaaatatctcatttgattttgttttgcttacctgatgaaaaaacggttctatcaaatacttaccgactaaaaataaacccataagtaaaacaacagcattgagcaaagtctcaataagtaacgaagatactgatttatccgttacgctaaacatggttatcattaaaagtatcggtataaccgctatatcttgaaaaagtaatattccaagcacttttcgaccgtagagtttatttatatcaccgttttcattaagcagctttaatactatggcggttgaggacaaagctaaagcagctccgataataatagatgacttagcctctattgaaaaaatattatgtgctaaaaatgaaaaaaatgcggctgttatgaaaacctggagtgctccgtataaaaaaacctcttttttcattttaattaaatttcgtaccgaaaattctaatccgatagtaaacattaaaaatactacaccaaactctgctatttcttttagttcgtgagaatttattgcatcgtgaagttcatacccgtaagctataatcgtacccgttgcgatatagcctatgatagttgggattgagaattttttaagaaataaatttaaaattgttgcgcttaaaattgaaaatattattatctctaacatatatgcaccttaataaatataaagtgcattatacattataaaaataatatttattttaggagacaaagccttttgaaaataggctttgttttttagggagaatgaatgaatttgccccaaattgaggcatgatatttttagaattctacttgagctgttaacatatatgccgtactgtcagctttttcaggcttagaagctttaaacgcatccttctcattatctttaacgataacgttagctacccattgaacattatgattttgttgccatgcaaaaccggcgataagtgaagttctttctctttcgtcagagcttacaagttcttcatcagtccaagcatcataacgagcaagtactctatactcataagtgttaccaaaacggtattccccgtttatagagtaacccgaaccggcttgagccgatacgtaagtagaattatcagccgtgtcatctgagacaacatattgagcagacactaaaaactcaggttgattatatacggtatgaaggccgtaaaaaactaagtcatcataatcatttgctaatccacttgcactcgctttatgttcttggttgtattgaccaaagaaagaagcgtcaaagtaagtttttttcgtttgtttatctttaccgtttacaccaagaatatgagcagtagctctccactccaaactcataccgttaccggctttatcactagcttcatcatcattaaaatctgagtggtaaccttcaccgttaaatatacctatttcactgtcaaagtactgagtttttgttttgaagttaaaaccaaagtccgccgagttacttaaatctccaccgtttttagcttctatcattacttttgaaatatcacggtaaaaccaagcattatgctcttcataatcatgccaagggcggtgtaccaaaccaagttcaacacctgtattttctaacacgttatttaaatataggtatgcatatttagcacgaacaaccatatcgtcttcagcattttggtgcatatcgaatgttacacggtagtatgatttagggtcatctaaaagatatgcttttagttgaaaatacgcacgtcttaactcaaagttagtttcgtttggatttacaagctcatctttataagagtttttagtaagacctatatatgtcaaaccgctaaactttagtttatcggtatgtgagaaaacaggtgtagcatcgctagccataacacttgaagccaaagttaaaccggctaccgcagatagaatgatttttttcattatttttatccttttaaattattggcaaaattataaatttctttggttacgaaaagattacattgaattacacttgtgtaacttaaaaaacagggcaaaaaaaaagctcccgcatcaaagagatgcaggagcttaaaaaaataataaactatattagaatattactatttgatattttcagcccaatactcgcgaatcatttttttcgtagcatcaggaagtgcgatataaccaagttttttagcttgagcatcaccgttcataaaagcatagtcataaaactttataacttttttattcattttaggtttttcaatcggaagcaatataaatgtagctgcaactataggatatgaagtatcaccaggttgaagtgctaacatcgcataaaaatgatcttttttagtccagcttgcatatttagcggcagctttaaaattagcttccgttgcctgaacccatttaccgctagctgttttaagtacagctgcacttaaatggtttttctctttatatgcattttctatataacctatagagtttggagtttgcttgattaagtttgcaacaccctcgttacctttaccgcctataccagtagcccagtcaatagctttaccggtaccaaaattttctttccagtttttgctgcttccgcttaggtagtatgtaaagttataagtagtaccgcttccgtctgaacggtgaacaacgattatttttgcatcaggaagatttatatcaggattatcggctttaatagctgcatcgttccattttgtaatacgacccgcaaagatatctgctacaacatcatttttaagctttagtgttgcatccgcaataccgtctatattaaatgcgactacaatcgagccgataactgcagggaattgtaacaatttacctttagatagttttttagcatttaacggtttatcggatgctccaaaatcaactacacgtttagtgatttgcttgattccgccgcctgaacctatagactggtaatttacacgattttttgtgtcttttctatagtcaaatgcccaaccgtaatataaaggtgcaggaaacgatgcacctgcaccgttgattttatctgctgctaataacggagttacaccgaccgccgctacaagtaatgttgagagtattttttttaacatttttcatgtcctttttaaaattaaagttgacgaaattataaatttaccttattacagattggttacaaaaaaactataagtctgtaatcatttcgtaataaaaacttcataaaatttcaaacttttttattggaggattctttgagtttaataattgataaattttttgcaaactctacaaaacttatagcagtggggatactgcttttagtagctagtatatttgctattttatttgaacactccctgacatcaatacaagcttttggagtcagttttgtcacagaaacaaaatgggctccgaatttagaaaagtttggagcattgcctgctatatacggttctgttttatcaacttttttagcgatgattttagcagtcccggtagctataggtgtagctatatttttaagtgaattagcccctgcaaaacttaaatcaccggttggcgtatctatagaacttttagctgcaattccatcagttatatacggtatgtggggtcttttttacttcgtacctatagttcgcgatgccgtaggcggtataggtatatcgatgctgactgcggggattgttttaagtattatgattttaccgtttatggcagccgttacacgtgatgctatgaacacgacacccgatatcttaaaagaatcggcttatgcacttggcggaacaaaatgggatgttatcaaggatattgtaatcccttacgcaaaagcgggaataataggttcttttattttagcgctcggtcgtgcgataggcgagactatggctgttacttttgtaatgggtaatgtccataaagtctctacagatttaactcaacctgcaacttctatacctgttacattggcaaatgaatttacggaggctgatactgatttatactattcatcattatttgaattatctttattgcttttagtgatcagttttacgattatctttgttgcaaaattctattttctaagaagaaagaaggcggtataatgacacagactcaaaaaagaatattaacaaataagata

SEQ ID NO: 3099 - DNA, 23132 bp, synthetic construct
  misc_feature 1..23132: note = Synthetic
  source 1..23132: mol_type = other DNA
aggcgcccgccgctcggctgatggcccacggcgaggagcggtcgctgttgctcggcgaggtcgaggccctgctggcctccgatgccctggtcgtcgatgcctgccgccatgtcgtgcgtcgggcgggcggggtggtgtcgctggcgacgcggccggtgctgttcgcgcttgcccgcgcgctgggcgaggcgtggccgggagatctgtcgcggacagcgctgctggcgcgggcgttcggtgccaggtccgcggatgaatcgcacagggcgcggctgcgcgtcgagatcggccggctgcgcgccgagataggcgagctggccgaggtgagggcgaccaagcgcggcttcgcgctgctgcctggcggtgcctccaaggccgtggtgctggcccctccggtcgagggcaggcatgcggccatgctggccctgctcgccgacggcgaatcctggtcgagctcgggcctggccctggcgcttgccgccagccagcgcacggtacagcgggcgctggaatcgctggccgaagccggcaaggtccagtgcgtcggccacggccgcgcccgccgctggatgaccccgccggtgccgggtttcccgacaaccttgttgctcccggcacccgtgccggtgggctaggttcggcgcatgaagcactcagccgccgaaatcatccgcgagtacgggccctttccgggcgtcgagcgggtccacggggtcaccttcgatggccgccaggtctggttcgccgccggcgagaccctgaacgccctcgatccggactccggcgaggtggtccgctcgatcgaggtcgcggcccatgccggcaccgccttcgacggccggcacctgttccagatcgccgaggaccgcatccagaagatcgacccgaggaccggccgggtgctgtcgaccattcccgctcctggcggcggcggtgattccggcctcgcctgggccgagggcagcctgtgggtcggccagcatcgcggccgccggatccaccagatcgacccggagaccggggcgatcctgcgcaccatcgaatccaaccgcgtcgtcaccggcgtcacctgggtcgacggcgagctgtggcacggcacctgggagggcgacgatagcgacctgcggcgcatcgacccggacaccggcgaggtgctggagcgcatcgagatgccgcccggcgccggcgtgtcgggcctggaatccgacggtgccgaccgcttcttctgcggcggcggcagcagcggcaaggtgagggcggtgaggcggcctcgccgcggcgcctagcggcggagagcagctcccggaggctcgcgtagcggccatttgccgatcgcctcgagcccgtgatggctgtggacgagcacgaagtcgcgcaccgtccagccgatgggctcgatccgccgctccgccatcggccgcccggccatcgagcggtcgatatagaacagcgtcaggtgcggctcgaacgacgccttccgccgccccagcgccgagcccagcctgtcgaagaggtcgcccagggcgccgccatgcccgggaccggcgagtcccaccgcgccgccgccgaagcccctgatccgatcgaacaggatctcgaacggtgccgccgacacgccggccgcagccgtctcgacctgtccgatgagcccctcggtcagctttgcaaagggaccgatgtagtgcatcgagacatggaagctgccttcccggatcctccctcgcagcccggtctgccgctgcacgtcccgcgcgcccaggatgcagcgggccgaggcggcttcatccggcagcagagcgaagtagacctgcccgccgtcgcgaggtgcggcgcgcggcgtgaagtcggagccgccgaacgacatctgctcgggcatgcaaaggaccctcgaggctcgcctatcgcggctgtcgcttcatatgcctgtcgaagaaggcgatcaccttctcgggatgacggccgaaccagttgtagccgtccctgaaccgccgggtggtgccctcgatccagaacagctccttgtcgttgctggcgagcagatcgaaggtcttctgcgcatcctcgggattgcgcgtccagctgtcctcaagcacctggatcatcagcaccggcatgtgcacgcccgaggcgaacagctgcggggtcatctcggcggcgacgaaagcgcccatcttcaggagctcgagatcgatcagctcctggtaccggccgatcccctgcagctccgagaaggccgagaagatcgccgccatcgagaccaccatcgggctgcacatgcaggcgacgttctcgaacagatccggccgccggtagatcgcctcgtactgcgagttgccgcccatgcactggctgtagagcccgaccttcatcccaccgagcgccgggtggccgtcgacgtatctcttgacgccgacgcagtcgcgccactcccagcggccgatgccgctgaggccgttgttggcggcgccgctgttgccgtggttgcggatgtcgtaggccagcacgttgtagccggcgtcggtcagatgcttcatctggacgacgaagtcgatctcgaccgcgtcgaactggctccacggctcgccgagatggccgggaaagccggcgcggcacatcggcagggcgtggttgaagatcaccagcctgtcgctctcgccgcccttggcggggatgtaccagccttcgagcggcgtgccgtcgtccgacgggaagtagatgtcccgccaccccgtcatgccgtggtcgtcgggagtcttgtgcagcacgctgcgcagcggcctgacgatggcggccagcgccttgaccttggcgtggtccgcctcggagatggcctccagctgctggagggccgcctccatccgttccttgggcattctgctcatgacgttcctcgctcgaacgatgcgtgccgtgctgccgggattggtgacgacacccgatataaacccgtggaccgcgtcgagaagccggggcagccttcaatcagttttgagcgaggcttcacaacgggtgccgctggaccgcaacctgcttcccgccgtcgccgcctttgccgaggtcgcgcgcgagggaagcttcacccgcgccgccggccggctcggcgtctcgccctcggcactgtcgcagacggtccgcgggctggaagggcgcctcggcgtccggctgctgaaccgctcgacgcgctcggtctcgcggaccgaggacggacgcaggctgctcgcacaggcggatccgggcctcgccatgatcgcgcacgctctcggcacgctcggcgatgcgcgcgagaagccgagcggcgagctgcgcgtcaacgtctcgcgcatcgccgcccgtcacttcgtcgagccgcacctcggcgagttcgcccgccgccatccgctggtgcggctggagctggtcatcgacgacggcctcggcgacatcgtccgcgagggctgcgatgccggcatccgcctgcgcgagagcctggccgaaagcatgatcgccgtgccgatcaccccgccggtcgccatggccgtggtgggctcgccggcctatttcgccgcccatccgccgccgcggaccctcgacgacctcgcccgccacaactgcctcgcctaccgccacagcggcagcgccgccctctaccgctgggacttcaccgataccacgaccggccaggaccacgcgatcgagccccacggcagcttcgtcaccaacagcgacgacgtgatgctcaccgccgccctgcagggcgtgggccttgtgatgcacatggacttcgtcgtccgccagcacatcgccagcggcgccctcgtccgcgtgctgcagagctggtgcccgccgttcgccggctttcacctctacctgccaacgcgcgaccagatgccggcgaagctgcgggcgctggtggattttctggtcgagaagcggggggtgtaacggtaaggcggccgagctgcgctacatgaatcacaacggaaacaaagtcctaacccgttcaaacgggtttcgatactctgcggcgtgccgacttttcgcggcgataatgtctggaattgacaagcgccgagctaatgcctcgtagatgtccattccatccgcgagaataatcttcttggcagtgaacgcctgcaatccgacatctgtaaagccgacgaaactaacgaacagcccacgtgtccattctggccgttcgctcaccttaccctgaaaagcatgaagggtgctggcatccgtttttgtgcgatgccattttgcctcaaggaggtaggtatcgccattaagctgaaacgagccatcaatctgctcaccggccaagcgaaaaccgccgcgcgcgtccattccccacgcgttgaaaaggtcggtcaatagcctctcgaaatgatatccacgtgcctgcggctcgtccgacatctcgtgaagagcgaggaattgctcctcaagacgccgaagcgtcgcctcatcagcgcggaaggctcggggcctaggctcctctttcggcctggatgcctccacggcggcatcgaacgatgaaagcggcgcgcttccgagcctctcgacgattgtgctcagtctctggtgcgcattgaggaccgtctcagcctgcgcccgacccagcctatctgtttcgcgatactcccaaagcgccgccaaagcccaggcgatggctcggggctgaccgatcgtcagaaacgctctgagacgcttgcctttgctgtcgccatagattgcataggtatcatcgtagatttctatcccgacttcacggcgaaagaaatcggcaaaggtgctgttcgtgaaatcgagcacatagcccgaactcaatccgaacagctcgtctacaagcttcaattcgacgggtcgtagctgctccattatccgccgatgcccaaatcgcctagcaggcccgcgtggaagcgcctgcaggccgtactattcccctactcccactcaatcgtccccggaggcttgctcgtaaaatcatacaccacccggttgatcccgcgcacctcgttgacgatccggctcgccaccctgccgaggaatgccggctcgaacggatagaagtcggcggtcatgccgtcgaccgaggtgacggcgcgcagggcgcagaccgcctcgtaggtgcggccgtcgcccatcacgcccacggtcttgaccggcagcagcacggcgaaggcctgccagatctcgtcgtagaggccggccttgcggatctcgtcgagatagatggcgtcggcctgctgcagcacggcgacgcgctcgggggtgacctcgcccaggacgcgcacggcgaggccggggccggggaaggggtggcggccgacgaaggcttcgggcaggctcagctcgcggcccagcgcgcggacctcgtccttgaacagctcgcgcagcggctcgaccagcttcatgcgcatgcgctcgggcaggccgccgacattgtggtgcgacttgatggtgacggagggcccacggaacgagaccgattcgatgacgtcgggatagagcgtgccctgggccaggaagtcggcgccgcccagcttggcggcctcggcctcgaagacgtcgatgaaggtcctgccgatgatttttcgctttttctcggggtcggtctcgccggcgagcgccccgagaaaagtgtggccggcctcgacatggaccagcgggatgttgaagtggccgcggaacagctcgaccacctgccgggcctcgtcggcacgcaagaggccggtgtcgacgaaaacgcaggtgagctgctcggccacggcctcgtggatcaggagggccgccaccgccgaatcgacgccgcccgagaggccgcagagcacgcggccttgccccacctgctcgcggatgcgggcgacggcgatgtcgcggtactggtgcatcgaccagtcgccggagaggccggcgatcctgaagaggaagttcgacaggatggtccggccggcctcggtgtgggcgacctcgggatggaactgcacgccgtagaattttcgcgcgtcgtcggcgatggcggcgaagggcgagccgtcgctgatcgccaggacgcggaagccggggggaatggcggtgatcttgtcgccgtggctcatccaggcggtgctggcggcgggtacgccgtccagcagcggcgagggggcggcgacggtcagcgtggcgcggccgaactcgcggtggtggccgatctcgaccctgccgccgagctgggcgcacatcgcctgctcgccatagcagatgcccagcaccggcacgcccagctcgaacaccggctgcggtgccctggggccgctgtcctcggtggtcgacgccgggccgcccgagaggatcaccgccgccgggccgaaggcgcgaacccgctcctcggagagggtgcagggctggatctcgcagtagaccgacagctcgcgcagccggcgggcgatcagctgggtgaactgcgagccgaagtcgaggatgaggacgcgctcggtcatggggctccggccggctggatgggctggcagatagggcagcgggcggcggaaaggaagcggtggcgctcggctgtcgacaggcggcgcgcacgtgctatatgcggccaccgcgtcgagcgggcgtggtggaaccggtagacacgcgggatttaggttcccgtggcgcaagctgtgcgagttcgagtctcgccgcccgcaccacgccactccccgcggatttcgtcaaccagggccggcggccgaacgggcaaccggcgatcgaagcgagctttcaggacgatgcaggtcacgcaggtagccgccgacgggctgaagcgcgagttccgggtcgtggtgccggccggggagatcgaggatcgggtgcaggcgcgcctgaggaagctcgtccagaccatccgcatgccgggcttccgccccggcaaggcgccgctgtcgctgctgaagaagcagtacggccgctcggtgatgggcgaggtgctggagcaggcggtcgacgagggctcgcgccaggcgatcgacgagaacagcctgaagccggcgctccggcccaagatcgaggtcacctcgttcgacgagggcaaggacctcgagttcagcctgggcgtcgaggtgctgcccgaggtgcctgccgtcgacctcgacgccatcgagctgacccgcctttcggccgagcccgacgaggcccgcatcgagcgcggcatcgagggcttcgccagggcgcgcgccacctacaaggcccccgagacgccgcggccggcccaggacggcgaccaggtcgtcatcgacttcgagggcttcatcgacggcgaggcgttcgagggcggcaaggccgagggcttccggctggtgctgggcagcgacagcatgatccccggcttcgaggccggcatcgtcggcgccgagatcggcgaggagcgcaccgtcgaggccaccttcccggccgagtacggccagccgcagctcgccggcaggaccgcccagttcaaggtgacggtcaaggagatccaggaggccgagccgtacaccatcggcgacgagtgggccaagggcctgggcttcgacgacctggcctcgctgcgccagctgttcaggggccgcgtcgagcaggacttcaaggccgcctcgcgccagcggctgaagcgggcgctgctcgacaggctggcggcggcgcacgccttcgacgtgccgcccggcatggtcgacctcgagttccaggcgatctggaagcagctcgaggacgagatgaagcgcaccggccagaccttcgaggccgagggccagaccgaggagcaggcgcgcgaggagtacaggtcgattgccgagcgccgcgtccgactgggcctgctgctctccgacatcggcacgaagaacgaggtcaaggtcgagccgcaggagctgcagcaggcggtgatcgcccaggcccagcgcttccccggccaggagcgccaggtgatcgagtacttccgcaacaattccaacgcgctggagcagctgcgcgcgccgctgttcgaggacaaggtcgtcgacttcatcgtcggccgcgccagggtcgaggaccagacggtcagccccgaggagctgatgcgcgatcccgacgacgagcctgccgacgccaggcccgccgaggctgtggaagaagccaggcaggaggccgcgtcgtgagcggcgcgccgaccttcgctcagctggtgccgatggtggtcgagcagaccagccgcggcgagcgcgcctacgacatctactcgcggatgctgaaggagcgcattgtcttcctcaccggtccgatcgaggaccacatggcgagcctgatcaccgcccagatgctgttcctcgaggccgagaaccccgagaaggacatccagctctacatcaactcgccgggcggcgtggtctcggccggcctctccatctacgacaccatgcagtacatccgctgcgacgtcgccaccttgtgcatcggccaggccgccagcgccggctcgctgctgctgcaggccggtgccgccggtaagcgcttcgccctgccgcacgcccggatcatgacccaccagccctcgggcggctaccagggccaggccaccgacatcgagatccacgcccgcgagatcatggcgaccaagcgcaagctcaacgagatctacatgcgccacaccggccgcaccctggccgaggtcgaggcggtcatggagcgcgacaccttcatgagccccgagcaggcccaggccttcgggctcatcgacgcggtggtcgagaagcgcgaaggcacctcggtcgcgaaagagggctgagacaccgggcccgcttcacgtcggccgcgccctccagccgccggtcggctcctggtcgatccagccagggacggcagcaccgggcggcaggcgggagaggatggtccggggcagcgggatcggcgccgccgggttccagccgccgggtggccggggcggcaggatcgcacccggtgccgtggccagcggatcggccggccagggccagggatcggccctctgcaccggtgacggcgggcagatctccggcgccggtgccatcgccggatcggcggcctcggcctcgctcgggaacggcgcgccggcgaagccgccgaccggcagggcgcccggccggcaggcgtgaccgcccggcacggccgacgcacaggcgtcagcggcgggcgaagcgggccaggggcagcgctcgcgcagcacggccttcatctcgtcctcgggatcatcggcatcgtcgccgaacggcgacggtggcatggccgctgccacgccgggtgacggaccgtcggcggccgcggcatcgaggccgtccgccgcatcggtctccggccagacgccactggcccgcatcccggcctcggccctggcccaggtggggccgcgacgggtgagcatctgccactcgtcgagctgctcgtgggtcatgttggccatggcgttcatcagcgcatgcacgccgcgctgctcgtcctcgcgctggaatttctccggcgccatggcctcggtctgccgggcagcgaggtgcagcaggctgacccgctcctcggcgacggcgcgctcgatgacgccgcgcatcatccgccggacccggtcgagccattccggctggtgcatggcctgcagccgccgcgacgcctccagcacctcgccgaaccagggtgcctcggcgatcgcctcctcggccaccggcggcagcaccccggccgccagcgccgccaccgccatcggctggccggctgccatgtagtcggcgatgacgccgaactggcgcggggtgagggaggcggacatgggacgagagatatataggaaaataatctgaaaggcaataaaacccaatctggggagatcccccttcatggcacgaggaccatgaaggggtggcccttcgacatccgcagtcgatcgaagggttgcactccgcggaggccctgcgcgcctccttaccgtggaatcgcctcgctttccccttgctaggcgaatggaggatggcaaagctcggttcgggctgcaatccccaaaacagcgaggcgcggaatggcccgtattctcgggctcgacatcggcatcggctcctgcggctgggcggtcatcgacagcgagacggtgaatccggccaccggcgaggtcggcgacacaagggtcatcgcctgcggggcgcgctgcttcgacgtgccggaagagccgaagaccaaggagctgcgcaacaagaagcggcggcagctacgagggcagcggcgggtcatgcggcggcgtgcccagcggatcgccgagctgcggcggctactggtcgagcacggactgccgggcacgcccgggccgctgcccaagggaacgccgtccggcttggtgtggaagctgcgcgccgaaggattggatcgggtccttacgccggaagagttgagccgtgtgctgatccatctggccaagcatcgcggcttcaagagcaacagccgccgccagcaggccaatgacagcagcgacgacggcaagatgctcaaggccgtgaccgagctggacaggaagagtgccggctggcggacggtgggcgagatgctggcgcgcgacacggccttcgtcggccgcaagcgcaacagcggcggcgactatagccacacgctgttgcggcagcggatcgaggaggagacgacgaggctgctggaggcgcagcggcggctgggcaatccagcggtcaccgaggccacggcgcgcaaggtcgccgatgtcgcattcttccagcggccgttacgctcgagcatagggatggtgggacagtgtcggttcgagccggccgagatccgcgctgcgcgacacgcgccgtcgttcgagcggttcaggtttctgtcgcggctgaacaatctgcgtctcttacagcgtggcagggcaccggcggcactcgacgaagagcagcggcggcgcgttctggctctgatcggcagcaagcagaggttgctattcaaggatctgcgcaaggcactagccttgcccgagcccatcacgttcgacggtctgccggcgacgaaggatccggaaggtgcaggtttcgccgacttcacgggctcggtgaagctcgcccaggcgttggggcgcccaggattcgagaccttgctggcgcgttcgcccgatatactcgatgcggcgatgtcggcgatcgtgttccatgagaccgacgaggaggtcgacaccaagctaggcgaggccggcttggctgcgaccgaccgggctgcgatcatgacggccatcggcagctttgccgggctcggcggcgccgggcatatctcggccagagcctgccgtaacctgctgccgcatctggcccaggggctggtctacagcgaggcctgccggctcgccgactacgaccacacggcgttggccgagatcgccctcgacaagatccccaatccggtcgtccgcaaggtgatcggcgagacgctgaaacaggtgaaagcggtgttccggggccatggcgaacccgacttggtccatatcgagatggcgcgcagcctcggcaagagtgtcaaggatcgcaccgagatctaccgtgcagggcaggagcgaggcgccgaccgggagcggcataagaaggagtatgccgaggcgcatggtgggcgggagcccaacgacgaggagctggagcgctacgagctgtggaaggagcaggatcaccgctgcctctacagtggtgactacatatcgccgtcgcaactcgttgccggcgacaacagtatccaggtcgatcacatcctgccctactcgcgcagcggcgacgacagcttccgcaacaaggcgctggtgacggcgagggccaatcaggacaagcgcaaccagacgctatgggagtggttcggcgaaggcgatcccgcgcgatgggaggaactggagatccgccttcggaccctgcagggccttcatcaccagaaacgcaagaagcttctgctcaagtcgttcgcagagcgagagatcgcctatagagaccgccaccttcaggacactcgatacatcattcgcatcttcgccttgttgctgcagcagcattggccgtccctcgcgacggagatcggtggcgcacgacgcattcgcacccgtgcaggttcggtcactgccatggtacgacgcgggcttgggctcgatcgatacaagaaatcgggcgaactgggtgatcgggatcatgcgctggacgcgctgatcttggcatggacaaccgagtccctggtctatcagcttctcgccgatgcgaagcggatggaagagacggccaagcaccggcacatcccgtcgctgattgccgaccagaccgacaaggaacgtctgcgccagctctttcttggtgcggtcgagtcggtgttcgtgtcgcggccggaggtcaggcgggggcgaggtccggcgcacgacgccacgctctacggcttcgagcgcggcgacgagggcgagatccagtatgagcgcaaggcggtcatcgacctcaagccggccgatctcgagcggctgaaaggagatccggcgcggacggcgcgtctgcgagaggcgctgtcggcgtggctggcgaaggccgagcggcaaggtatcaagccgccgaagctgttcgccctcgacccgccgcggatgcccagcgccggcggcgacgggcccgtcatccgccacgtgcagctgcgccggcgcagcacgcagagcgggatcaagatccggcgcggctccgagcagccggaggcgcatgccgacttggcgacgatggtccgggtcgatgtcttcgagaagggtaggaaaaactatctggtgccggtctatgcctaccaggtcgccgaccgcgacggatggcccgaccctccggtgcgggcggtcaagggcgcgcgcggcgaggaagcatggcacgtcgtggacggcagcttccgtttcaggttcagcctctattcgtcgtcgctggtcggctggcccggcggcgacggataccgcttcggctatttccgggcactcgaccggaataccggtgccatcaaggtggcgccgcacgaccgttccgacagtgcggagcagttgaagatcagcccgatgacgatcgcgggcttcaacaaatacaatatcgatcgtctcggctctcggcacctcatcgaaagggagccgagggaatggcgtggagaggtgtgcatgtcagccagcgctgtcggctgagtctcgacaatggctgctgcctcgtcgagacggaggccgggccgattcggctggcattcgaggacatcgcctatgtggtgctcgatacaccgcaggtaggcttgacctcggccgtgctggcggccctggccgaagcgaaggtgctggtgctggtcagcgatgccaggcacctgccgacgggagcgctgctgccgctgcaggggcattttcgccaggtcggcacgctgcgacggcagatcgctgcggccgacggcttgaaacgccggctgtggcaggcgctggtgcgggccaagctcgtcaaccagggggcggtgctcgacacgctcgggcggcgcagcggccctgcgctttcggcgatggccgagcgggtggcgtcgggcgaccccgagaacctggaggggcaggcggcgcgcgagtatttctcgcggctgttcgagggatttcgccggcggcgggacggggatgtccgcaacgccatgatgaactatggctatgccatcgttcgcgccgcgatcgcccgtgaccttgccgcccagggcttccacccggcgctcggactctggcacgactccgtcgagaacgccttcaacctcgccgacgacctcatcgagccgctacgaccggtggtcgatctcgccgtggtccggcgcctggaggcgcgcgatcccgatgacggtgaggagctgacgatcgacgaccgccggtcgcttgccggcgtgctcaccctcgacgtggcgctgggcggggaatgcctcgccatgatgcacgcgatcgagcggatgtgcgacgggctgctggcggccctgacctcgaagagccccgagcggctgccgctgcccggcctgcgggcctgaggcgatgccgacggcggaggtgcgcttcatgtggctgttctgcttcttcgacctgccggtgaagaccaagggccagcgcaagacggccggccagttccgcaagttcctcaaggccgatggtttcaacatgctgcagctctcggtctacatccgtgtatgccgcgaccaggacggcgtggacaagcacgtcgcgcgaatctgcaagcggctgccgagagagggcagcgtgcggacgatccaggtcaccgagcggcaatatgcccggatgcggaccttggtcgggaccaagcaggcgcatgaaaagccagcgggcgaccagctcctgctgctctaggaggctgaaaacgggctgttttcagcctcctagagcgggcggaggctagcagggggaaagcggaggggaaaccacggcccgcggcggcatcacccgcaagcgaatccgaggctagcagggggaaagcggaggggaaaccacggctgcggctgtgagccagtcgtcgccaggtcgaggctagcagggggaaagcggaggggaaaccacggcctatcagaggctcttcacgtcgccggacggaggctagcagggggaaagcggaggggaaaccacggccgcgcacagccgccggtggatgtatccgcgaggctagcagggggaaagcggaggggaaaccacggcctcggaaatctgcgccgtttcgacgcgcttaggctagcagggggaaagcggaggggaaaccacggctgtgccgctcccccgccgctacagcgaagaaggctagcagggggaaagcggaggggaaaccacggctggcgtgtcgcgccgcgcgtcgaatacggtaggctagcagggggaaagcggaggggaaaccacggcgcccgtgagcgctctgcccgacgactggataggctagcagggggaaagcggaggggaaaccacggccaagattcagtattgggccgccgagtcggtaggctagcagggggaaagcggaggggaaaccacggcacgatcagccactgcccgactgtctcacgcaggctagcagggggaaagcggaggggaaaccacggccacgcgagcacgcgcgcgcgaatgcccccgaggctagcagggggaaagcggaggggaaaccacggctgacgaaggcttgttcgctcacacctgcgtaggctagcagggggaaagcggaggggaaaccacggcccaacgcggcgacacttggcaggcccgcgtaggctagcagggggaaagcggaggggaaaccacggcgtcgctgcaatggcggctgtcgtgggacggaggctagcagggggaaagcggaggggaaaccacggccgagctgggcgcagtgcgtctcgcggccctaggctagcaggggggaaagcggaggggaaaccacggccgaacagatgatcgaaaccgcgagcgcgccaggctagcagggggaaagcggaggggaaaccacggccgtcgggttgaggctcggctcggggcacggaggctagcagggggaaagcggaggggaaaccacggcaggtgtcgcgcgagcgcaccgaggcgtcgcaggctagcaggggaaagcggggaaaccacggcgcagtgcccggctgccgacgcgcagctcgcaggctagcagggggtaccaccccctgtggcaagcccgccacttgccatcgacctatggcgcacgacataattctcgctgtgaccgtgagcaggcaggtttcgcctctgaggggaatgtcggggcgcagattcgtgccccggttggtgttgccggttgtctcgccggcgctcggccgttacgatcaccgcgtcgccatgcccgcaccggctgcccgaggaacccccgatcgatgagcaagtccaacggcgattccaagaacacgctgtactgctcgttctgcggcaagagccagcacgaggtccgcaagctcatcgccgggccgacggtgttcatctgcgacgaatgcgtcgagctctgcatggacatcatccgtgaggagaacaagaccgccgtcgccaagagccgcgccggcgtgccgacgccgcaggagatcaacgccgtcctcgacgactacgtcatcggccaggagcacgccaagcgcgtgctgtcggtggcggtgcacaaccactacaagcgcttggcgcacggcaacaagggcggcgacgtcgagctggcgaaatccaacatcctgctgatcggccccaccggctgcggcaagaccctgctggcgcagacgctcgcccgcacgctcgacgtgccgttcacgatggctgacgccacgacgctgaccgaggccggctatgtcggcgaggacgtcgagaacatcatcctgaagctgctgcaggccgccgactacaatgtcgagcgggcgcagcgcggcatcgtctacatcgacgaggtcgacaagatcagccgcaagtccgagaacccgtcgatcacccgcgacgtctcgggcgagggcgtgcagcaggcgctgctcaagatcatcgagggcacggtggccagcgtgccgccgcagggcggcaggaagcatccgcagcaggagttcctgcaggtcgacaccaccaacatcctgttcatctgcgggggcgccttcgccggcctcgagcggatcatcggcgcccgcggcaagccgcgctcgatgggcttcggcgccgaggtcaggagtccggacgagcggcagaccggcgagctgctgaaggaggtcgagcccgacgatctgttgaagttcgggctgatcccggaattcgtcggccggctgccggtggtggcgacgctcaccgacctcgacgtcacggcgctgatcaagatcctgaaggagcccaagaacgcgctggtcaagcagtaccagaagctgttcgagatggaggacgtcaagctggcgttcaccgaggacgcgctgaaggcgatctcggagcgggcgatccagcgcaagaccggtgcccgcggcctgcgctcgatcatggagggcatcctgctcgagaccatgttcgacctgccgtcgatggacggcgtggccgaggtcgtgatcaatcgcgaggtggccgaggccagggccaagccggtgctggtctatgccgagcgcaaggccgagaccggggcggcctcgtgaggcgagcccaccggggcggtgcccccggcttgaatctgcgcctgcccggggccaattgaggtccagaattctttcaatggcgcgcctgtcctcccgaggcggccgccgcggcgaggaaagatgagcgaaagccaaggttccagcctgttcccggtcctgccgctgcgcgacatcgtggtcttcccccacatgatcgtgccgttgttcgtcggccgggaaaagtcgatccaggcgctggaggaggtgatgaaggaggacaagcagatcctgcttgtcgcccagaagaacgcctcccaggacgatcccggccccgacgacatctatcgcgtcggcaccgtctccagcgtgctgcagctgctgaagctgcccgacggcaccgtcaaggtgctggtcgagggcaacgcccgcgcccgcatcgacagcttcgtcgacaacccgcgcttcttccaggtgcacgccgacgtgctgcccgaggccgacagcgacccgcgcgaggtcgaggccatggcgcgcgccgccgtcacccagttcgagcagtacgtcaagctcaacaagaaggtgccgcccgaggtcctggtctcgctgtcgcagatcgaggatcccggcaagctcgccgacacggtggcggcgcatctgtccttgaaaatcgccgagaagcaggagctgctcgagaccagctcgctggccgagcggctggagcggctctacggcttcatggagggcgagatctcggtcctgcaggtcgagaagcgcatccgcagccgcgtcaagcgccagatggagaagacgcagcgcgagtactacctcaacgagcagatgaaggcgatccagaaggagctgggcgagatcgaggagggcaaggacgaggcctccgagatcgaggagcgcatcaagcgcaccaagctctccaaggaggcgcgcgacaaggcgcgggccgagctgaagaagctgcggaccatgtcgccgatgtcggccgaggccacggtggtgcgcaactacctcgactggatgctgtccatcccgtggaagaagcgcaccaaggtcagcaaggacatcaagcgcgcccagcaaatcctcgacaccgaccactacggcctggacaaggtcaaggagcggatcgtcgagtatctggcggtgcagcagcgcgtcgacaagatgaagggcccgatcctgtgcctggtcggtccgcccggcgtcggcaagacctcgctcggcaagtcgctggccaaggccaccggccgcaacttcgtgcggttctcgctcggcggtgtgcgtgacgaggccgagatccgcggccaccggcggacctatatcggctcgctgcccggcaagatcatccagagcatgaagaaggccaagagcagcaacccgctcttcatgctcgacgagatcgacaagatgggccaggacttccgcggcgatccgtcctcggcgctgctggaggtgctggatcccgagcagaacatcaacttcaacgatcactacctcgaggtcgactacgacctgagcgacgtgatgttcgtctgcaccgccaacaccctgcgcatgccgcagccgctgctcgaccgcatggagctgatcaggctcgccggctacaccgaggacgagaagctcgagatcgccaagcgccacctgatccccaagcagcgcaaggagcacgggctcaaggacaacgagtggtcgctgtccgacgacgcgctggtggatctcatccgctactacacgcgcgaggccggcgtgcgctcgctcgagcgcgagatcgccaacctggcgcgcaagtcggtgaaggagatcgtcgccggcgaccgcaaggaggtgcggatcacccgccgcaacctcgacaaattcgccggcgtgcggaaattccgctacggcgaggccgagctcgaggatcaggtcggcgccaccaccggcctcgcctggaccgaggtcggcggcgagctcctgaccatcgaggccgtcaccgtgcccggcaagggcaagatgacgatcaccggcaagctcggcgacgtgatgcaggagtcgatccaggcggcccgctcctatgtgcggtcgcgctcgcccatgctcggcatcaaggccgacgtgttcgacaagttcgacatccacatccatgtgccagaaggtgctacgcccaaggacgggccgtccgccggcatcgcgatggtgacctccatcgtctcggtgctgaccaagatccccgtcagggcgtcggtggcgatgaccggcgaggtgacgctgcgcggccgggtgctgccgatcggcggcctcaaggagaagctgctggcggcgctgcgcggcgggctgaagacggtgctgatccccaaggacaacgccaaggatctcgccgacattccggacaatgtgaagaagggcctggagatcatcccggtggcgtcggtcgacgaggtgctgaagcgggccttgacccgccagcccgagccgctgccgcccgaggacgaggtcaaggccgtgccgccgccgcccgaggcgacgacggtgggggcgatgctgccgaactgagccggaaccggctctgccaccgaatcccgaggcccgccgcgaggcgggcctctgctttttcgcgccggcaccgcgcggcggcgagcttccgaacgccgtgaatttcgcatatcactgcatggctttccgagcccggacggccggacgttctcatgcgcgtgggacttccggccgcggatgaaggggaaacgcatgccgcggccgcggttgttcgccgtcttgctcgtcacgaccgtcgtagccgtgggcctttcgctgcccgccgatgcgatgatgaggaggggagcggcgggtcccgcgccggaccctgcgccggagatgccgagatacgaagacgacgggatccctctcgaaggggcgccggcgagcgcgctgccgacgccgccgctgtccaacaacgcgacgccgcgcaatccgacgtactcgatcaggcccagggccgcgacgcaggcctctgcgacgtcatcgacctccacgccggccgccacatccacttcggcgccgacctcgacggaatcctgggcggcgatctcgcgccgagtggacgaccaccccggacctgcgccgccgaagccgcagatgaaacccacgaagaagaagaaggccggtcccggcgccagttcggctaccagcgccacggcatcgggccccaggccaacggccaagcgcggaccgcagacctcgacatcggcctcgacggcgtcgaccacgccgcaagccgcggcatcgaccgccgcgaggcaaaggacagtcacgactgcagccgcggccacgaccacgaccgccactgtcagcagccccggccggaggccggccgcgacgacggccacggccacgagagccgatgccccggccgtgagcgcggtgcggacggtgaccacgccccccggatactcgcaggcgcctacgccgacggtgatccgccgcacgagccccgccgccgcaaaggccccgccggcccagccatcggcacccgggggcaagcgctgacggcggcgatgcgccggtcgcggttgccggcgaggctcgtgggatagtggtccgccgatgtcgaggagtggtcgaatgctgtggcgtgcagccctctttctgatcggcgccgcgtggctggcctggtcgcccggcgagcttcgtgcccaggcaggcccggcggcgccggcatcggggctcaccgtcacgctggtcaacagcggtgccgctcccgtcgatctcctctggatcgacgagcacggggcgacacagcccctcgacatcaccatcgcgcccggctggcagcaggccctggaagaggtggcaccaggaacgagaatattggtccgtgacagcggggcgacggccggcgtcgagccgttcttcgagatcaccgccggcaacgagccgccggtgcaaccgatcgtcatcccggattcccggctgctgcggccggcggagctgagcatcgccaatccgctggacagcgaggtggtggtctacctgccttccgagaccagcgagggcgagtgggccgagttcgatcgcatcgcggcccgagccgggccttcctactatgacatgccgccgcgaacggcgctgaggatcgaggccgcggacggcagcctgacgctccatttcgaggtcggcctcgacgcgcaacagacactggatctcgccgccgtcaccgatcccgccggccccacggccagggtcacggtcgacaaccgcacgtcggcggccgtcaccatcgaggagctgcgggcggctgtgcggcagcggctcggcagcgtggcggcgggcaccgtcggcgagaccgatgccgttgtgggcgccgatctgcggatcctggccgacagcggcgaggagctgggcctgcaccacgtgacaggcgaggccggccagtcggtgctgatcgagggcgctgtcgaggcggagaaggccgtgccgcccgcgaccggtatcgacctctcgctcctgcccgaggtccatcgcacagctgcggccgccttcctgaagaccggcgaggctttcgcccagaatgccgagataaccacctatgtcgcctacaacggcagtgacgagccggtctggtacgccgggctcgagggcgacaatctggtcgggccgaagaagatcatgccccgcgccatcggcaacgtcatcgccagggtcgggaatttttccatcgcctggcccggcgacattccgccggagcggatgacgcgggccgacgtcgtcacctcggtacaggtcgccaaggacatgcccaaggtggtcgacgtctcgccgccgaagcaggtgacgctcagtgtcgacaaccgggtgtgcaagccggtggtgctctaccgcgtggatccgttcggcgacgagcagccggttgcttccatcgacccgatgggccgctcgaccgggacgttgatgctgccggcccatgccatggtggtggcccgcgccggaccggccagcctgctcgccggcgagaagctgtggacggcacggctgggcgatggctcgcagcaggccgtcgccatcgaggccggcagcaccgccggctacgatccgatgcgcgtatcgacggcggaaggcgccgagcgcaccgtccacatccacaactcgaccagccgcagcgtcgacctgttcgaggtggacgcggaggggcgggagctgaagctggagaccccggtcggggccggcaagaccgagacctactacatcaagcagggcacggtgctggtgttccaccggccgaacgtgccgccgtcgatcagcgaatatgcccggatgcgggtcggaccggagcccaaccagcaggtcgatgtcggcgcgctgcgccggtcgcgcggcgtcgtcggcagctggatcgacatggagcggccggcgctggcggagcccaacgatgtcggcaccaccttcgtctccttcgtcgaccagggcggcgctggtgctgccggcctgcgcgtcgccggctcgatgaacaagggcgacgccgccatcggcggtgctgcccgcttcgagggctgcgccgacgaccgggaagccttcggctattggtatccgaccgacttcgtcatcaagtgcggcgtcagccacaccggcggcgacggtgtggcgacctcgagctacggtcggttcgccgcccagcggacggccgccggcacgctggtgctgcgacgtggctattgcgacgaccagccggcgcaggtgtcgacctggtatccgctgccgcagcactacgacgacatggatccgtcggccgaggcctaccagaccggcttctaccagctcacctgggcgccgccgagcttcgactcgatgggtcgcggcttcgacctcctgcgcactgatccgctggactacgacgccccggcgccgggcacgctcagcgacagcccgctgttcgacttcatctacgaggaccgcgccggcagcgccggccagatcggcgccaaaagcatcttcggcgtccgctcgcagggcatgcagagccgctccgaccgctgcgaccgcgacgagaagctggtgcgcaccct

SEQ ID NO: 3100 - DNA, 24662 bp, synthetic construct
  misc_feature 1..24662: note = Synthetic
  source 1..24662: mol_type = other DNA
acactaattttaaacccaatcaagctgagtttgaaaagccaaaagtagatgatctaacacaaaagttattacctataaaagataatccagggaatgtaggagaacgtttttctcctcgtatacgtttacacctagataaatctcattttgaaaataatatcataaaagctgattcaagatatttaacaaacaataatgcttttgtaaattattataaaggtttgacatttagagtatctagaaacgaaggcacaatgatggggctagattttaagaaaggagatgtaacaatttattacaaacaagatagaacggataataaaggaaaagaaatgaaaaccttcgttcttaaaatgacgggaaataatttaaatattttaaaacataataagtcggctatttatgcaagtgctctttcatccaatacaccaacggataatttattcttaaaaggtggtcaaggatcaatagcagaaatcaaaatagaccaagctttaattgatgatttaaaaaataaaggagcactcgttaatgatgctagtttgtattttactgttgatccaaattttgtaaactcgctaagcagtagtaataagtctttttattaccttaatccaatgcgtttatacttgtttaatgcagaaaaaacaagatcattgttagattatacaaatgatattaccaagctaactaatgttcctaaaaaggataaatatgttcacggaggtatattacaaaaagtaaatgataaatatatgtatcgtattcgattaacggatcatattaatcagattataaatgataaaacaggcacttataccaatgtaaagttaggtcttgctattgccgaaagtatttatataacgcctgaagcacagggattatcggctataagtgcattaaaaaacacaacaaatattttaaaaagtattccttcaactgcagtaataagccctttaggtgttgttttaggaggaatgcaaggagataataaagttcaatttaaaataagctatactaaacgaaattaatatgtgtggaattgtaggatatataggatatagagaagcttatcctattgtagtaaaagggttaaaaagattagaatatagaggttatgatagtgctggtttggtactgtatgatggagaagacataaaattatctaaaaccaaaggaaaagtttctgatctagaagaaaaatcgaaaacagaaataacattaagtggaaccataggtattggtcatacacgttgggctacacacggagttccaaatgatgtaaattcgcatcctcatacttctaattctggagacctggttattgttcataatggaattattgaaaattatgaacccttaaaaaaagaattaattaacagaggttatgtttttcattcagatacagatacagaagtattagttaatctgatagaagaagttcaaaaacaagaaaatataaaattagggaaagcagtacaaattgctttgaatcaagtagtaggagcctatgcaatttgtgtttttgacaagaaaaaacccaatgagatagtagtagctagactaggtagtcctttagctattggagtagctgaaaacgaattttttatagcttcagatgcttctccttttattgagtacacttcaaacgcaatctatttagaagacgaagaaatggctattattcgtttgaaaaaaggattaaaagtaagaaaaattaaagatgattcattagtacatccttatgttcaagaactaaaaatgaacttagaacagattgaaaaaggagggtatgatcatttcatgttaaaagaaatttacgaacaacctaacgtaataaaagatacttatagaggacgtttgtactctaatgaaggaatcattaaaatggctggtgttgaagataatttagagaaatttacaaatgccaatagaatcctaatagttgcttgtggtacttcatggcatgcaggtctagtagcagaatatatttttgaagagtttgctcgcattccagtagaagtagaatatgcctctgagttccgttatagaaatcctatcattagcgataaagatgttgtaattgcaatctctcaatcaggagaaacagcagatactttagcagccatcaaattagcaaaagaaaaaggagcgtttgtatttggagtttgcaacgtagttggatcttctatctctagagagtctcacgctggagcttatacacatgcaggaccagaaattggggtagcttccacaaaagcatttactacacaaattacggttttaaccatgattgctttacgtttggctaaagcaaaaggaagcttgtcaaaatcagattaccatcgttatttatctgaattagaggcaatgccagaaaaagtagaagaaacattgttaacaaatgaagtttcaaaagaaatagcggaggtttataaagaagctaccaattgtttgtacttaggtagagggtacaattttccagtggctttagaaggtgctttaaaactaaaagaaatttcttatatacatgctgaaggctatccagcagcggaaatgaagcatggtcctattgcattgatagatgagcacatgcctgtaattgttattgcacctaaacaaggacactatgataaagtggtaagtaatatccaagaaattaaatcccgtagtggtaaaataattgctgtagtaactaaaggagatgaacaagtgcgctctttagcagatcacgttattgaaattccagaatgttcagacgctttatcaccattattaacaactattcctttgcagttattgtcataccatatagcagtactaagaggttgtaatgtagatcagccaagaaacttagctaaatcagttacagtagaataattatacgtatataataaaaaagcggtagtcttgttttagagactaccgcttttatttttatagtgtttctttaagccatttaaaaaattcgcgttgccataccaatgcgttttgtggttttaaaacccagtggttttcttctggaaaatgtaaaaaacgactttttattccttttaattgagctgcttgaaaagcttcttgaccttgtcctaacggaactctatagtcttttcctccttgtataataagaataggagtagtccagttattaattaaatgaattgggttaaaatcgttgtacgttttttgtgcaacaatgttattcttttcccaataagcccctcctgaatcccagtttgtaaagaacacttcttctgtagttccatacatactttgggtgttaaagataccacaatgtgaaataaatgttttaaaacgattgttgtgaattcccgctaagtaaaatactgagtacccaccatagcttgcacctacagcacctaatcgggttttgtctacataagattcttttgttatatcgtcaatagctgataaataatcatccattacttgaccaccccaatctttgctaatttgttcattccattttacaccatgaccaggcattcctctacggtttggagcaactactatatagccttgtgatgcaattgtttgaaaattccaacgaaaagaataatattgagttaaggcactttgtggtcctccttggcagtataatagagtagggtatttttttgtagcatcaaaatttggtggaagtataatccaaaccaacatttttttaccatctgtagtggttacgtaacgtctctctgttttacataaatttaaatttttataaatttctgtattaacatgagttatctgattccaagatttgttttttaaatgataagaataaatttcagaagcatgattgatgtcatttctcatcaaaagaatttgatcaggtgtaaaatctataatctgcgttatgtcaaaatcaccattggtaatttgtttaactccaatagctattttggtcaatcctggaaagtttacttcaaataattgctttgtgccatctataggagcaataaaatagattttttttccatctttactccatttaaaactctctacagttccatcccagttagcagttaggtttatttcaattcctttatgttttacaataatatcatttttatcagcttcgtaaccatcttgtttcatctgtagccaagtaagatcaccgtttggtgaaaaatcaggatgtgtgtcataacccggattattaggtgtaagatttacagtttgtttagtttcaatattatattggtataaatcagtgttagtactggttgcataagccgttccagtcttttttttacagacatagatgatgtttttactatcaggagaccaaatataatcttcatcaccaccaaatggtttttgtggagcatcataaggttctccttccataatgtctatagctggagccaaacgtacattaggtgcaggtactccgccaaagaagacatgattgtatgtgccatctcgccaagtatcccaatgacgataatcaagaccgtcataaacttgagcatctgacagagataattctgggtaaaaatcttttcctaatacaggagttattttaacttctttgtcagaaagtaagtacattccatcaggagaaatgttcttgttttttatcaattctgtgtactctttaatttcactggcattaccacctgtaatagaaatgctataaaatttactagtagatttgttttcctcaatagatggggtagctactttataaataatattttttccatcttttgatactccaagaggtgttacacgacctaatttccataataaatcaggagtcatgatgttttgtgcgattccagaattaatactcataagcgttacgcttaatagcgctagttttttcatttttgatcttttttgctaaaataatgattttattaaaaaaaaagctatctctaagagatagctttttggttgggggttgggttaattatcaaagttattctttgataaagcgtttagtaacagttgaatgcaaatcagaaacttctaatatatagtttccagctttacaattggttacattgatttgttcattgtttattttcccttctaaaactatttgtccaactaggttatatattttatacgttgccatttcagaaatacctttaatagtaagtatttcggaagttggaatagggaatacagtaatttcaaaacctgaggcaatatttttttgattttctttagcactcgaagtaatgttaatagtgtaatcttctacttgtccataagaaaaagtttcacatgaagtaggaattccattgtacttcatagatattctcattctagttgctcctaaaattgctgttgctggaattgtaaatgtaccagaaacgggtgttgtagtagaaggggctttagtccaaacagtttcacctgcatctgtaaaatcaccatcttgattataatcaataaaaagggcatagccttcaggataagttgttgatttccatgatggagtaattgttatcgtttgagttgagcttcttactgctgaagtagatagagttgtaaagttttcgtaaccaacagtgctagtagaagtattattaattgttccaattacaacttttcctattttttcatcagcagtactattgccttttgaagtgcaataagtaagtgtgttagatagtgtagttacgctaacaatattacttgcaatagaaatattacccgcggcatcttttgctttcactgtaaaagaataggttgtagaaggggttaagcctgttacgttataagttttagatgtaatggaacccaataaagtagttccttgatatatttcatatcctgtaacgcctacattgtcagtatcaccattccaagataagttagtagaagaagttgttgtaccagatgcacttaatattggagcagttggagcagttgtgtcaattacattagctaaagttgttacgctaacaacattgcttgcaatagaaatattacccgcggcatcttttgctttcactgtaaaagaataggttgtagaaggggttaagcctgttacgttataagttttagatgtaatggaacccaataaagtagttccttgatacacatcatatcctataacacctacattatcagtgtcaccattccaagataagttagtagaagaagttgttgtgccagatgcgcttaagacaggagctgttggtggtatagtatcagatgtacttaggtttacagtaatatttgcattgttaacatcaaaaaagatatgatttgatcctttaaccataattcggcctgtagtagtagcagtattaggtattgttatattttcggatccatcattaggtgttcctgctaataaagttgtccaagttgcaccattatttgttgaccataaaatatctacattagagcagttaacaccatttgcagtggtacctgctacgttccaagttattaattgagaagtgcctcctgtataagaagtttcgcttccttgagaagtaatagcaaaagggccagcagttccattaactgttacgatcatatcatcagagttgttagcaccaccaccagctctgttatcacgaacggtaaaacggaaattcatagttctagcaatagaaggtaaagcttctactaaaatttcagaaccttgtgtagtagttgctcctgttagaatagaagccatttgaggaaaatatctcgaaggaattgttgtaggggtataagatctaaaaataggaccagacaccttggttgtactagcagcagaacttgttccagtttgggttgaagtagcactgtcaaattgttcccaaatataagttaagacatctccattagcatcagttcctgtaccagtaagaacaaacggagtgctttttggaatagtaaaatctaatccagcatttgcagttggaatagcattacctgttggagtgtttacagcgcacgcttttgtttttatattgttagtaacttgttgaatgctataagcgtgaaaataagcgtcagaatgagcttgaacatcttgtggtgtaatgccagcatatcccataattgtagacccagaacctggctccatattagctccagttctttctttactatgagagtgtgtatgattagcaccaaattgatgccccatttcatgcgcaacatagtcaatatcaaaattgtctccttgtggtattccatcaccaggagatgtatatccagaacctttgttttgatcggtcgtactagaagtgtcatctacacaaatacagccaatacaacccgcgttaccaccacctccagaagcaccaaataagtgtcctatgtcataagctccattgccaatggtattggttaggttattttgtaactcagtattccatgcgcctcctgaacctgtagaagcaacggaataaggatccgtagaagcatttgtataaataagtacatcattatttgcaatcaggttcattctggtattaaaatctttttcaaaaacaccatttactcgagtcattgtggcatttatagcagccaatgcttgtgctacggtaccaccaaaataagtcgtgtattcacctgttacggataatgctaaacgaaaagttcttaaagtgccatcatctgcattagggcgtaaattagttccagaaactttaaaacttggttctattttatcaattactttacattcaaatggtgataagttttcttttttatcagcttttttataaacagaataagtctttaaatctttagaataaggttcaatgaatgaagctgattttccagcatttaatgtcatagacttaaatcctaaaggagacatactaaaataagcagtagaagtaggattgtcaatgccaattcctatgtacgatcggatttgaggatatttagcttgtaaagcagcatccatattagagttttcgtaaactttaaatttttctaactttccttcagcatttggaagtgaaataacggttgcagaactagaacgaccaaatcggttaggagatttagataattgttttctgatcaaatcaatattcaagtcaaaaaggttcttatcaggaagttgtgttttgtattctattagggttctatgattggtattggtacgtttccataagccatcttgacccaatacaactcctgttgccaataaggcaattaaaagtaatttctttttcatttggttggttggtgttaataatggctgcgaatatatttatatttttttaataaaatgaaataaattataataaaatacgttaaaaaaaatagtttaaaataggtaaagtgcaatttattagtgaaatacttgtaaatatttgtttttttaaacaaaaaaagcagctcgtttaaagctgcttttttgtgttaaaatatatgtttattcaatttttataacaaaataattcttcttgcctctttgaagtaagacaaatttattattaataagatcctttgttttaagtataaattcctcagttactttttctttgttgacagaaattgaattttcagtcaatgctctacgtgcttcaccgtttgattttaaaaaacctgttttagtattaagtacatctacaatattgattccttcctcgatagcttctcttgaaatggttgcttgaggcactccttcaaaagcttctaagaaagtttctgagtctaatttttttaaatcttcagaagtagaatttccaaataacatattagaagcagcaatagctttatctaaagcatctttatcatgtacaaaaatagttatttcctctgctaatttgcgttgtaaaactcttaaatgtggagcttgacgatgttcttcaattaaagtttcaattgtgtctttatctaagaaagtaaatattttaatgtacttttctgcatctgcatctgttgtattaagccaaaattgataaaatttgtaaacagaggttttgtctgctgttaaccatatattccctccttctgtttttccaaattttgatccgtctgccttggttattagaggacaagttaaggcataggctttagctccttcttcttccgtatctacattcattctacggattaattcagtacctgtagtgatattgccccattgatcactacctcccatttgtaatttacatccgtatgttttgtataaatgataaaaatcatatccttgaattaactgatatgtaaattctgtaaaagacataccgtcacctgtttctcctgaaagacgttttttaacagaatctttggccatcatatagttaacggtaattcgttttcctacatttcgagcaaaatctatgaaagaaaaagttttcatccaatcataattatttactaatacaggcgcgttgtcatcggtagcattaaagtcaagaaatttagataaaacacctttaatcccttctacatttctagaaagactttcctcatctaataaattgcgttcgttgctttttcctgaaggatcaccaatcattcctgtagctcctcctactaaagcaaaaggtttatgaccaaagtttcgaagatgaactaataaaataataggaactaaactacctatgtgtagagaatctgatgttgggtcaaatcctatatatgttgccgtgctttctttcaacaattgttcttctgttcctggcatcatatcgtgtaccagtccacgccattgtaattcagcaattatgtttttcattatttaaaaaatttttgcaaagataagtttttagtttttagattgtaaatctcctatacgacatttttaataagtccaacaagccttaaaataaagtaaatcaaagaatttgtagttcgtataaatggtaaatcccacggagtacgcgggattttagactttcgtctacggcatatagccttattgtgataagattaaagattagaataattttatctgttgctaagataaaaaaaaatctaaaataattttatttttttaaacaaatgtttttttataagtttaggcgtaagctaaacaacataaaaaactattatgacaaaaattttaggtctcgatttagggactaattctattggatgggcgattagagaagatgaaaacgaaggagtaaatcaaattatagataaaggagtcagaattttctctgaaggagtaaaatctgaaaatggaaaagaaatatccagagctgccgaaagaacagcctacagaagtgcacggaaaataaaatatcgcagaaaactaagaaaatacgaaactttaaaagtgctctctattaatggaatgtgtcctctttctgttgaagaagttgagcaatggaaaaaatctggtttcaaagaatatcctctaaatcctgaatttcttaattggttacggactaatgaagataagaatataaatccttatctttttagagacaaagccagtaagcaaaaagttactttatacgagttaggaagagccttataccatatagcacaacgaagaggttttttgagtaatcgcttagatcaatcagccgaaggtgtttttgaagaacataacccgcaaattcaaaatttaattgaagatttagatagttctaatgcgatcttaaacgaattaaaagagtattatattaatcttggaattatagatgagtcagagaaaagtggttttaaaaaggatttagacgaaggagaaaaaaatctaaagaaattatacacttcattagtatccattacaaaaaagaatgctaatgatattgaaacatgtaaacaagagcttattgcgcgtctcaataaaaaggcagatttaggcaaagtaaaaggagaaattaaagatatttcacaagcaatgcttgatggaaattttaaaaccttaggtcaatatttttttagtttatataacaaaacaagaataagaaaccaatacacttctcgtgaagaacattatttagaagagtttatcgtaatttgtcaaacacaaggaattgaagggataaatacaaatgaaaaattacccgaaaaaaagtttacgggtttagctaaagacttataccgagctattttttttcaaagacctctaaaatcgcaaaagggattaataggaaaatgttcctttgaaaaaaacaaatctcgatgtgctgtttcgcatccagattatgaggaatttagaatgtggtcatacttaaacaccataaagataggcacacaaagcgagagtacattacgtttcttaacactggaagaaaaattaaaattagttccgaaattttacagaaaaaatgactttaattttgaggttttagccaaagaactggttgaaaaaggagctagttttggctattacaaatcttctaagaaaaatgagtttttttattggtttaattacaaatctacagatagtgtttctgcttgtgtagtttcggcttcactggaaaatgcaataggaaaagactggaagattaaaaccttcgaataccaaactagaaatacagaaaagaaagaagtcacaaaatctgtaaattacaaagatctttggcacttactttcagttgcaacctctgatacgtatttatatgattttgccatcgaaaaactaaaactagaacctaaaaacgcaaaagcatttagcaaaacaaaacttaaaaaagactttgcaagtcttagtttggcagctattgcaaaaatattaccttatttaaaacaaggattactgtactcgcatgctgtttttatggcaaatattgagaatattgtagatgctgacatttggaaagataaggagcaacaaaaatttattcaatcggaaatagttgatttaatagataattatttagtagaaaaaagtaagctggaaattattaacggcttattgaaaatatataatacagaagacatagagggtcgaaaagtgtattattctaaagaagctgaatcgctttttgaggctgatttgagaaaaaaactagttcctttttataaagcaaacactattaatgaggaacaagaacaagaaataatatttaaagacttgttccctgttttaatcgaacaattaaaaaaacaggaattcattaaaatagttaggttagataaaaaaattgaagcttttcttaaaggcgaaaatgaagagggacaaatattttgtaactatcctgaaaaatttaaaaaactctatcatccatctgatattgaagtattcaaaaagaaaattatcaaagacgaatggggcaatgaaaaagtagttttaggtagtccgcttacaacttccataaaaaacccaatggcaatgcgtgctttgcatcaattacgtaaagttcttaatactttaatactagatggacaaatagacgagaaaactcgtatccatatagaaatggcaagagaattaaatgatgcgaacaagcgaaaaggaattcaggattttcaaaaagaaagagaagagttatataaaatttatgaagctaaaattaaagaactttatcaagtaaaaacaggaaaagaactactccacgttaccgatgaagatttacaaaaatttgaatgggcattagaacaaactaaagatggaagaattataactaaagaagaactaataaaatacaaaatatgggaagagcaaaatcatatttgtatttatacaggcaaaactattagtatcgatagttttttagggggaaatccaaaatttgatattgagcatactattccaagaagtatttcccaagataattctcttatgaataaaacactatgtgataaagattttaacagaagtgtgaaaggcaaaaaaatgcctgtagaattatcaaactacaatgaaattttaccgagaattgcgcattggaaaaaacaagcagaggaactaactcgacaaattgaaaccatttcaagatccataaaatcagcagctacaaaagtcgcaaaagataaaaacataagaaaaagacattacctcactttaaaacgtgactatattcaaggaaaatatgaccgatttacctgggaagaacctaaagtaggttttaaaaacagccaaattccagatacaggtattataaccaaatatgcgcaagcctatttaaaatcctatttcaaaagagtagaaagtgtaaaaggtggcgcagtggctgagttcagaaaactttggggcatccaagaaagtttcattgatgaaaacggattcaaacacttcaaagaaaaagacagaagtaaacacacccatcataccattgatgccattaccattgcgtgcatgcctaaagacaaatatgatttgttagctcacgcgtggcgtttagaagacgaacaaaataaaaaagcagcaaaagctttaattgaacaagccaagccttggaaaacctttaaagaagatatagaaaaaatagaaaccgaaattttagtgtcacattttacgccagataacgtaaaaaaacaagctaaaaagattcttcgtataagaggcaaaaaacaatatgtagccgaaatagaaagaagtgcaaatggaaaagctattcctaaaaaggatgctagtggcaaaataatttataagcttaacgaaaaaggtaataaaatacctatactacaacagggcgatacaataagaggatctttacatcaagacagtatttatggtgccattaaaaacccactaaacactaatgaaattcgttatgtaattcgcaaagatttagaaagtttaaaagcaaatgatatagaaaacatagtcgatgaaaatgtaaaagcaaaagtaaaagaagctgttgctaataaaattttacttatttcatctaaccccaaacaaaaaaacaaatttgccgaaggtaaaaaagtttggatgaatgaagagaaaaaaataccaattaacaaagttagaatctatgctaattccgttaaaaaccctatagaaattaaaaagcatagtcctttatctaaatcaaaacacgaacataagcaaactgtgtatggacaaaatgatgaaaattatgcaatggctatttatgagggattagatataaagggaaaatctgaaagagcttttgaattaattaattatttagatgctggcttttattataaatcaaaaaatataaatgagagaaaaaacgctataatatctttagtacctgagaaacatttagaaacaggatttaatttgttaaaatccaatggtaagccaataattttaaaaaagggcctgaatgtaattttatataaggaaaaaaaagaagaaattgattttaataataatagtgtaattaaacgactttataaaatatcaggtttagataaagatggaatcaaacttacctatgctgtttctgcaatagggtcgacagaaaatatagcatacatgaataatgttattaataaacaaaaattatttcagtttaaaaaagacattgaagaaattggaatttgggaatctatttattcagatttcaagaatgaaaatataaaaaaatccattttttttaaaaaactgaatgatctactgaatgaacattattcaaaaaatgacatatatgattcagcaggtataataaaaaaaataaagattaaagaaagtggtttaacaactccaaaaggaggtaatgttattgataattttaatgattttccatatattaagtttaaagcaagtaattttaatgctctaattgaaggaattgattttaaagttttgccatcaggaaaaatccaaaagttgtaaatcatctcattttggtgtaaatttacaccaacaaacattgttatatggcacgtcaaagcatcaccttagcaaatcaaaatgatgagtggttaaaacagcaagtcgcaaacgaagaatttacaagcaaaagtgaagcgattaactacttaattcaacaggcaagaaagcaggaagaatattacgaatatgttagaatgaaaatagaattaggcgaaaaaagtggtttggctaaaaaacaaactaaagaagaaatgcttgccgaatttaaaaaacgattaaatgtataattatgatttaagcgagcaagctaaaatctatttgttgcgtatttatgaatatagaattggtcagtttggtctagaccaagctgataaatattttgacatgatgcacgattgttttaataaaattgctaaaatccatatttattccctttggcatcaaatattaagtcaaattattacaaatgtgtttgcggaattgacaccatctattataaagttgttacaaatggagttatcattacaacaatagtcggaaggcaggattttgaaattcaaaatttagttcattgacatacagtatcaaatcgcaaataaccaaacttcatacagattggtttgattaaagattagaaaccgagggacgagtttcggcgaagtcaaaacacgaaattacttattccctgaaacaatcgcacgaactggttgtggtttacaaacaccaagtcaatatttgttataggtgtgtttgtgattataattgattaaagattagaaaacacgatattccgtttcaaaacattagtcatcgtaagttggtttacaaacaccaagttaatatttattataggtgtgtttgtgaatctccctctggtcgatttgattaaagattagaaaacacgatattcagtttcttaaaacttgaccaggacaatgggttgtggtttgattaaagattagaaaacacgatatttttgattaattctctccagtgttactttgtgttgtggtttgattaaagattagaaaacacgatattctgtataaaaagatttcaacggctttaaatgttgtggtttgattaaagattagaaaacacgatattacacaatttttttaatttagggggtacggggttgtggtttgattaaagattagaaaacacgatattcaaattaaaattatggaaacaaaagattatgttgtggtttgattaaagattagaaaacacgatatttcagagccttctatccaacaggagtaccaggttgtggtttgattaaagattagaaaacacgatattctttcacatcgtcagggtacagcgataagtgttgtggtttgattaaagattagaaaacacgatattgtaagtacaacggttcatcgttagtaccatgttgtggtttgattaaagattagaaaacacgatattagataaatcgaatctccttttcttccatgtgttgtggtttgattaaagattagaaaacacgatatttttcaaaagttggtcattatacttcaccttgttgtggtttgattaaagattagaaaacacgatattagttgatgttttatcttctaattatcaaatggttaagttttgatatcgttaaaaaaaatgcttcttttttggggtgctatgccaaaattgaagcatttttttattcctaaaataattcaagttgagtgggttgaggtcccgaaggaatttctacttttccccagaaattttgtatattcccaaattgcttgtctgtaattcgtaatatacttacttttcctgaaggaggtaggagtttttgtacacgtttttcatgtacatcagcactttcgctactcgcgcaatgtcgtatatacaccgagtattgcatcatactgaatccatctttcaaaagttggttccgaaagccagaagcattttttcggtcttttttagtatcagtaggcaaatcaaaaaatacaaacaaccacatgattcgatacccgtttaaatccataattttgggtattttatctttttgcgctccccagcaaaacactgttgcaacgaactagccgttttttgtaaacctaccatcaaaggacttttctcatccttaaaataaaccgttcgggtgagtaattgcaggagttcggctttgatagccgtgtttagttcttgctcctcgtaagtttgtaccaattcatatactttttcgtctactataggtctaaaaggttccataatatcatcggctaaagcaaacgcattgtatttactcttatgatgaatacccagtgtgttgagtaaaccactccccgataatgcacgagcagtagctgcccttaatatagcataaccataatttaaaaaagggttaggataattcccgtatcgttcccttttaaaatccatctcaaaaaaatctttccaatactgaccagccgccactccctccatattactgctgtctccgcttaatacttttgaagctaaaaaaggaaagacgtttttattcccttttattttttctaataaaagcccttgatttgtaattttttcaataatagtttgttgccataactgtttttttaaaggaatactagcatctatttgaaatctgaaaatttcttgttgaatatggtggctctctaaatttaaaaacattccgtttggaagatgatttttattgcaaataattactgctgaattatgttctattaacaaattcatagcaggaatacttatgtatatttcgggattatcaaggataataaaacctatatcttctacaggtatagcgttttctctttcttctgtcttaatatgtaactgattgttttttgtaacaatagaacatttgttttctataagtacggttttttttagcatagttaatgtttgttatttataacaatttactaactaaaaaaaataaaaaagatgaaatcgtttaacgactcttattaaacgataatatgtataaaagcgttttaagataatgaaaataggtaatataattctaatcttttttatatttgagccatgattttagttacaggagcaacaggattggtaggttcacacttaatcttgaaattaatcaattcaggagaaaaagttaaagcgttatttcgtacagaaaaaaacaaagaaaaagtaaaaaaagtatttgaacattataaaaaagaagatcagtttgataaaataaattgggtcttaggagatatactagatgtaccctctttagaatttgcatttcaagatattgtacaggtttaccattgtgcagctttagtatccttcgaacccaaagaagaagaaaaattaagaagagtaaatattgaaggaacagctaatgtagttaatttgtctgttgattttggagttcaaaaattatgctatgtaagttctattgctgccttaggagatctaaaggaatacgaacataaaataacagaagaaacagagtggaatcctgagttacctcacagtgattacgctatctctaaatatggagcagaaatggaagtttggcgagcttaccaagaaggattgcctgtagtaattgttaatccaggagttgttttaggccccttgttctggagagaaggaagcggtgatatttataataaagtagcttctcaaattcctttttatacaaaaggaggaaccggctttgtatcagtagatgatttagtttgtatcatgaaaaaactaatgaaaagccccatcgtcgggcaacgttttattgtagtatcacaaaccatatcataccaagaagtaacaaatcttatagcaaaaaaattaaatgttaagaaaccaaccattttaatacggtcttatgcactaagattggcatatacttttgattggtttttaggattatttggtaaaaccagagttttatccaaagatatgattcgtactttacaaacgatggataattatgatcattctaaaataaaagaaacccttaaatttgaatttaaaacaatacaagattatttaaaccaagattgtgtattgtaaagttcagtatagataaaagaattttaaatctaaaaagaaatttgtcttctgtgctctcaatctaaagagataaaattttgcttacaaaaaaaatcaggttcttgtcatcccgacactaggagagatcacaaacataacctttttaaattctcatgatgctattcctcttttatcaagtggttttggttttgattatgtgatacctccttacgtagtgacaaacaagagactaaaaatagaaccaaaaagagtcttcgttgaatctaaaagggtattattttaatctaaaagagttttcgttgaacctaaataccatttaaactttgaaatttcctcataatactgattatgagactcctccttgtgttggagtaacaaaacgcatgttgatttaggtattattttacaaaaacaataaaaatcatcattggttctcgatgtgcttcacgctcgaactaacgatgatttcaattatatacttaaccgtccgtttgagttgtttttaaaatgaaaaaaacatatcaagaactttattttctaatccagtatattttaagtttaaatggtattattcgtgagatttttgaaataataaaattatttattgaaattttcattataaaaagacctgataaacttcaatcattttatctataattattctgctttttttagtttttcttttttcaattcagcttgtcgtagtttttcagttttgattttttcagttttgattttttcgataacacgatcatatatttttttatagtttgcaatatcataagagtagtatttattactatttacaagttgtaaactgtctatatgatattttttataaacgtattttttgggatcaatctgattcgttggaagtaatttggcatcatgccccttaattgcttgaatcaatgccaaatcatataatattttttccatagttgcttcatctatcagattatcaggtttttcaggagtgttgaatttctgacaagacagagaaaataaaattaaaaaaaagcaagctattttgttcatattataagagtcttttatttaccggttaaattctagtcgcattccttcttgaagatctttgacttggttgttttcatatactaaattaccatttacaaaagtatgtgtaatttttgatttaaaagtataattttcaaaaggtgaccaaccgcattggtacagaatgttgtctttagaaacggtccaaggagaatttgtattaataatggctaaatcagcataatacccttttttaataaaaccacgacgatctatctgaaataatttagctggattatgagccattttttcaacaattcgttcaatagaaattttaccttgatgaaaagcttcaaataatgctactacagcatgttgtacaagaggaccgccagaaggagcacttgtgtaaggtttttgtttttcttcctgtgtatgaggtgcgtgatctgtggcaattacatcaattcggttatctaataaagcttcccacaaagcgtttttgtctgtttctgtttttacggcaggattccatttaattagggtgcctttatccgcataatctttatcagtaaaccataagtgatgtacgcaaacttcggcggttatttttttgttttctaacggaattgaattgtctagtaaactcatttctttggccgtagaaagatgaaaaatatgcaaacgagcaccagtttttttagccaattctatagctttagatgaagaaatataacaagcttcttcacttcttattaaatgatgacaatctataggaatattatcaccgtatttttctttataatcagctaaattattctgaatagttgtttcgtcttcacaatgcacgcaaataatcatattcgtatggctaaagattttttcgagtacttcttcacgatctactaacatattaccagtggaagagcctaagaaaattttaatagctgctacattacgtggattggttttgagaacttcttctaaattatcattagtagctcccatcataaaggagtagttggcataagaagttttagaggctatttcgtatttttgttctaacaattcctgtgttaccgcgttaggtacggtattaggttgttccataaaactagttatgcctcctgctatagcggctctagattcagatgctatagtacctttgtgggttagaccaggctcacgaaaatgtacttgatcatctatagccccaggaattaaatagttattttgagcatcaatgatctcaaaatcttttaagggcgtaatgtgttcagcgatgtctatgataaacttgttttcaattaaaacatctcctttaaaaatatgaccttcgtttactatctgagcgtttttaattaaaatagttttcataatgtgttgtgtttttataataaattaaacatcttgcgaactcgcaacataattacgccaaaaatagcttctcgtatgatagcgccactcatcttagattcgccttttgtacgatctgtaaagataataggtacttcaataattttaaaatgattagcaaaagttctgtatttcatttctatctgaaaagcatatcccgtaaactttaattggtttagatttattttttctaatacttgacgttgatagcatataaaaccagcagtggcatcctgaatttgcatgcccgtaatcaatcgaacgtagacagaagcaaaataagatagtaaaacacgatttaaaggccaattaactacgtttacgcccgtaatataacgagagccaatagacatccccgcattttgtgttttgcaagcctcgtaaagctttgtaagatcattaggattatgcgaaaaatcagcgtccatttcaaaaatataatcataatgatgttgtatagcccacttaaaaccatgcacataagctgttcctaatcccgcttttccttgtcttttttcaagatgtaatgcttctgggtattctttttgtaattcaattacccgatctgcagtgccatcaggagagttatcatcgacaattaaaacatcaaattttttaggtagagcaaaaacagctctaataatagcatcaatattttctatttcgttgtaagtaggtatgataacgatagagtcctgcataaatttactgaattgtgctgcaaaaataatctttttaaattatgagactcctaaattatctataattcgatgaagggaatgaaaaatttgtaattttgtactatgaataactatgagttaattcctcgaattgtagagaataaaaattggattactatagtttttattgtagctataggagtggtaacgattactaaggccgtttttgaaaaacgctttactgattttgttagattattgtttaataataagtatataaaagtttataaggatccgagtaacttaatgacttggtttacaatcttattgttttttgtgcaattaatttcattttccttttttattcagttagttttgtcttactacggttatacaacaaagactaattgggtaagctttatacaaattataacttttttaacattttttgttctgtcaaaatatttgatagaaaaaattatagcaacttcatttgatacagagtcgtttatagagcagtttaatctctttaaagtgagttatagaacttatttaggtattttgctgttacctgttgatatggtattatattatactaattcaataaatcaatatgttattcttggagttttagttataattttaataataaatgcagtaacatatcttgtgtcattgcgaaattatcaaaatttacttttaaggaagttgttttattttattttgtatatttgcgccctggaaattgcaccttatttttttatgtattactacattacaaataggtaaagcataattgtacaaaacaacattttttgactatgaaagtgaaaacgattttagtatcgcaacctgagccaaaagttgagaactcgccttattttgatttacaaaataagcataaaataaaagttgattttagaccctttattcatgtagaaggagtgcctgctaaggaggttcgcgctcaaaaaattgatttgaataattatacagcgattatcttaactagtaagaattctgtagatcatttttttagagtggcagaggaaatgcgttataagattcctgaagatttgcgttatttttgtcagtcagaggcagtagcttactatttacaaaaatatgtggtttacagaaaaaggaaaatttatgtaggacaaaaggaatttgcagatatgtcttctttctttaaaaagtataaagatgaaaagtttttgctccctgcgtctgacaaattaaatgcagatgtgcctcaaaccttaaataatttaaaattagattggactccaggtactttttacagaacagtaatgagtgatttatcagatctaaaagatgtgtattacgatgtattagccttttttagtccaacaggtattcagtcattgtttaaaaattttcctgattttaaacaaaatgagacacgtatagcggtatttggaagtacaacccaaaaagaggctattgatcatggcttacgtatagacatcatggcaccagctccaggagtaccttctatgacgatggcacttgagaaatatgtagctgaagtaaataaaggtaaataatttttgtatctatattcttaaatcccgattttatcgggatttttttttaaacaaaattgagcgcgtttgaaaagtcaaaaatagatgtttagcctgcctcttcaatgataggagaaacatgattaaggttatgcaattttttcgtctattcacttcgtttgagtttccttatggttgaaatcaatcaatcacgacctttttcggacagtttcttttgtaacaaaattagaagtaaaattactaatgaaagaggattttgttagtgccttgttaataaataaaaaaaactatttgatttataataaaaaattaaaatatgaaaggattcattaataccattataaaagataaaattgcaagaattactttttcacatcctgccagtaattcatttccaagcgaacaattaaaattattaacagaagaaatttttgcaattagtaaaaacaaagaagttggggtggttgttttacaaagtgaaggaagaggggctttttgtgcaggagcttcttttgatgagttactagaagtaaatgatttagaaacaggaaaagctttttttagtggttttgcaaatgttattaacgctatgagaaaatgcgaaaaaataatcatagggagagttcaaggtaaaacagttggaggaggagtaggtcttgtgtctgcttgcgattatacttttgccacccatgctgcagctataaaattatctgaaatagccataggtataggtccttttgtaatagaaccagctgtttcaagaaaaattggtaaatcagctatgacagaaatgacgctttcacctacagagtggaaaagtgcagagtggggatttcaacataaattgtattctaaattgtttgaagatgtagaaactatggatcaaacattgaatgaatttactgaacaattagcaagctataatccagaggctttattagaatttaaaaaagtcttatgggaaggaacaagtcattgggatgaattgttgtatgatcgtgcggctgtctctggaaaactagttttgtctgattttacaaaaaatgcgttgaatgcttttaagaaataaagtaaacgaaatcatgttgctaatacatataatattgttattatggtaataaaggattgtgttttataaaaggattattttaagaagattgtttaaattttggattacgtattagaattttgttacagataaaaaggatcataaatctataaaataggttttattttgttctcaatataacaaagttataactacaaaaaatacagggacttttcttctttatgata

SEQ ID NO: 3101 - DNA, 24608 bp, synthetic construct
  source 1..24608: mol_type = other DNA
  misc_feature 1..24608: note = Synthetic
ggcgatttaatacatattatttcagatacaattgctaaaaaagtagattccttaaaagtatttaataatgcttttatcatttcaaaagataccattggagatggatttaatcaagtaaaaggagttaatttatacggtaaatttataaataataaattaaaagaagtagacctgattaaaaacacagaagttatttactacatgcgtaatgataaacaagaactaatcggtataaataaaaatgtaagtagtaaaataaatatgttaatgggagagggaaatgctatagatagcgttacattttttaccaaaccagatgggcaaatttatccagaagacgaacttcccgaaaatgatagaaaactaaaaggttttctttggcgagaaaacgaacaaattttaaaactagaagatatttttccaaaagaagaaatagaactagatactaaagccaaagcagaagttaagaaaaaagaacaagaacccaatgtaccactaagtcctactaaagaaacattggaatttcataaaaccaataaaattaaaacaaacaaagaaaaaaataaatcaaattataaaaaataatccaaaattattttaatccaagatgatgtgttatattttttgatgaaggtaaaaagaataagataaaaagaataagataaaaagatacaaaaaaagatcagagatatagtttttctagattgacgataaaaaagaatatttttttagattcaaaattatttttatcagtaataaatttccaacacataatctgagttaaaaaacaaattattcttttttatttttattttagaatatttagataataatccatgttaaaagatttttataaataccaagcacaaacctctcctcatccactaggaatggaagtatctcacgccataggttcttatatatacgatacaaaagggaagaaatatttagattttgtggctggagtttcagcttgtaccctaggacatcagcatccacgcgtcaaacaagccatcatagaccaaatggataagtatgctcatgtaatggtttatggcgaatacgcacaagatcccgcaatccaattttgtacgttactagctcaaaatatggctactcagttaaacaaaacctatttagtaaattcaggtaccgaagcaacagaaggggctttaaaattagctcgaagagtaacaggacgtagtcaattaatttcttgttataatgcgtatcatggaaatactatgggatcaatgagtgttatgggatttgaagaacgaaaacaagcctttcgtccattaattccagatgtagacttcattacgttcaataatgaggaagatttacaaaaaattacaacacgtacagcaggtattattttagaaacaattcaaggaggagctggattcattcagcctcaaaatgattttctaaaaaaagtacgccagcgttgtgatgaggtgggagctttaatgattttagatgaaattcagcctggtttcggacgtacaggaaaactatttggttttatgaactatgatgttattcctgatattgttgttatgggtaaaggaatgggaggaggaatgccagttggtgcttttacggccaacgaaaaacacatggatttattgagtcaaaatccaaaattagggcatataaccacttttggagggcatcctgtaatagcagcagctagtttagctaccttaaaagaattaattgaaacagatttaatgtttcaatgtttggaaaaagaacaattatttcgtaaattgttgatccatccactaataaaagaggttcgtggtcaaggactaatgctggctattatgacagatagtccagaaattacaaatcaagttatttttaaatgccaagaaaaaggattaatccttttctggttactatttgaaggaaatgctatacgtataacaccacctctgaccttatcaaatgaagaaatagaggaaggatgtggcattattattgatgctatgaatgaaatagaggctgattaataatcaaaaattgaacgaaaacaataatcaaaaacgtctttattttgttcattaaattgttcaaaaaaaatcgttttttaacccattataaacgccaactttactatttttagtaaggataataaaaacttaggagtatggatttgagtcacaatgaagaagattatagtttatccttatcaaaatttgaatcaatgttaaaaaccaataaggtcttattttttgattcagaagaatttgaggatatcatcctccattatatggatattggcaaacctagtctagccaaaaaagctctaaaattagggctagagcaacatcccaaatcctttggattgaagttggttcaggtagaaatgctgttatttgaagacaaaatcgaacaagccgaaaagctgctgaatgatttatacgctatagaacccaccaatgaagaaatttttatacaaaaagcaaacatttgttctaaacgagacgatcataaacaagccgttgagtttctaaaaacagccttacaatacacagatgactatgctgatgttcataaccttttagggatggaatatttattcatggatgaactagaactcgccaaaacacattttatagcttgtttagaagaagaacccgaagaacaatccggactctataacgtcatctattgttttgaatttttagaacaataccaagaagccatttcctttttacaaaactatatagacacaaatccttatagtgaaattgcatggcaccaactaggtagattaaactttactataaaacagtaccaagaagcctacatagcatttgattatgcaacccttattgacgatcaattcatgggagcctatatggaaaaagccaaagcacttgaacgtttagaacgctatgaagaagccatctggaactatcaagaaaccattcgattagaagatccaacctcttacgccttattacgaataggcaaatgttttgaaaaaatgggcaatgattcagaagctttaaattattataacaaaacagtacatgaagatcctttattagataaaggatggatagccataacggatttttatatgcgccaagaaaactttcaaaaggctctttattatgtaaacaaagcccttggtatagatgcagaaaaccctttatactggaaacggtatgcctctataaataaagagttagcactatttgaagaagcagaagaaggatatcgaaaagctatagaattaggagatacagaattagaaaccattctattttgggcggatacacaattatttattggggaatatgaagcttctgtagaaaccttaataaaagcaaatgtcttgtttttagatcattatcaaatagaataccgtttagctgggttgtattattctttagataaccctactaaaggattatatcacttaacaaatgctttacatcataattttaaaatgaagagtattctacaggaactatttcctgccgtatttgatatgaaagctattcaaaaaattataaataaattcaacgagttacaataaatctaaaatttattaaggtaaaaaataacagaaaaaaggttgtagtgtttgcttaaattaaaagaatgaatttttctaaaaacattaagcaaaaaaagggtaatctgaaaaagagaaatcaattttaccacacttctaaattctgatttttaataaaccacctattttagataccgttcaattatatattccgttatagccttcaaaggcttattggtaacaggatgatgacccggttgattgaaaagttcaatatgatcttcatccatcttacaataccaaataacggccttaccatttttaaaataagtaattgtatcgttaggtattattctgcgtaataaaagcaatctttcattatacggaacctttgtatttagttcagcaaaaccatttatttctttattacaagcaacttcaatataacggttattttgccattctagacaagaattttcccttttaaaattccaatacacaataattgataaacacaaaaataagcatataaggattaaaagcctattacgactagaaggaatcatttttttaggtaaaagatccataggcttattagataaaacaactgaagattcagttttgtcaattgcatgatttttaggtggattgtgtttggatttcaaaaagtctcctaaaggtctaggttgtaaatttactaataaggccattacatctaaaatatcttgattaggagccgatgtctttcctttaaaaaaattacatatcgggcgaaatttatctacatcaaaattgggtaaattgtaaaatgtttcaagaatcatcgaatctttttgagacaatcctttttgctttaaaattttacaaaaatcatttagtaaagctggtgatggttttgataagtaactcgcataaataccctttttttcaacttcatattgagcttttatttctgtaatataatctttataagtaatgtttttcataagcattatacgaaattatttagaactatcggaatcctttggaattattggaatttctttacaaacccctagtaaaatcaacacacctttgcctcagaattagttcttgttctatttcgcgataagaacaaatgtacaaaactacttctaaaaaagtgagactaatccgttcgtattttctgtcttggggagtacataaaaaactttctgatatagcccacttcacttcccaagatggtgccataagcactaaaactaggtggtaaaaaattcgaaaacttatttcgaatagccacaaatatgtcaaaaattaattaaaaaagtatgaaaaaaataatattaattgcagttctaaatacggtaggttttactataatctcttgtgaaaaagaaaatttaaatacagcaaatacaaaagaaatggaaattaaaaaagaaagcaggttattacaatttgtagattctacaagtattgaaaggatcatacctgtagaaggaacaggagatgatttggttcctattaaacctccaaaatcttaatttttttaaattaaattaaaaaaaaatagtaaattcggggaaagtatctgtatgaaatttttcctgagtttactgtttttcgtatggtttatagtaattagttgtacaaaaaagcaagaacataaaattgaacataaaaaaataaatcctgtagaaagaatagcctttcaactccaaaataaagccgaaaaagaatggaatgctaataactttcacagtgcatattactattacgacaaagcaaagtcattgtatcaaacacttaataaaaatgaaaacattgtttattgccttattcaaatggctagtatccagcagcttgaaggggattattttggtagcgaatccagtttgattgaagcgttaccttacataaagaaaaataaaacctatcaagctgctattcataatctattgggtatagcctctaaagaacaaaaaaattataatagtgctattgaacattataatatgacttttaatcttgctgaaaacaaacttactcaaatagtttctttaaataacatagcaaatgtatatattcaacaaaaaaaatttgataaagcacaaacaattcttaatagaattttaaaagaaaaagggctagattccttaccctttcgaaaggctatatatttagataatttaggatatagtttatataatttaaatcaaaaggaagaaggattaaaacttttaaaaaaagcgcttcagacaaaacttcaaagcaataatacttacgaaagagtagaaagctatttgcatttagccgatgtgtatataaagttaaatcctcaaaaatccttttattatgctacaaaagcttaccaaaatgcaaccttacataaaagtattgatcaaaggcttaaggctttattactaatcattaagttgccacaaagtactcaaaaacaggcattacaatatgctaacttacaggatagcattacacaaataagaagtacagctaagaaccagtttgccaaaataagatacgatgctcgtgtagctaaagaagaaaatttaaaactaaaaaacgaaaaaatagctacggatcttaaactacaaaaaagtcaaaatgaaaaaaatatttggatttcagcttctgctttactagcaactttaattttttttatttataattatttaaaaaataaaacacaattagaaaaacaaaaagcaacctattttacagaaactaaaattgctaaaaaaattcacgacgaaattgccaacgatgtgtttcaaaccatgtcatttgtagaaacccaaaaaatcgagaaaccagaaaatcgagaaattttaattagtttgttggatactttatatcaaagatctagaaatatttcaaaagaaaatgaatcaatagaaacagggatttttttctttgaaagtatattacaaatgataaacggatataaatcaaatacacaaaatattattataaaaaaagaagatacaatagattgggagagtttatcagaaatcaaaaagattactttatttagagtattacaggaacttttagtaaatatgaaaaaacacagtcaagcgactattgtggttgtttgtttttcaactcataaaaaagctttaaaaatagactactcagataatggaaaagggtttaatatagaaagtataaaaaaaagcggtttggcaaatgtggaaaaccgtattataaacattaacggaaccattacttttgatgctactgataagggattaaaagtaaagataaatattccaaaataaagtattactatgttttcaaaagttttagtggttgatgatatcgatctgaataatattgctacagaaaagacacttagtgaatttgatatttcggttgttgaatatgtaaaatattgtgacgatgccattttaagattaaaaaaagcacatatagacaatttaccatttgagttgttaattacagatttatcttttaaaatagatcatagagatgctaaaataacttcaggagaacaattaataacagaagttaaagaaaaattcccgtctattaaaataattgctttttcaatagaggatagacctcacaaaattaaaaaactagtatacgatcaagggattgatgcctacgtggttaaacatcgttatacggcaagcgaactaaaaaaagctattgaaacaatatggataggaaaagaaaaatatatttcacctagtattcaacttatattacaagataagaccacctccgaaatagatacatacgatattcaattactgacgcaactgtctttgggaattccgcaagaaaatatggaagctaagtttaaagaacttcatattacacctaatagtaaaagtaccatcgaaaaacgtatagcaaaacttaaagattattttaaagccaataataccgttcatttagttgccattgcaaaagatatgggaattatttaaccacatatttttaaaaatatagagaaggtctcctaaaagttgaactcactttataagaatcggatatatgaaaatcatattcgataggtatctgaatattatagtaataaaaaaggctgtccaactttgcactgcccccaaaaagttagatactatttgggggtatttttatgcattacggttttccgtaaggaaatggttattgttggaggtaagtttgccatataaacataaaaaaaataattatgaaaagacgaactgttttatttacaatgtttttattcttactaggaactagtattaatgcacaaaaaggacactataaaggtggaaaggggagttctcataaaggaggccattataaaaattcttctactaatgaccattatagaaaaagaaaataatatgaaatacaaagtagtacctttcatagcttcattggatcccaaaaaaagaacttcagacaatgtcgcaattcaactagaaaatttaatcaatgatctttctaatcaaggctggaaatatgttcgtttagaaagtgtgaccacatttgtaaaccctgagacaggttgttttggattaggagcaaaaccaggttatatgacaactagacaaatggtagtttttgaaaagtagtatgaagtatttagtcctattgagtattcgattgtattggttaactaagccaaagaataaaaaaccaagatgtatttttagaaaatcttgctcatattttatatatgaagaaacgctacaaaatggttttttaaaaggattaaaggcttttcattacagatttaaaaattgtcgaagtggatttgaagtttttaaaaatccaatatcaaatcaagttcaaatgttattgacttcaaatcaaataattgaagaagaagaaatagctaaaagattaataactcatttaaaataatttttttggaaagatatagaaacttaagtggaacatctgctgtatatagctatcaaattggaaatgattttataaaaatcagatttgcttcaggagctatctatacgtatagttataacaaagctggagcatatcatattaatcaaatgaaaacattagcacttaaaggattagggttaaattcctatataaatagaaatgtaaaatataaatacgattagaactataatttttatcataaagtattcttaaattaaaaagaatattcacttttaaacaattaaatatgaaggcaataggattattaataacatttctattttgttttttctccttttcgaagaataatgaattaattacatcaaattatgaatgtctaatacctaaaaaggaagctggcagatgtacaggttctgcatattgtacagcttgtagaaattgttcgagatgcgcacattgttccagtggtggtagttgtggtgtatgtagtagtactactactagtacccattatttatataactcaaatgaaaaaaagagcaaaaggtctagaactccaaaatattcatcaaaactaagtagctctaaaaaatattattatgttgatgaaacaataacaatctacaatgatatcttaaatttaagagaaaatccttccttagaatctaaaattatcgaaaaaataacatttggagttaatgttatttttatagaagaaaaaggggattggataaaagttagagtagaagaaagcgaaaatatagggtatttatatgcaaaaaatataaaataagaatatgacaaaagttaaaaacattaatggaacatcagataacaattgcaaatgtggaagttggttgcaacattggaaaaaatacagtaagcaggatgtagattcgtgttcagagaaaagctgttcagaaaaaaaagatttagttggagctcacgtccaaaaatctgattcttcagatatgagttggtatataatcccgctttgtaaaactcataataaaagtaccgatgatttagaaattacgaccagtagaaaattagtttctgctaataaaaaagaaacttgcgaaaagtaaacagagatatgtaattaagagcgaactactgaacggaggtggtggttcaaatgggaatcccaaaatccccttattatttatatcttttgcttaaacccagattatgcaatagaccttgtaacgaatacggaaagggcaaagaagctaaaaagacacggaatttttttactacattaaggacaaaaaatggagtgcttttttagattcaaagtcctttttatctacaataagtttctaatgtataatctgggttaaatgataaaaaagtcctattttttactacaatgtcataaaaaaagtcccaccgaagcgggactaaagactttcgtctacggcatatagccttattgtgataagattaaagattagaataattttatctgatacaaacatacacaaaaaaagctataaacactttacggttttccgtatttagatgaaaaaagtttttccttacttttaagaccaaattacaaactaaacacaaatgacaaaaatacttggactagacttggggactaactcaattggttgggcaattagagatactgaaaatgaaggaataaatcaaattctagacaaaggagctaggattttttctgaaggagtaaaatctgaaaatggaaaagaaatatctagagctgccgaaagaacagcctacagaagtgctcgtaaaataaaatatcgcagaaaactaagaaaatacgaaactttaaaagtgctctctattaatggaatgtgtcctctatctgttgaagaagtggaacaatggaaaaaatctggtttcaaagaatatccactaaatcctgaatttcttgattggctacgaaccaatgaagataaaaatataaatccttatctttttagagacaaagccagtaagcaaaaagtgactttatttgagttaggtagagccttgtaccatatagcacaacgaagaggttttttgagtaatcgcttagatcaatcagccgaaggtgtttttgaagaacataacccgcaaattcaaaatttaattgaagatttagataattcgaatgcgatcttaaacgaattaaaagagtattatattaatcttggaattatagatgagacagagaaaagtggttttaaaaaggatttagacgaaggagaaaaaaaactaaagtctttgtataattcattagtagccattacaaaaaagaatgcaaatgatattgaaacatgtaaacaagagcttattgcgcgtctaaataaaaaagaagatttaggcaaagtaaaaggaaaaattaaagacatttcacaagcaatgcttgatggaaactttaaaaccttaggacaatatttttttagtttatacaacaaaacaagaataagaaaccaatacacttcccgtgaagagcattatctggaagagtttattataatttgtcaaacacaaggaattgaagagatcaatacaaacgaaaaattacccgaaaaaaagtttacgggtttagctaaagatttataccgagctattttttttcaaagacctctaaaatcgcaaaaaggattaataggaaaatgttcttttgaaaaaaacaaatctcgatgtgctgtttcgcatccagattatgaagaatttagaatgtggtcatacttaaacaccataaagataggcacacaaagcgagaagacattacgtttcctaacactggaagaaaaattaaaattagttccgaaattttacagaaaaagcgactttaattttgaggttttagccaaagaactggttgaaaaaggagctagttttggctattacaaatcttctaagaaaaatgagtttttttattggtttaattacaaacctacagatagtgtttctgcttgtgtagtttcggcttcactggaaaatgctataggaaaagactggaaaattaaaactttcgaataccaaactagaaatacggaaaagaatgaagtcacaaaatctgtagattataaagatttatggcatttactttcagttgcaacctcagatacgtatttatatgattttgccatcgaaaaactaaaacttgaacctaaaaacgctaaagcatttagcaaaacaaaactgaaaaaagactttgcaagtcttagtttagcggctattgcaaaaattctaccttatctaaaacaaggactactgtattcgcacgctgtgtttatggcaaatattgagaatattgtagatgcagacatttggaaagatgaagagcaacaaaaattcattcaatcaaaaatagttgaattagtagataattatatagtagaaaaaagcaagctagaactaattaacggcttattgaaaatatacaataccgaagacaaagaaggtagaaaggtatattattctaaagaagcggaatcgctttttgaggctgatttgagaaaaaagcttgtccccttttacaaagcaaatattattattgaggaacacgaacaagaaataatatttcaagatttattccctattctaatggatcaattaaaaaagcaagaattcattaaaataggtaggttagataaacaaattgaaacgtttcttaaaggtgaaaatgaagagggacaaatattttgtaaccatcctgataagttaaaaaaactctatcatccatcagatatagaagtattcaaaaagaaaattatcaaagacgaatggggcaatgaaaaagtagtattaggtagcccactgaccacttccataaaaaaccctatggcaatgcgtgctttgcatcaattacgcaaagttcttaacacactaatagctaatgatcaaatagatgaagacactcgtatccatattgaaatggctcgtgaattgaacgatgcaaacaaaagaaaagggatacaggattttcaaaatgaaaacaaaaaattcaaagaggacgccattaaagaaataaaaaagctctatttagagcaatgccacaaagaagtaaatcctacagaagatgatattttaagataccagctttggttagaacaaggaaagtgtgaaatatacgaggaaggcaataatattagcatctgtgacattataggtagcaatccttcttatgatatagaacatactattcctagaagtatctcacaagataattcgcaaatgaacaaaaccctttgtagtcaaagatttaatagagacataaaaaagcaaaaaatgcctgttgagttatcaaactacaacgaaattttacctagaattacacactggaaaaaagaagcagaggaactaactcgacaaattgaaaccatttcaaaatctataaaatcagcagctacaaaagaagcaaaagataaaaacataagaaaaaggcattacctcactttaaaacgagactatattcaaggtaaatatgaccgatttacatgggaagaacccaaagtaggttttaaaaacagtcaaatacctgatacaggtattataaccaaatatgcgcaagcctatttaaaatcctatttcaaaagagtagaaagtgtaaaaggtggcgcagtggctgagttcagaaaactttggggcatccaagaaagtttcattgatgaaaacggttggaaacattacaaagagaaagacaaaagcaaacatacccatcatactattgatgcgattaccattgcgtgtatgcctaaagacaaatatgatttattagcacacgcgtggcgtttagaagacgaacaagataaaaaagcagcaaaaactttaatagaagaagccaagccatggaaaacttttaaagaagatatagaaaaaatagaaaccgaaattttagtatcacattttacgccagataacgtaaaaaaacaatcaaaaagcattattaaaaatagaggtaaaaaagtttatgttttaaaaaatgagctcccagtaaattttaaaaataaaatagaagggaaagattattttaaactaaagtttgactcaaaaatactatacaaaattcctaaaaagaaagaaaaacaaacagatacgttttatgaagaattaccaaaaaactatctaaatggtgttgaaggtaaagattatttcaagattaacacaactgggaaaacattttataaaatacctatattcaatcaaggcgatacgataagaggatctttacatcaagagacaacatatggagctataaaactaccagatatagatatagaaacaaaaaaaacgttgcatacagataagggggcttttatacttaaaaaagacataaaaggcaatgaaattgttttttatgttgtcagaaaagaattatcaaaactatcagagaatgacgtgcaaaatatcgttgataatgtggtaagaaaaaaaattgaaaacgccattgcaaatagtctaattacctttaaaatagttaaaaagaaaaaagtagctgtaattaaagaaggtgtaacaatttggatgcgtgagccaaatattgaaaaaggaatagaaggtataccaataaagaaagtaagaataattactaattctgttaaaaaccctatagaaattaaaaagcatagtactttatcaaaatcaaaacacgaacataaacaaactgtgtacggacaaaatgatgaaaattatgctatggctatatatgaacttgatggaaagcgagaatttgaattaatcaataattttaatttagcaaaacttcttaaacaaagtcaaagttactatccattacataaagaaaaagaaataaaaggtaaaaaaatcttagttcccatagagaaaagaaacaataaagatgtaattttaaaaagaggacaacaggtagttttttacgatagaacaattgaaaatccaaaagatatttcagaaataatagattttagagaaaggatttatattattgaaggattgacaatacaaagacaaaaagacaaaaaaaccagcaaggttaatgaatatggtattattcaacttagacattttaaagaagctagaaaatcagaagaaataagcaaagacaacttcaaacctgatggagagttcaaaatcaatgaaaacaaaccaactagaaaaatgaatcacaatcaatttacagcatttgtggaaggaattgattttaaagttttaccatcaggtaaatttcaaaaaatttaaaaacaataacatttgctcgttgctataaaaattagaaatcgatttagcgagattcagcggagctaaacacgatagtgtcaaacgcagattaagaccctcaacaggaactgaagctctcgaattcctgtagtggtttacaatgttttaaagaagacaaatcgcggcgtttatctttgaataagttttaagtttctgaaaaaattaaaaattatgatctagcggttaaaaaatggtgtaaatttacaccaacaaaacacaataaaatggcacgtcaaagcatcactttagctaatcaaaatgatgaatggttaaaacagcaagtcgcaaacgaagaatttacaagtaaaagtgaagcgattaactacttaattcaacaggcaagaaagcaggaagaatattacgaatatgttagaatgaaaatagaattaggcgaaaaaagtggtttggctaaaaaacaaactaaagaagaaatgcttgccgaatttaaaaaacgattaaatgtataattatgatttaagcgaacaagctaaaatagatttgttgcgtatttatgaatatggaattggtcagtttggtctagaccaagctgataaatattttgacatgatgcacgattgttttaataaaattgctaaaaatccatatttattccctttggaatcaaatattaagtcaaattattacaaatgtgtttgcggaattgacaccatctattataaagttgttacaaatggagttatcattacaacaatagttggaaggcaggattttgaaattcaaaatttagttcattgacatacactatcaaatcgcaaataaccaaacctcatactgattggtttgattaaagattagaaaccgagggacgaggttcaacgaagtcaaaacacgatattatttggttaaaaattacgattgtaatttcagttgtggtttacaaacaccaagtcaatatttgttataggtgtgtttgtgattataattgattaaagattagaaaacacgatattattttaaaaagacagattaaatcggctggggttgtggtttgattaaagattagaaaacacgatatttgactaaaaaagccattgcaagcgctacaggttgtggtttgattaaagattagaaaacacgatattcgatttggttacacgaaggtattttcgaggttgtggtttgattaaagattagaaaacacgatattttttaaatttggcggttgaccatagatcggttgtggtttgattaaagattagaaaacacgatattattgtaaggtatttcaagtggacaccgcagttgtggtttgattaaagattagaaaacacgatattattatatttgtgttacatggtgtagttaaagttgtggtttgattaaagattagaaaacacgatattttcagaaggaatttagaagcttctgttcctgttgtggtttgattaaagattagaaaacacgatatttataaagcaaaactaattgattgataaactgttgtggtttgattaaagattagaaaacacgatattgaaagctatgctgccatataaacaggatgggttgtggtttgattaaagattagaaaacacgatatttttgaaataatttttaattttataacattagttgtggtttgattaaagattagaaaacacgatatttctacaaatacctgaattaactctaaactggttgtggtttgattaaagattagaaaacacgatattaaaataagaagagatagtaacagaaacaaagttgtggtttgattaaagattagaaaacacgatattgcatttcaagatagtagagaatttaatcaggttgtggtttgattaaagattagaaaacacgatattaacttgcaaacaataccagactatcaaaaagttgtggtttgattaaagattagaaaacacgatattcttatttttcaagtccgtcggggtcgatggttgtggtttgattaaagattagaaaacacgatattgatgctgaagaaaaacacaaaaaagaacaagttgtggtttgattaaagattagaaaacacgatattttataacctttttactatttcatttagcttgttgtggtttgattaaagattagaaaacacgatattagaatttcggttggatactcaaagcaattggttgtggtttgattaaagattagaaaacacgatattggttataaaattgatgaagaaataggctagttgtggtttgattaaagattagaaaacacgatattcgaccgcaaacatacgatagttactttatagttgtggtttgattaaagattagaaaacacgatattgttattcaagataattgcaacatagggtagttgtggtttgattaaagattagaaaacacgatatttactcattctcactaaaagaaatagcttagttgtggtttgattaaagattagaaaacacgatattatgttctatcggcgtaaaataagttagcaggttgtggtttgattaaagattagaaaacacgatattttaattaaatcacaaaaaatgacaagagagttgtggtttgattaaagattagaaaacacgatattagctaacagcttagttcttaaatatcaaagcattaagccgaaatatcgttaaaaaaaatgcttcttttttggcacgttataccaagattgaagcatttttttatttctaaaacagttccagttgggtgggttgtggtgctttaggggtttctactttaccccaaaagttttgtatgttcccaaattgcttgtctgtaattcgtaacatacttacttttcctgaaggaggcaggagtttgtgtacacgtttttcatgtacatcggcactttcgctactggcacaatgccgtatatataccgagtattgcatcatactaaaaccatctttcaaaagttggttccgaaatccagaagcattttttcggtctttcttagtctcagtaggcaaatcaaaaaacacaaacaaccacataattcgatacccgtttaaatccataattttgggtattttatctttttacgatcgcccgaaaaacactgttgtaaggaacttgccgttttttgtaatcctaccatcaaaggacttttttcgtctttaaaatacactgtacgcgtaagtatttgtaataattcagattttatagctgtattcagttcttgctcttcgtagcgctgtattagttcatatactttttcatctactaaagggcgaaaaggttccataatatcatctgctaaagcaaaagcattgtatttatttctatgatgaatacctaaggtgtttaataaaccacttcctgataaagatctagctgtggctgctcgtaataaagtataaccgtaatttaaaaaattattaggataatctccaaagcgttcccgcttgaaacgtatatcaaaaaattgtttccaatactgactggctgcaactccttccatattactactatcaccacttaaaaccttagaagctaaaaaaggaaactgattttttaaaccagttatacgctcaagtaacaaaccttgatttgtaattttttcaacaatggtttgttgccataattgtttttttagcggaatacttgcttcaatctgatatttaaagagttcttgttgtatatggtgactattcaaattcaaaaacataccttgtggcaaatgggatgcgttgcaaataatgacagcactgttatgttctaataataaatttaaagctgggagactaatatagatttcttgactttcaagtaccaaaaagcctatatcttctatgggtatagtagcctctcgtaaaatcccttttataattaattgattgttttttgtataaagagatgatttattttcaattagaatggttttttttagcatttatttttttacgatgaatataacagctcttttagaacttctattacggaaaaccgtaaggtctttaaaaacatagaatttacttttgtcaaaaaaggtaaaatgaaaaaaatatttttagttttagtatgtttttgttgtttttggaaatgtaaaaaagaaccgataaaagtaccagtaaaaccagcggtaaaagtaaaaatcgaacccaatgacatcaaatctgttacaccacaagaagctcaaactttttataaaaatcctgaaaagaaatacgaatatcgaacaggaaaatttaacgaatatgagtataattacgatgtaataggaactgatcaagataataatgtggttacaggcaatattattacacacaaaaaatacggggcgggaatactttataccaatgacaaaagtgatattcctgtgaaagtagagtggataggttatggtaaactaataggaattgattctaataaaaatgaatatgaacttaaaataaaagaataacaataaaacgaataagtgtatattaatatttatacttggtcttatttctgaaaacggaagtacctatttgtggaggtactggtacaaaaaaatattttaaagtatcttgtgaggattaaatagagctataagcaacccatttataacgcttcattaaactcatattatgtgttagattttgtgataaataggaaaaagataaagaaggtaaaaagggatataaaatttttaccacagctatagttttacattgaggacaaaaaatagagacttttttagattcaaaaatcactttttatctgtaataaatttctaatgcgtaatctgggttaaaattaagtttaaatttgtcaggaattttagactttagatttaagttgaactctatattattttatgtaattttggaagtatgtatacatctagcgatatatttgaaattagttctaaaaaagaattcgaaaagcttactttaaaaatttttcgttttcagtataatcataatttagtttatcaaagattttgttctttgctaaaaaaggatgtaacaaatgtaaaaaggatacaagatatcccttttttacctgttcaattttttaaatcaaatgatgtattgagttctacagatccaatacaaaagatttttacaagtagtggaacaacaggaatgacaacaagtaagcattgtgttacggatttatctttttatgaagaaagttacagacaagcttttaaacaattttacggaaatgttgaagattatgtagttttggcattattaccctcttatttagaacgtgaaggatcgtctttgatttatatggttgacgatttaatccgtttatctaatactcctgaaagcggattttatttaaataactatgacgaacttatagaaaaattgataacactagacaatgaaggacataatattttattaataggtgttacttatgctttattagatttagtagaaaaacaaaaatttaatttaaaaaataccattatcatggaaacaggaggtatgaaaggacgtagaaaagaaatgattagagaagaattacatactattctttgtaaaggttttggtgttcctgtaatacattctgaatacggaatgactgaattattatcccaagcttattctttaggaaatggggtttttgaatgtcctgcatggatgaaaattatcattcgcgattctgaagatgctttaaccttattacctgatggtaaagtaggaggagtaaatataattgatcttgctaatattaattcatgctcttttattgctactcaggatttaggaaaaatactagataataattcttttgaaattcttgggcgatttgataattcggatattagaggttgtaatttgatggtagtataatacttgtattatatcggttttaacgacttctatagacggaatataaaatataatttctaagacaacacaataatacgttataaaaatgaaaaaaacacttattgctccatccgttcttgctgctgattttgctaatttgcaaagagatattgaaatgattaatacaagtgaagccgattggtttcatatagatattatggatggggtttttgttcctaatatatcttttggtatgcctgtattggaagctattaaacgatatgctaaaaaaacaattgatgtacatttaatgattgtagatccagatcgttatatttcaacttttaagaaactaggagctgatattttaaccgtacatttagaagcttgtgtacatttgcatagaacccttcaagctataaaagcagaaggaatgaaagcaggtgtagctctgaatcctcataccaatataacattattagaggaggtaattcaagagatagatgtagtttgtattatgagtgtaaatcctggttttggaggacaatcatttatagaaaatacgtattcaaaagtagaaaggttaaaagcattaatagaaaaaaaaggagcctctactctgattgaaattgacgggggcgtttctactaaaaacgcaaaaaaattagttcaagcaggtgcagatattttggttgcaggtagctttgtattcaattcaaatgatcctaaaaaaacaattatagatcttaaagaagttgttaaggaataaaagggcttgacaatagataactcgtttacttcatccaaaagtatttccaattgtacctaaaatgttttaaaaaaaatcctttttttgagtaaaaatagccaaaaaaaggattttttcaataagtgttctaaactattatccccatttaaaaggaggatttcttctcataattaattaataaattaataaacttactataactctgcattccttctttttgttgatttagttttaaaaaatggtcgtaaaatatttcaaaaccagtattgatcattgattcatgtactgaccaaaaggtttcactttcttgaaagttttttaaaaccccaggatgaatagtgctaagtatgctttttaattctttttgatctttagaggcaatatgggctagacaataacgtaaagcataggtatacccagcatattgaaagaacaaatttttgttatgagtacaagctaaaaaaccaataaagttgcattcgctttcactagaatagcctatttgatgagccatttcgtgacaaactatagcgggtaaattataagaaggaggcatatcgtttacttgtgcttcatttgtaaaaggatttaaataacctccaaagcccatatacgttagtgggtaactaaataaggaactttttatgctagaatttgtataatcaaaaaagggatgtgtgttttttaaattagcatatcctaatggagctaatcggaatatttgagttgttttatagggactaattacttttttatttacattatgtgtgagtttaaactgaagtttattgcttgtgtagataagccttttggtaaattgtaagagttcttcttgacgataatcagttcttaaattcattttttcataaagaggcatcctataataattataagcccaaagtaaatgaaatacaaaatagcctattactagcattttaaagaggtgtttaactttttctatccaatttattttttggtttttataaaaccaatataggagataaatacttaaagaaatataaataagatcaccaacagaaaaaggaatccaaccaaaaatgattctatttagttttgaaataataggatagcacccattactataatactgttctataatagcaggaaatttagaaaatacgcttagtaatactaattgaaatataaagaatgctaaaaaaaaaatattttctgtaaatagtatctttttgatttttaagggcttcatatcttttagttaatcaataaatttagcttttaattctggagttggaatcatacaagtttcttttttaccataccatttgtaacggtttttagcaacaaagtcataaagaggatcgcgtaatgccgttgggattattttaaaaatagatagccaattaaaaacagataattttttagcaatttctagaacagcttctgatttataataataggcttggttaggaatatataatatgatactatctatatttcgattattgatacctagatatttaagtatttcttgtcctaattcagattgcaaagctacaaaacgaaagatgtcattatgatctctttgaacaatatattgtacccagtaattacaaagattgcatactccatcaaaaaggatgatttgtttgtcttttggtaggttttccattgattgatatttaaaaattatttaggttgaatatattccaattgttctaaacttactttggaagtaaagattccgtaatttacaatggcattattcttttcaattttatcaatcgtacctatagattttccatcaatcatgcgaacacggtcgcctaccttaaggggtattttaggtttgttttcttctatttttttggcaatttctttcttttcttttttttctttacggatttcttctactttaatttgtacttcttcaagtacttctttttcaattttttctttaacttttttttcttttagggtaattttttttcgttttgaattttcaatttctaccatttttaaaaattcacctatcagatcttttttatttttatcattaaaatattttccggaaatatcatctactttctgtcccatataaatcaaacgttggtttgcatcatataattcttgataacgttctaatttatcttgaattttagcattgatggtttccatttttttactttcttcacgtgctttggtttcttcttcttttaaattttgtgaggttttttctaatttagagcgttctttttgaagtgaagaaatggttttatcaaatcgtactttacttccttctacctttttctttgctcgattaattaatccaaatggaatgccatttttttgagccacttcaaaagtaaacgaactacctgcttgtcctataattaatttatacataggttctaatgatttttcatcaaaaagcatattagcattggtagcactaggcaattcgttagctaacatttttaagttagcataatgtgttgtaatgattccaaaagcctcacgatgataaaattcttctaagaacacctcggctaaagcaccccctaattctggatcggagccagtaccaaactcatcaattaagaataaagtttttgaattgcatttttttaggaagtaattcatgttttttaatcgataactataagtacttaaatgattttcaatagattgattatcacctatatctgttaaaattcgatcaaacaaacaagtttcactccgttcatgcacaggaattagcatccctgattggagcattagttgaagtaaaccaacggttttcatagaaatagttttgccacccgcattaggacctgatatgacaacaattcttttgctttcatcaaattcaaaggtttgaggataggtagtttttcctttttctttattatttaggaataaaataggatgaaaagcttctcgtaaatacactcttttttcatcgtttattttaggtaataagccattaatttttaaagcgtatttagctttagcagaaataacatctatagcacttaaaaaatcttggtattgacttaataattcatggaaaggacgaatattattggttagttgttttagaattttaataatttcttcttgttcttcatactctaaattagataattcccgagaataacgtaaggtggattctggttctatataagcaatgctacctgttttagagcttcctaatatagaccctttcactttacgacggtacatggcttgaacagctaatactctccgattttcaactactgtttctcgaatttcatctaaataacctaacgaattgtattgacttaatgccattccgaaactctgattaacttttccacgaactaagttcatattcctacggatttctaatagagtaggagtggcatcgtcttttatttcggcatatttgtcgaaaatagcttcaatagcttttgttatttcttttgtta

SEQ ID NO: 3102 - DNA, 24584 bp, synthetic construct
  source 1..24584: mol_type = other DNA
  misc_feature 1..24584: note = Synthetic
atgtggaaacagtttaacccagacggaactttaacttatggtaactttctggaaactgttactcaaattatgcctatgtattggatgagagcgattggtggaaccctatatttaacgggaatgcttgttttagtctataacattgttcaaactctgagagcaggatctacaattgaagatgaattagccgaagctccagctttaataagaattagctctggaagaataaaaggagaaaaatttcatccttggttagaaagaaaaccgattcaattaacaattttagctacagtagctattttaattggaggtgtgattcagattgtacctactattatggtaaaatctaatattccaacaattacgagcgtaaaaccctattctcctttagaactagaaggtcgtgatttatacattcgcgaaggttgtgtaggttgtcactctcaatctgttcgtccttttagaagtgaagtggaacgttacgggccacaatctaaggcaggtgagtttgtttacgatcatccatttttatggggatcaaaacgtacaggaccagatttattaagagtaggtggtaaatacaatgacaactggcactttaaccatttctggaatccacaaagtatatctgcaggttcaattatgccaggatacaagtggttatttgataacaagccaatggatatttctttgactcaaaagaaaatgcaagcaatggttacactaggagtaccttatacagaggctcaagtggcaagtggtctagatgatttgagaaaacaagctgtttcaattgaagaaaacttgaaaaacgatcctgactttgttaaaagttatgtggaaagcaagaaaaaagcagcagcaagaggagaaaaatttgtcccaatgaatgaaagagaaattgtagctctgattgcatatatgcaaagacttggaacggacattaaagttaaaaatagtgctaaaaattaagagtcatgtttgaacaaataaaacacaatatggagacaatcgatggcgtgtcgatatatcccatcttatcattattaatttttttcttcttctttgtaggactagggatctgggttttctcctataagaaagaaacaattgatgaattgagtgaaattccattgaaagacaattaaaaagtataattttttaaaatttagagaatgaaaaaatttattccagcatacgttagtgtaaccgttattttctttgctgtatttggagcaatcgaattctttatagactcaggagaccgacctgcttttataaaatttccaatggtttcactattcttatttgtatttctttttcttattatcgcaatagaaattacaatgacagcagtagataatatcacttatcatttattgacagaagaagaaaaaatcaaattaaatgaaacaaataatttgagcttcaaggataaagaatggtataaaaaattaatggaaaaattgactaaaacagctccattagctgatgagggtcaattattactggaccatgactacgatggcatcaaagaattagataacaatttgccaccatggtgggtctatttattctacgcttcaataatttttggagtagtatatatggttagatttgaaattttaggtgctgataatcaggaaatggaacttaaaaaagaaatcgcccaagctaaaattgaagtcgcagagtacatgaaaactgctccagatatgatggatgaaaaaacagttactttgttaacggaccctgcagatttagcggcaggaaaagtaatatttactactaattgcgctgcttgtcacagagcagatggtggagggcaaattggacctaatctaactgatgatcaatggattttaggtggtggaataaaaaatgtttttcatacacttgtaaatggaggacgtgatggaaaaggaatgatttcttggaaaggaactttgaaacctaaagagatgcaaaaagtagccagctatattctatccttaaaaggaagtaatcctgctgatcctaaagcgccagaaggagaagtttgggtagatgagaatgcaaaagttgcagttaaataaaaattataaacacacgtttttacttaacttaagaatagtactaattatttgaacagtgttttaaataaaaaagaaatgtcaaaattaccagatgaagcttttagagatactattggaacaatcgacgaggagggcaaccgaaaatttatttttcccaaaaaaccttccggaaagttttatgattacaggaaatgggttagctattttttactgattgtacttgttgcaaatccatttgtaaaaatcaatggcaaccagttcatgatgttcaatattttggagcgacgatttaatattttcggatttcctttttggccacaggatttttatctttttgttcttttcatgattgtggggattgtttttgttatcttatttaccgttatttttgggcgaattttttgtggatggatttgcccgcaaaccatttttctagaaatggttttccgcagaatagaatattggattgaaggagatcgaggcgctcaaatccgtttagaaaaacaggagtggaatgtagagaaaatcagaaagaaagcgcttaaatggactttatttttaattatctccttttttattgccaatgttttcctggcttatcttatcagtagcgacaagctatttttgatgattgaagaagggcctgcaaagcatatcagtaccctagtttccttgttgatttttacgggtgtgttttactttatttttgcatggtttagagagcaggtttgtattattgcctgtccttacggcagattgcaaggtgttttgttagacgataaatcaatcaatgttgcttatgattttgttcgaggcgaaaaagaagccggcagagccaaatttaacaagcaagaagacagagcatcaactggaaaaggagattgcattgattgcaaacagtgtgtaaatgtttgtcctaccggaatcgacattcgaaacggaacgcagatggaatgtgtcaattgtaccgcctgtattgatgagtgtgatacaattatggaaaatgtgggtttacccaaaggacttattcgttatgcctctgaagaagaaattgagaaaaacgcaaagtttaagtttactccaagaatgaaaggttactcagctgtattatttattttaacgggtattttaattggacttttgttcctgcggactgatgtcgaagcgacgatcttgagattaccaggacagttgtttcaacacaaaggggataatatcagcaatatttacacttttaaaattataaataaaactaacaatgattttaatgacattcattttaaattagttggtataaaaggaactttaaaagtagttggaaaacaagctttaaaagtacctaaacaaggaatgagtggcggaaccttgtttgttgaaattaataacagcgtattggacagtgataaaacaaagctgaaaatagaagtgtacaacggaaaagaaaaaatcgaaaccagtaccactagctttttaagtccgcgaagttttgactgatgtcaaacgagttgaaatttataaattgaatagtatgaaaattaattggggaacagcaattgtcattgcttttgggttgtttatgaccttcattttgtattttgtttttatggttcagtcggattcgaaatacgataatgatttggtcgtggaggaatattataaacatgatgctcgttttggcgaggaaatggaacgggttcaaaatgcagaggatttaaaagcaaagccaatcgtaacggctggagcatctggaattacaattgtttttccaactgtatttgttccaataaatattaaaggaaaagtgtccctttatagaccgtctaataaaaaattagattttgagattccaatttcattatctgatgctactactttgctcatacctaaaaaaagtttggcaggcggtcgctgggacattaatatggaatggcaatatgagggtaaatcttatttgtctaaagaaacaatatatatcaattagtcaagaagcttaaatcttttaaggttaccgtaaactttaagactttcgacttctggacatcaagctataaaaatgctttactctgccttcattttcggtttaataagtagttttcattgcattggaatgtgtggtcctattgcgatgatgttacccgtagatcgcactaatcagactaaaaaagcaatccaaatcatcacgtatcatttaggaagattaacggcttatggtaccattggctttgtttttggattgttgggaaaaggatttctattggctggtctgcagcagaatttatcgatatttattggtgtagccatgattagtgttgttttaattccagacaaaatttttgcgaagtacaacttttcaaaaccggtttttaaattaatttctaaaatcaaaactgctttaggaagtcagtttagaaacaagagttttaaatccctctttactattggtttgctaaatggttttttgccttgcggaatggtttatgtcgctttatttggtgctattgctatgcaaagcgaaagtttgggcgttttatacatgattttatttggattaggaacggttcctttgatgagcagtgtggtatatatcaactcctttattaccgtgcctattcgcaatagaatccaaaaaacgattccttatgtggcaatagctattggttgtttatttattttaagaggattgggattgggcattccttatatttccccatcgaatatgagcttgtttattcaagctgatccaaattgtcactaacttatttgtgatttttcatataaaaagcacgctgaatggcgtgctttttatatgaaaaagtttaaaaaattatattgtcatcgaaaacaattgggtttctggcgcttttcttttcaatcgcaaatcaaatgccatacaaatattacggacataaggtttgccgttttctgtgacctcgatgctgtttttagttgtaattaataagccgtcgttttccatttcttttaactgatgtactattttggggatttcattaaaatagccttccgtatcattccaagaggttttaaattggcacatcaaattcaaaatatgttttcttatgatgaggtcttctttggtcaatacgtgtcctctaaaaacaggtaatttatcccattctaatatttgataataatcttctagattttttacattttgagcaaaactgtaccaactatcactaatagctgaaacacctaagccaatcatcaactgcgttttagaggaactgtatcccataaaattgcgatggagtgtgccattttgaaatgcttcatacaaactgtccgtttctaaggcaaaatgatccattccaatttcatgatagccgttttcgaaaagtaattttttaccagtttcatataacattctttttttgtcgtcttttggaatgtcctcatctttaaatccgcgttgtccatttcctttaatccaaggaacatgagcataactataaaacgccaatcgatccggctgtagtgattttgttttctcaatggtatcaacaatatcttcgacttcctgaaatggcaaaccaaaaataatatcgtggccaatagaagtatacccaatttctctagcccaaaacgtcacttttgcaacattatggaagggctgttctctatgaattgctttttgaacctttacggagtaatcctgcacgccaaagctcactcttctaaaacctaaatcatatagcttttgcaaatgttcgtgggaggtattgttaggatgtccttcaaaactaaattcataattaggcgctttcgtggcataagtgaaaataccgtttattaagtcttctaagtttttagtggagaaaaaagtaggagtaccgccgcctaaatggatttcttttatacttggtttttctccaaggattttacagtaaatggcccattctttcaatactgcttcgatgtaaggatgttctacgctgtggttttttgtgatgcgcttgttacagccacaaaaagtgcataaactttcgcaaaacggcaaatgaatataaagactaataccttctgatccattactttctataaatgatttttttagagttgctgtccaagcctcgtatgaaaaatcaacttcatcccaatagggtacggtaggataactagtgtatcgaggtccgggaacattgtatttttgaattaaagaatgtttcatagtaaaagggtttagtatgaccaaaagtactattaagtctaaagatgtaaaatgataattatcatattaaaaacggcgcaaaacaagagactcaacggaagcccttttttgaatactatttacttatggttttgaagacaaccttcaataatttttttccatttttttgttaattaatggttttcaaataaacggagtagtcccatttgatcgttttcaattgcataaaataaagcgaaatctgttatgttattttctttattgtgaaattctaatgcttttcaatggatggcgttggtaccgttttcagtgatcaatgctattgtactggtttgaatgtatttaattttatgaagttcgctattttgggtgtcgagttaaaatccagtaataggaaaccttttttttaatttttacccctaacctttttgtttagcgcttccgttaacgcaaatttgaaatgatagtttcggatgtatttattttttatggatttaatttttgctacattgacgcaaccagacctccacgaatagaaaagaggaatcacaattattacagttagtaaataccctactattgttacggatgtatccattttttttatttttggtcatttaaacagcatgataagttcaattgaaaaggcaaaggagtcaattcaaaaaaggacaataaaatcatcctttattttaagtaacacactttaaatcaccaaaaagaatggaaaggatagcgtagaagcgaaatcatctgatatcggttgatgtcttggtttgcaaaacaagtgaaaacggtattacttttaatatctggacgtgctatcaaaaatttcccagatattttgcaatcgagcaatgggtagttttatgatgtaaaaggaatgcagtactgatttgaggctgcagaaaaacaaaggtaggaatgtaatgcagcaaaacggaagaatgtgacttttctaatttgatgggatgaacagaagattcatttgcttcaatcccaaataacaaaactattgaaagtcatataaaaaacaggattttctgtatgcaagtcatcactgcaaatttaaaagtcatcactgactacataatattatttctatttaaggtgagctaaaaaggatcctacaaaactctaatccaaaaaaaacctcgaactgttcttgttcgaggtttttgtttaatcgtatttattaatcactaatcgattttcaagtttcgcaattgttttagtttctctttccacacatcaagactttctttgtggatagctatgtttttacggacttctaacacaatagaattctcttttttagcattgcgagtattggtgaaaaactgaatgttgttttccaattggaaaatttcattctgaacttcatcaattttacgcatcaagaaaatcttttcattatccagtttgcgcgtatcatgactttcagataaatgatccattctattggcaaatcgcatcatatctgtatcttttttacttaaactcaatttttcaaaaagggcatctagaattttattgaatttcccctcaatatgtcttcttgggaaagggacttttccaaagtttttccaagtttcgatatgcaatttaatagcgtctaaatcagttttatgatcgccagtcaattggaattctctcaacgcttctaagtaggcttttttgttgtcaaaagcttctacttcttcgctgttttcctcatttttttgttcttttaacttttcaaaataatgattacaagcgtctttgaattctttccagattttgtctgaatattttcttggtacatggccaatctgtttccactcctcttgaatttgcttcatgattggtgttgtagcagcaaaatctaggctttcttgcaattctttagccttgagtactaaagcagtttttagacttaaattatcattttgatctttcttaatgtctttgtaaaacgaatttttaaacgaattgaaatttctaacggcagttttaaaactagcccaagtttcttcgtttacatccgaagggacttttccagcagagaagaaagcagcgcgtaaagcctctactttttctatctgtgccaaccattgcgaatgtgcattgactttttcagtcgccaaaacttcaattttagcaataatctcttttttcttttctagattttcaagttctgtacctctttgattttcaaataacacttcgcgtttgtcatgcatttgtttagttaaatcactgaacttgttccatatttcatcacggtgttctctcgaaaccgggccaatgtcttctttccaaatcctgtgtaagtcttgtaattctctaaaagccttattaatatcggcttcatttactagctcttccactcgggctacaattttttgtttttgctctaaattgtgtttaaaatcaaggtctcgagcctctctgtctaagtgtaaataatcgtagaaattttccacatgaaaatggaaattgttccatacgtggttgtatttgtctttaggaatcggaccagcattcttccatcgttctcttaaatcattaaaatgtttcaaggtatctttgatgttctcttgtggattaatcagctcttttatttcttcaacaatagccaaacgatgctctaaatttgtttttagattggtttgtaaactcttgaaatgagtatttttagtatctctgaattgagaatagaacttatcaaattgggtttttaatggcgagtgatagtgaaaatcttcattaggatcttggttttcagcaagaaattcctctttcttctcttctataaggtggttgtattttgctaagaatgcttttttcacgtcttctatgtgatctttaaaagacattactttttcattggaaactaggtttttcagttcctcaacaagttgttctaaggataaagtatcataatcttgcatagaaatttcatgacgatctttaagcgtctcgtcttcactttcttctgcgttagtatccgtaatggcatctagagccttctggtttttagtttccatagcagtatcagtggaggaggcttcatcagggacaactgcgttatcttcagctggcatatcacttggttctgctgcaggcgttgcttcaaggtgttccttttgggactgatcggatgccgtcgcattgttttctaaatttccatctgcttcgttttcctgacgagacaggttatcattcttttcttctaacattttttcaatgtgtaaggtttgtatttatatctattgcgaaagatactaaagcagtatgaaagtacaaaataaaaccattattaatagtcattttatgttcaaaaatgttttcatttggagccatttcctgctgttcgctgtatctttttgtttgctaaaaagcaaactaaaaaggatgccgctgccatcagggctagggtttagaggttagaagtgtaaattatttccaaaaaaaatccatcgatgcaggaataaagagtttaatctactctgctgtagcaaattattgcaatactattgaataagtgaaattttgataaaatgaaaagtcccaccgaagcaggactaaagattttcatctacggcatatagccttattgtgataagattaaagattagaaattttaatcagatacaaacgtaaacaaaaaatagttaagttgcaatgaggaaaaccgtaaaacgattaaatattttctttgtagttttaaaaattcttacaaaatagagttgacatggcaaaaatattaggattggatttagggacaaatagtattgggtgggcgatagtggaaaaagatggaaatgatttctcattagttgataaaggagttagaatattttcggaaggagtaaaatcagagaaaggaatcgaaagttctcgcgctgctgaacgaacaggttacagaagcgctcgaaaaataaaataccgtagaaaattaagaaaatatgaaactttaaaagttttatccttaaacgggatgtgtccgctctccattgaagaagtggaggagtggaaaaaatctggttttaaagaatatccacttaatcctgaatttctggaatggttaaggactagtgatgacgaaaacattaatccttacttttttagagataaagcaagtaagcaaaaagttactttgtttgaagtaggtcgtgcattctatcatattgcccaaagaagaggttttttgagtaatcgtttagaccaatctgctgaaggaattttagaagaacattgtccaaaaattgaagcactcgttgaagatttaaattctactgatgagattcttacaagtttaaaagattatttttttgatacaggaattcttgatgctaatgaaaaaggcggttttgcaaaagatttagatgaaggggataaaaaattagtttctttatatagatcaattcaagcaattgttaaaaagaatgatactgattttgaaaaaggcaaagcagaaattattgaacgattaaacaaaaaagatgttttaggtaaagtaaaaggtaaaattaaagatatatctcaagctatgcttgaaggaaattttaaaactttaggacaatattttttcagcttatataataaagaaagaattagaaatcaatacacttcaagagaagatcactatcttgaagaatttaaaataatttgtaaatttcaaggaattggttcaattaatcaaaatgaaaaactaccagaaaagaagtttgagggtttggctaaagagttatacaaagcaatcttttttcaacgtcctttaaaatctcaaaaaggattaatagggaaatgttcctttgaaaaaagcaaatctcgttgtgctatttcacatcctgattttgaagaaaaaagaatgtgggaatatttaaataccattaaaataggtactcagtctgaaaaagtgttgagatttttaagtcaagaagaaaaattaaatttaattcctaaatttttaagaaaaaaagacaacttcaattttgaagatttagctaaagaattgattgagaaaggagcaacttttggattttataaatcttcaaaaagagatagttttcattattggtttaattataagccgacagatacagtttcgggttgtccagtttcagcttcattaaagagtgtagttggtgaagattggaagacaaaatcatttatctataaaacgactaattcaaaaggtattgaagtttccagaaccgttaattataaggatttatggcatttgttatctgtttccacttcagatatttatttgtacgaatatgcaaaaaataaattaggattggaggataaaaatgccaaggctttcagcaagattaaattgaaaaaggattttggaaatttgagtctaaatgcgataaacaagattcttccttatatgagagaaggattattgtattcacacgctgtgtttatggcaaatattgaaagtattgtggatgaggtaatttggaatgatttaggacaaagaaaatatattcaagacaagattgctgcaattatagccaataatattgttgataatggacttctggaagttgtaaacggattaattaaagaatgcaaagttgatggagcctactactctaaagaagcagcagatacttatagaaaggatttaagtaaaaaactcgtttctttttttaaatttcatcacatcgatgatggtataaagcaagaaactattttaaacgaattatttcctgtttttattgaacaattaaaggctcatgaattcataaaagtaaagcgtttagatgaaaaagttttagaatttctaaaaggagaaaatcaagatggagaggttttttgcaataatgccaaacagttaaaaaaactatatcatccatcagacattgaagtttttaaaaaacaaatagtgaaagataaagatggaacagaaacagggcaacttattttaggaagtccgttaacttcatctattaaaaatccaatggcaatgcgtgctttgcatcaattgcgtaaagttttgaatacattgatagttgaagaacaagtagattcatctactcgaattcatattgaaatggctcgtgaattgaacgatgccaataaacgaaaaggaattcaggattatcaaaatgagaataaaaaagagcgtgaaaagtatagagatgaaattaagaaactctatttagcagaatgtaataaagaaatcgagccaacggttgatgatttattacgttatcaactatggattgagcaagacaggaaagagatttatgagaatggaaacagtattagcatatgcgatattattggagataatcctgcctacgatatagaacacacggttccaagaagtatctcgcaagataattcgcaaatgaataaaacgctttgtagtcagaagtttaacagagatgttaaaaagcaaaaaatgccttttgaattaggcaatcatttagaaattttaccaagaattgcacattggaaagaagaagctgataatttgagcagagaaatagaaatgattattcgctctacaaaaacagcagcaaccaaagaagctaaagacaaaaaaataagaagaagacattatttgactttaagacgcgattatcttcaaggcaaatacgatcgttttatttggactgagccaaaagtaggatttaaaaacagtcaaattccagacacaggaattattacaagatatgcacaagcctatttgaaatcgtatttcaatagagtagaaagtgtaaaaggcggaatggttgccgagtttaggaaaatttggggcattcaggaaagttatcaagaaaacggaaaaaagtattttaaagaaaaagacagaagcaaacatacgcatcacactatagatgctattactattgcgtgtatgactaaagataagtatgatgtgttggcacacgcttggacgttagaagataaagaacaaatcaccgaagctagaaaaatagtagcggaatcaaaaccttggaaaacttttaaagaggatttaaaaaagattgaagaaggaattttagtttcacattatacgccagataatgtaaaaaagcaatctaaaaagattgttagagttcgaggcagaaaacaatatgttgctgaaattgaaagagatgtaaatggaaaagctgttgctaaaaaagatattagtggaaaagttatatacaaattagacaaggatgggaaaaaacttccaagattacaacaaggtgatactattcgaggttctttgcatcaagacagtatttatggagcaattaaaaacccattaaagacagaagaaatccgttatgtaattcgtaaagatttagaaagtataaaagcatctgatgttgataacattgtagatgaaatggtaaaagaaaaagtaaaagaagccatagcaagtaaggttttaatactttcttcaaatccacaacaaaaaaataaaattgatggtaaagtttggatgaacgaagaaaaaggaattccaattaacaaagttcgtctgtatgcgaattcagtgaaaaatccattagaaataaaagaacatagttctttatcaaaatctcgtcacgaacacaaacaaaaagtatatggacaaaatgatgagaattttgcaatggcaatttatgaagggttagataaaaaaggaaagacagaaagagcttttgaattaattaattatatggacgctggttattattataaattgaaaaataaaaatgaaaggaaaaaagatataatttctttagtacccgaaaagcatatagaaactggatttaatttattaaggtcaaataaaatacctattattttaaaaaaagggttgaatgtgattctatacaaaaatgaaaaggaagagattgactttaataatcctaatagtatcattaaaagattgtataagatttcagggctagataaagacggaataaaattaatgtattgtatttctgcaaaaggttcgacagaaaatattgcttatatgaacgatgttattaataaacaaaaattatttgaattaaaaagtgaaatggaaaaattaggtttgtgggataaagttttttctgattttaaaaatgataatttaaaaaagtctgatttttttaaaaaattgaatgatttacttaacaaacattattttgaaaataatgtttgtgattcaataggttcaattaaaaaagtaaagattaaagaaagtggtttgacaacaccaaagggtggggatgttatagataattttaaagattttccatatattaagtttaaagttagcaatttcaatgctttaattgaaggaattgattttaaaatttcgccaacaggtaagtttgtacaaatttaaaaataaagattatggatgagttaaaattaacagaagagcaaatcaaaaagattcaagcaaaaattgataaagcggagaaaagtggttttagcaccaaaacaaaggaagaattattagctgacataaagaaaaaattgaatgtttagttttgtcattccgacgaaaaaggaatcacatcagtagagcaactaatgtgatttttccttctttggaatgataaaaaaggcacaaaagttctttgacataagtttttcaacgtcttaaacatctcaaaccacaactgaaaggtatggcatccgcccagcagggatgcagtagctttctgttgtggtttgattaaagattagaaaacacgatattaaaagaaaaagtaagttcgttagatagttgttgtggtttgattaaagattagaaaacacgatattaatatggagaagattacggagaagaaatgtgttgtggtttgattaaagattagaaaacacgatattcggaaaagataggaataacgagagctacagttgtggtttgattaaagattagaaaacacgatatttgaaaagtaattacctatttttggattaaagttgtggtttgattaaagattagaaaacacgatattctctaggattagcccatgaccaaatggaagttgtggtttgattaaagattagaaaacacgatattatgacggtataatggagcattttggtgctagttgtggtttgattaaagattagaaaacacgatattccatgctgtgctattacacttgtagttattgttgtggtttgattaaagattagaaaacacgatattcccgaatgtttcacggttttttcattattagttgtggtttgattaaagattagaaaacacgatatttttcgaaatattctaatactgattgctcaagttgtggtttgattaaagattagaaaacacgatattgctgtaaaaaaaacatccattagaagcccagttgtggtttgattaaagattagaaaacacgatatttctctaaatttaaactatccttatgacttagttgtggtttgattaaagattagaaaacacgatattcgtatcagtttatgaccaagacacaaaccagttgtggtttgattaaagattagaaaacacgatattcaaatacaataatccgtgttttgcttttagcgttgtggtttgattaaagattagaaaacacgatattcctttatctgcttctattcttgcaagttctggttgtggtttgattaaagattagaaaacacgatattacacggagctttacaccgataagctagatagttgtggtttgattaaagattagaaaacacgatatttgaatgtttcaacacaaaattggaaggccagttgtggtttgattaaagattagaaaacacgatattcttgctgattagagcttgtaataaattcatagttgtggtttgattaaagattagaaaacacgatattcaatgtctgtattccctacgcttgtcactagttgtggtttgattaaagattagaaaacacgatattcaacggaacaaagttttcatacattccccaagttgtggtttgattaaagattagaaaacacgatattcagttggcttgttaccttctgattttcatagtattaaatgtaaatatcgtatagaaaaatgcctctttattggtttgataacccaatattgatgcatttttttgtttgtagtggtaatttttctaaaggttttataacttttgtaaaaaagtaaaaaatggtgtattcgcacatgcgactctatttgtcaacttggaaatggcacaaaacaagagagcaacataattgagacgcttccagcgtgacaaatagtaagagaaaaaaatagtttgcgataattcggaattaatagtaatgaaaattaatcccagaaatagcaagatacaaagagttcacactactattttataaatatttagcattcaaaatgactatacgcgctattgtttcaaaacaattccaattgtgtgggttgcggtgcttttgggacttcagctttgccccaaaagtttaaaatatttccaaattgcttatccgtaattcgtaaaatactcacttttcctaagggtggtaatagtcggtgaatgcgtttttcatgtacatcggcactttcgctgctcgcacaatggcgtacgtaaacagaatattgcatcatgctaaaaccatctttcaagagatttcctcgaaattgtgaggcatttcttttgtcttttttggtttctgttggtagatcaaaaaacacgaacaaccacattattcggtatccgttaagttccataatttaggatatttaatttttttacggtcaccagtaaaacactgttggagtgagctagctgttttttgtaatccaaccattaacggacttttttcctctttgaaataaacagtttgtgttagtaattgcagtagttccgcttttatagtagtggtcagctcttgctctggatagcgtttcataatgtcaaaaactttttcatccacaatagggcgaaaaggttccataatatcatccgcaagagcaaaagcattgtatttacttttatgatggattcctaaagtattcaataaaccgcttccagaaagtgctcgtgcggtcgcagctctcaagatagcataaccataattcaaaaaattatttggataatcgccataacgttctctttttattccatctttttcatgattgggtagcgggaaatttttccaatactgttgtgccgcaacgcctgccatatttgatgtgtctccgctcagaaccttactggctagaaattcaaaagtgtttttgctagccgttatcttggctagtaattctccttgatttttaattttttcaacaatagtttgctgccataattgttttttaagtggaatggaagcttcaatctgatttttgaatatttcttgctgaatatgatggctgttgaggttgagaaacattccattgggaagatggttgctaccgcaaataataatagcggtattatgttcaacaactagattcatggcaggaatactcaagtagatttcaacatgatcaagtactagaaagccaatgtcttctattggtatagtactttctcttatttctgatttgattactaattgttgattttttgtagtgattgaagatttgctttcgatgagaattgttcttttgatcataatttaagttgttaaattaatggcaaatatttgattatcaatcaaattaaagcattaaataagcaactcctttacggcaaacctcaatctgtcttttatttagttataaaaaaaacgtcttgttttaaaaatgtagtaccataataggagtattacaattttaaaacaagacaatttgtatattctttgagtagctttttactacttattccaaatcttccatgctttttcggcttgaaaaatcagcatgtctaagccgtttttaattttggctccttgtgctgcagctttttgtagaaattgcgtttcggcaggattgtatatcaaatcataagctatgtgcttcgcagtgaaaaattcatacggaagtaaagggaaggcagctacatttggactcgttcccaccggtgtagcatttattattatttggtaattatcaaatgttgttgcgttgattcggctgtagtcaattgccgtttcactggcttctcttgaaacaaaagtatagggaatgtctagttcgtctaaagcaaaagcaactcctttagatgcgcctccggtacctaaaatcagtgcttttttatgatgtggttccagtaacggttgcaatgattttttaaaaccataataatccgtattgtaccctttcaactttccttttttggtgattttaatcgtattaacagcgccaattaatagcgcttttttcgaaagtttatgcaaaaatggaattacagcttccttatacggaatagtgacactcattcctttgaggtcgggtgtgtttttaacaacttcgggaaaggcatttatttctggaatatcaaaattctcatacgtgcaaccttcaaagttttcgctatcaaatttatcggtaaaataccctttcgaaaaagaataacttatgttgcgacctactaatccaaagcgctttctaacgatatcaaccattataattttttatgttttgcaatataattttgtaccattttttttgcccaaactactggaaataaatcttccaaaagaatataattttcaaaattcagtcgcaaggcattgcttaaatggaattttgcttttgtagtatccgttagcataaagtacaaccctgctaaacggtattccacttcattctcttctggaaaatattcggatgcttgcaataaagtctgaatagcactttcgaattctcctaaaaattgtaatatgtctacccagaacaaccaagtttctaaagaatgatcaccaaactctactgcttttctatagccaaactccgcttcttcaaaaaagttcatttgtttgtttatggaagcaaaacgtttccaatacaacctattttgattgtcaattgccaatgctttattgacataaaacagcgctttttgaaagtttttctggcgaacataaaaatcagttatagcaatccatcccttgtctaaaaggggatcttcatgtaccgtttcattaaagtattttaaggctaaaacagaattacctagtttttcatagcattttcccatgcgcagcagcgcatacgaagttgcatcatctaattcgatggttctgctgtagctttcaatagcttcttcatatttttttaatcgttcaaaagcttttgctttttccatgaatgcacctaggaattcatcgtcaattaatgtagcgtaatcaaaggcccgaatggcattttcatattctttaactccataatgcaacctacccagctggtgccaagcgatttcgctgtacggatttttgtcgatgtatttttttagataactgatagcctcttggttttgatctaaaaattcaaaacaatacactacgttatacaatgcagattggtcttctagatcttcctctaaacatttgatgaagctttcttttgccatttcaaggttgtccataaaaagatattccatccctattaagttatagacatcagcattatcatccgtgtattttaaggcgattcttaataactcaacggctttttcgtgttggtctctttttgaatagatattggctttttgaatgtaaatttcttcattcgttggctcaatagcatacaactcattcaataatttttcggctaattccagtttgtcatcaaagactaacatctccacctgaactaatttcagtccagttgattttgggtgttggtctaatgctagctttagcgctttttttgccaatgcggccttacccatatcgagataatgaagaataatttcttcaaattcttcggagtcaaaaaagagcactttgttggttttcaacatcgactcaaatttagacagggataagttatagtcttcttcttcgttgcttaattgcatctttgtttttttagaatttggccttattaaaagtaggcatccttactgttaatgtgaggaggaacgggaattgttttaaacaatttaattaacaaaatccgggctggtttagtactgatttccatgcttgatacatgtggaaatcttttttactgtccttctctaaacgaaggtaaaaaacggcaattttttctttaggatgggataagagtccgcacgtttgcccgcaggattctcctaaagaaactattttttattcaaaatcgaatccattacttctagcatgattgcacaaccttctcggatttcttcattagaaatggtaagcggtggcgtgattcggatggcgcatccttcaaatagtaaccagaataaaatgagccctttgtcttgacattggagaatcacttcgttcgtaatatcggcacttatggtcattgcggcaagcattaaaccttttcccctaatctcttctatcaaaggatgtaccaaaagtgatcggaatagattttctttctctaaggcttcaggcattaagttggtctcagtgatttcttgcaaagtagccaaacacgctgacgcaatgacaggatggcctccaaaggtggtgatgtgtcccaatttaggattatcactaaggagatccatcatggtagctgaagcggtaaaagcacctacgggcatcccgccacccattcctttgcccattactacaatatcaggtacaacatcgtaattttggaatccaaaaagcgttccagttcttccaaaaccaggttgaatttcatccagaatcattatcgcgcctacttcatcacagcggtggcgaacttttttaagaaaatcatcatggggttgaataaatcctgcaccaccttgaatggtttctaaaatgattcctgcagttctggtggtgattttttgtaaatcatcttcgttattaaaagtgataaaatcgacatcaggtaccaaaggacggaaaacttgtttgcgttcttcaaaacccatcacgctcatcgagcccatggtattcccatgataagcgttgtgacacgaaattaattgacttcttcctgtggttcgtctggcgagttttagagcgccttcaatcgcttctgtgccggaatttaccaagtaagttttgtccaaaggagcgggtagcaatgatgctaataatttgcaatattcgactgccggactttgagaatattcaccgtaaaccatcacgtgtgaatatttgtctaattgctcttttatggcttgattaactcttggatgctgatgtccaagcgcacaagcagaaactccagcaacaaaatctaaatattttttattagcggtatcatagatatatgaacctatggcatgcgagatttccatacccaatggataaggagttgtttgtgcttggtattttaagaaatcactattcaattttttagaaatttaaccgctaactttgcaaagtttgtaaagtttacgtagttttaaaagatgtttttttgtccctgtgtcctagattgaatactgagacttttcactgttccctttactttttacttttttttcactttcttcttatcgtaattcagagtttccttccgaattttcataggaatagcctctttagcttcggctgatttagttgcttttgctattttttcattatcttcattttcttcgggtggaaagaggtcgtctttcgattttattcgttcgtctccgcgccatactaaccctctcagttttcttgcattttcaggtaaatctttttcggggtaaatatcgccatctacttgctgaaagaaagtaatggtttcgatctcatttttttctaaaaggagattaattttactacttacatttttattgatgcctatgagttcttgcgcttcatttcgcatataatagataacttcggcatttttgacaatgtccacgtcacgcagttttccttcctcaaatttaccgtagagattttgtcctttgacttgattatagcccgttcctatggtgtctttagagactataaaggtgttctcaaggacttttagtgaatctagcttttgggtggtgttattgcctataagatgcatgatatcgcctgttatttgactttctccattccaaagtattggatttccaatcatttttgtcaaagcagtttttgagctcgaatgtattgaatcgcatttgccgctcaaatccgttttataaaatcggacgttattgaatgctctaatgactcggtttccttctttgccggttaccattaatttcttcccatggatgtaaacagagtcattttcgacaaaattaaccgcaacagctcttttcgttacatacatggaatccagttttttatatacttcggcataatgtccttttacgatgccacgattgatagaatctgttattttaacattgcgcgtggctgatgcaaattcccgatttcggtcataatacaaactgtcgcctttaatcactcgatcatcgtatttaatgaaggatttattcaggaaatgggccagattttttttggtgtcataaaaccctttttcagtgtaaatataattggctttactggttatcgtggaaggtccaaaaagatacgaatgcccagaattactgaaataatctaagtgatttgattttatgacatacgttggatttgtgatggtaactgccgtcaggaattggaattttttttgtttcacataatatcttccagaattactttcgagggtattgtctttgtttgtaattgttccaggagtatcgtaaaatacttcttgaatatttcggtcaaaattgattatttctgttaccaaagttgcgtctggtgaactcatcacagcatctccagaagcataagctttttttacatttccattgtattctgcatatttgctgtttaaaaataaagtatcgccttgcaccatttgtacatttccaaaggccttgatgtaattttccttctggaaataatacgctttgttgcatgtcattacaacgccatcatgattcacgcgaacgttccctataagtaataaagcatcaggaatttctacttgatttacatcagcaaaatcagagttttctactataatttttttcggggcttgcgccaaaactaaatttgtaattagcagtaggagacaataacgaaggaaaaacagcgatttcttcaatggatttaatttttgtcaaatttatgaaaaaggaaacaatcctaatccatattaggaattatttataatcagtccaaagggccttaatagcgaatgtttcatcttttgaaagttattaacaattaatgaaactccttcgttgtagtttccgtctcaattaaatacaaatcttaaattttaatgcgtatcgacggagattatttaaaaaatagtaaatttaaaaattgatatttagtttacgataaaggaattgaaatcatcataaatatttttatacaatgaaaaaaataactattgttgcagggataagtgcggtacttttagcatcggcttgtaaaacaaaagatttaaaaatgaatggagaaaagaaagaggacgtctctggtaaaaaagaagtggtttatcaggtctttacccgattatttgggaataaagttaccaccaataaaccatggggaactattgaagaaaacggagtagggaagtttaacgattttacagataaagcgctacatgaaattaaggacttaggcgttacttatgtttggtatactggagttccacatcatgctttaattcgggattacaccgcaataggaatttcgaatgatgatccagaagtagtcaaaggtagagcgggttctccttatgccgtgaaggattattacaacgtaaacccagatttagcagtaaatccggcgaatcgtttgcaggaatttgagtccttaattgcccggactcataaagcaggattaaaagtgattatagatattgttcctaatcatatagcgcgccaatacgagggtaagactaatccgtcgggcgttaaagattttggtgcagcggatgatgtaacggtagattacaaaagaaacaacaacttctattatattccaaatacttctttcgaaattccagatgcggcaaaaccattaaatggagaaagtaatccattaatagatgggaggtttgaagaaaacccagctaaatggacaggaaatggttctcgtatggctaaaccagataaaaatgactggtacgaaaccgtcaaaataaattatgggattcgcccggatggatccaaagattttcccgaacttcctactggatttgacacgaaatcgtatcaggaacatgatgctttttggaatggaaaagacgttccagattcttgggataaatttaaagatattgctttgtattggaccgctaaaggagtagatggttttagatttgat

SEQ ID NO: 3103 - DNA, 24461 bp, synthetic construct
  source 1..24461: mol_type = other DNA
  misc_feature 1..24461: note = Synthetic
cactaattttaaacccaatcaagctgagtttgaaaagccaaaagtagatgatctaacacaaaagttattacctataaaagataatccagggaatgtaggagaacgtttttctcctcgtatacgtttacacctagataaatctcattttgaaaataatatcataaaagctgattcaagatatttaacaaacaataatgcttttgtaaattattataaaggtttgacatttagagtatctagaaacgaaggcacaatgatggggctagattttaagaaaggagatgtaacaatttattacaaacaagatagaacggataataaaggaaaagaaatgaaaaccttcgttcttaaaatgacgggaaataatttaaatattttaaaacataataagtcggctatttatgcaagtgctctttcatccaatacaccaacggataatttattcttaaaaggtggtcaaggatcaatagcagaaatcaaaatagaccaagctttaattgatgatttaaaaaataaaggagcactcgttaatgatgctagtttgtattttactgttgatccaaattttgtaaactcgctaagcagtagtaataagtctttttattaccttaatccaatgcgtttatacttgtttaatgcagaaaaaacaagatcattgttagattatacaaatgatattaccaagctaactaatgttcctaaaaaggataaatatgttcacggaggtatattacaaaaagtaaatgataaatatatgtatcgtattcgattaacggatcatattaatcagattataaatgataaaacaggcacttataccaatgtaaagttaggtcttgctattgccgaaagtatttatataacgcctgaagcacagggattatcggctataagtgcattaaaaaacacaacaaatattttaaaaagtattccttcaactgcagtaataagccctttaggtgttgttttaggaggaatgcaaggagataataaagttcaatttaaaataagctatactaaacgaaattaatatgtgtggaattgtaggatatataggatatagagaagcttatcctattgtagtaaaagggttaaaaagattagaatatagaggttatgatagtgctggtttggtactgtatgatggagaagacataaaattatctaaaaccaaaggaaaagtttctgatctagaagaaaaatctaaaacagaaataacattaagtggaaccataggtattggtcatacacgttgggctacacacggagttccaaatgatgtaaattcgcatcctcatacttctaattctggagatctggttattgttcataatggaattattgaaaattatgaacccttaaaaaaagaattaattaacagaggttatgtttttcattcagatacagatacagaagtattagttaatctgatagaagaagttcaaaaacaagaaaatataaaattagggaaagcagtacaaattgctttgaatcaagtagtaggagcctatgcaatttgtgtttttgacaagaaaaaacccaatgagatagtagtagctagactaggtagtcctttagctattggagtagctgaaaacgaattttttatagcttcagatgcttctccttttattgagtacacttcaaacgcaatctatttagaagacgaagaaatggctattattcgtttgaaaaaaggattaaaagtaagaaaaattaaagatgattcattagtacatccttatgttcaagaactaaaaatgaacttagaacagattgaaaaaggagggtatgatcatttcatgttaaaagaaatttatgaacaacctaacgtaataaaagatacttatagaggacgtttgtactctaatgaaggaatcattaaaatggctggtgttgaagataatttagagaaatttacaaatgccaatagaatcctaatagttgcttgtggtacttcatggcatgcaggtctagtagcagaatatatttttgaagagtttgctcgcattccagtagaagtagaatatgcctctgagttccgttatagaaatcctatcattagcgataaagatgttgtaattgcaatctctcaatcaggagaaacagcagatactttagcagccatcaaattagcaaaagaaaaaggagcgtttgtatttggagtttgcaacgtagttggatcttctatctctagagagtctcacgctggagcttatacacatgcaggaccagaaattggggtagcttccacaaaagcatttactacacaaattacggttttaaccatgattgctttacgtttggctaaagcaaaaggaagcttgtcaaaatcagattaccatcgttatttatctgaattagaggcaatgccagaaaaagtagaagaaacattgttaacaaatgaagtttcaaaagaaatagcggaggtttataaagaagctaccaattgtttgtacttaggtagagggtacaattttccagtggctttagaaggtgctttaaaactaaaagaaatttcttatatacatgctgaaggctatccagcagcggaaatgaagcatggtcctattgcattgatagatgagcacatgcctgtaattgttattgcacctaaacaaggacactatgataaagtggtaagtaatatccaagaaattaaatcccgtagtggtaaaataattgccgtagtaactaaaggagatgaacaagtgcgctctttagcagatcacgttattgaaattccagaatgttcagacgctttatcaccattattaacaactattcctttgcagttattgtcataccatatagcagtactaagaggttgtaatgtagatcagccaagaaacttagctaaatcagttacagtagaataattatacgtatataataaaaaagcggtagtcttgttttagagactaccgcttttatttttatagtgtttctttaagccatttaaaaaattcgcgttgccataccaatgcgttttgtggttttaaaacccagtggttttcttctggaaaatgtaaaaaacgactttttattccttttaattgagctgcttgaaaagcttcttgaccttgtcctaacggaactctatagtcttttcctccttgtataataagaatagaagtagtccagttattaattaaatgaattgggttaaaatcgttgtacgttttttgtgcaacaatgttattcttttcccaataagcccctcctgaatcccagtttgtaaagaacacttcttctgtagttccatacatactttgggtgttaaagataccacaatgtgaaataaatgttttaaaacgattgttgtgaattcccgctaagtaaaatactgagtacccaccatagcttgcacctacagcacctaatcgggttttgtctacataagattcttttgttatatcgtcaatagctgataaataatcatccattacttgaccaccccaatctttgctaatttgttcattccattttacaccatgaccaggcattcctctacggtttggagcaactactatatagccttgtgatgcaattgtttgaaaattccaacgaaaagaataatattgagttaaggcactttgtggtcctccttggcagtataatagagtagggtatttttttgtagcatcaaaatttggtggaagtataatccaaaccaacatttttttaccatctgtagtggttacgtaacgtctctctgttttacataaatttaaatttttataaatttctgtattaacatgagttatctgattccaagatttgttttttaaatgataagaataaatttcagaagcatgattgatgtcatttctcatcaaaagaatttgatcaggtgtaaaatctataatctgcgttatgtcaaaatcaccattggtaatttgtttaactccaatagctattttggtcaatcctggaaagtttacttcaaataattgctttgtgccatctataggagcaataaaatagattttttttccatctttactccatttaaaactctctacagttccatcccagttagcagttaggtttatttcaattcctttatgttttacaataatatcatttttatcagcttcgtaaccatcttgtttcatctgtagccaagtaagatcaccgtttggtgaaaaatcaggatgtgtgtcataacccggattattaggtgtaagatttacagtttgtttagtttcaatattatattggtataaatcagtgttagtactggttgcataagccgttccagtcttttttttacagacatagatgatgtttttactatcaggagaccaaatataatcttcatcaccaccaaatggtttttgtggagcatcataaggttctccttccataatgtctatagctggagccaaacgtacattaggtgcaggtactccgccaaagaagacatgattgtatgtgccatctcgccaagtatcccaatgacgataatcaagaccgtcataaacttgagcatctgacagagataattctgggtaaaaatcttttcctaatacaggagttattttaacttctttgtcagaaagtaagtacattccatcaggagaaatgttcttgttttttatcaattctgtgtactctttaatttcactggcattaccacctgtaatagaaatgctataaaatttactagtagatttgttttcctcaatagatggggtagctactttataaataatattttttccatcttttgatactccaagaggtgttacacgacctaatttccataataaatcaggagtcatgatgttttgtgcgattccagaattaatactcataagcgttacgcttaatagcgctagttttttcatttttgatcttttttgctaaaataatgattttattaaaaaaaaagctatctcttagagatagctttttggttgggggttgggttaattatcaaagttattctttgataaagcgtttagtaacagttgaatgcaaatcagaaacttctaatatatagtttccagctttacaattggttacattgatttgttcattgtttatttttccttctaaaactatttgtccaactaggttatatactttatacgttgccatttcagaaatacctttaatagtaagtatttcggaagttggaatagggaatacagtaatttcaaaacctgaggcaatatttttttgattttctttagcactcgaagtaatgttaatagtgtaatcttctacttgtccataagaaaaagtttcacatgaagtaggaattccattgtacttcatagatattctcattctagttgctcctaaaattgctgttgctggaattgtaaatgtaccagaaacgggtgttgtagtagaaggggctttagtccaaacagtttcacctgcatctgtaaaatcaccatcttgattataatcaataaaaagggcatagccttcaggataagttgttgagttccatgatggagtaattgttatcgtttgagttgagcttcttactgctgaagtagatagagttgtaaagttttcgtaaccaacagtgctagtagaagtattattaattgttccaattacaacttttcctattttttcatcagcagtactattgccttttgaagtgcaataagtaagtgtgttagatagtgtagttacgctaacaatattacttgcaatagaaatattacccgcggcatcttttgctttcactgtaaaagaataggttgtagaaggggttaagcctgttacgttataagttttagatgtaatggaacccaataaagtagttccttgatatatttcatatcctgtaacgcctacattgtcagtatcaccattccaagataagttagtagaagaagttgttgtaccagatgcacttaatattggagcagttggagcagttgtgtcaattacattagctaaagttgttacgctaacaacattgcttgcaatagaaatattacccgcggcatcttttgctttcactgtaaaagaataggttgtagaaggggttaagcctgttacgttataagttttagatgtaatggaacccaataaagtagttccttgatacacatcatatcctataacacctacattatcagtgtcaccattccaagataagttagtagaagaagttgttgtgccagatgcgcttaagacaggagctgttggtggtatagtatcagatgtacttaggtttacagtaatatttgcattgttaacatcaaaaaagatatgatttgatcctttaaccataattcggcctgtagtagtagcagtattaggtattgttatattttcggatccatcattaggtgttcctgctaataaagttgtccaagttgcaccattatttgttgaccataaaatatctacattagagcagttaacaccatttgcagtggtacctgctacgttccaagttattaattgagaagtgcctcctgtataagaagtttcgcttccttgagaagtaatagcaaaaggaccagcagttccattaactgttacgatcatatcatcagagttgttagcaccaccaccagctctgttatcacgaacggtaaaacggaaattcatagttctagcaatagaaggtaaagcttctactaaaatttcagaaccttgtgtagtagttgctcctgttagaatagaagccatttgaggaaaatatctcgaaggaattgttgtaggggtataagatctaaaaataggaccagacaccttggttgtactagcagcagaacttgttccagtttgggttgaagtagcactgtcaaattgttcccaaatataagttaagacatctccattagcatcagttcctgtaccagtaagaacaaacggagtgctttttggaatagtaaaatctaatccagcatttgcagttggaatagcattacctgttggagtgtttacagcgcacgcttttgtttttatattgttagtaacttgttgaatgctataagtgtgaaaataagcgtcagaatgagcttgaacatcttgtggtgtaatgccagcatatcccataattgtagacccagaacctggctccatattagctccagttctttctttactatgagagtgtgtatgattagcaccaaattgatgccccatttcatgcgcaacatagtcaatatcaaaattgtctccttgtggtattccatcaccaggagatgtatatccagaacctttgttttgatcggtcgtgctagaagtgtcatctacacaaatacagccaatacaacccgcgttaccaccacctccagaagcaccaaataagtgtcctatgtcataagctccattgccaatggtattggttaggttattttgtaactcagtattccatgcgcctcctgaacctgtagaagcaacggaataaggatccgtagaagcatttgtataaataagtacatcattatttgcaatcaggttcattctggtattaaaatctttttcaaaaacaccatttactcgagtcattgtggcatttattgcagccaatgcttgtgctacggtaccaccaaaataagtcgtgtattcacctgttacggataatgctaaacgaaaagttcttaaagtgccatcatctgcattagggcgtaaattagttccagaaactttaaaacttggttctattttatcaattactttacattcaaatggtgataagttttcttttttatcagcttttttataaacagaataagtctttaaatctttagaataaggttcaatgaatgaagctgattttccagcatttaatgtcatagacttaaatcctaaaggagacatactaaaataagcagtagaagtaggattgtcaatgccaattcctatgtacgatcggatttgaggatatttagcttgtaaagcagcatccatattagagttttcgtaaactttaaatttttctaactttccttcagcatttggaagtgaaataacggttgcagaactagaacgaccaaatcggttaggagatttagataattgttttctgatcaaatcaatattcaagtcaaaaaggttcttctcaggaagttgtgttttgtattctattagggttctatgattggtattggtacgtttccataagccatcttgacccaatacaactcctgttgccaataaggcaattaaaagtaatttctttttcatttggttggttggtgttaataatggctgcgaatatatttatatttttttaataaaatgaaataaattataataaaatacgttaaaaaaaatagtttaaaataggtaaagtgcaatttattagtgaaatacttgtaaatatttgtttttttaaacaaaaaaagcagctcgtttaaagctgcttttttgtgttaaaatatatgtttattcaatttttataacaaaataattcttcttgcctctttgaagtaagacaaatttattattaataagatcctttgttttaagtataaattcctcagttactttttctttgttgacagaaattgaattttcagtcaatgctctacgtgcttcaccgtttgattttaaaaaacctgttttagtattaagtacatctacaatattgattccttcctcgatagcttctcttgaaatggttgcttgaggcactccttcaaaagcttctaagaaagtttctgagtctaatttttttaaatcttcagaagtagaatttccaaataacatattagaagcagcaatagctttatctaaagcatctttatcatgtacaaaaatagttatttcctctgctaatttgcgttgtaaaactcttaaatgtggagcttgacgatgttcttcaattaaagtttcaattgtgtctttatctaagaaagtaaatattttaatgtacttttctgcatctgcatctgttgtattaagccaaaattgataaaatttgtaaacagaggttttgtctgctgttaaccatatattccctccttctgtttttccaaattttgatccgtctgccttggttattagaggacaagttaaggcataggctttagctccttcttcttccgtatctacattcattctacggattaattcagtacctgtagtgatattgccccattgatcactacctcccatttgtaatttacatccgtatgttttgtataaatgataaaaatcatatccttgaattaactgatatgtaaattctgtaaaagacataccgtcacctgtttctcctgaaagacgttttttaacagaatctttggccatcatatagttaaccgtaattcgttttcctacatttcgagcaaaatctatgaaagaaaaagttttcatccaatcataattatttactaatacaggcgcgttgtcatcggtagcattaaagtcaagaaatttagataaaacacctttaatcccttctacatttctagaaagactttcctcatctaataaattgcgttcgttgctttttcctgaaggatcaccaatcattcctgtagctcctcctactaaagcaaaaggtttatgaccaaagtttcgaagatgaactaataaaataataggaactaaactacctatgtgtagagaatctgatgttgggtcaaatcctatatatgttgccgtgctttctttcaacaattgttcttctgttcctggcatcatatcgtgtaccagtccacgccattgtaattcagcaattatgtttttcattatttaaaaaatttttgcaaagataagtttttagtttttagattgtaaatctcctatacgacatttttaataagtccaacaagccttaaaataaagtaaatcaaagaatttgtagttcgtataaatggtaaatcccacggagtacgcgggattttagactttcgtctacggcatatagccttattgtgataagattaaagattagaataattttatctgttgctaagataaaaaaaaaatctaaaataattttatttttttaaacaaatgtttttttataagtttaggcgtaagctaaacaacataaaaaactattatgacaaaaattttaggtctcgatttagggactaattctattggatgggcgattagagaagatgaaaacgaaggagtaaatcaaattatagataaaggagtcagaattttctctgaaggagtaaaatctgaaaatggaaaagaaatatccagagctgccgaaagaacagcctacagaagtgctcgtaaaataaaatatcgtcgaaaattaagaaaatacgaaactttaaaagtgctctctgttaatgggatgtgtcctctatctgttgaagaagtggaacaatggaaaaaatctggtttcaaagaatatcctctaaatcctgaatttcttaattggttacggactaatgaagataagaatataaatccttatttttttagagacaaagccagtaagcaaaaagttactttatttgagttaggaagagccttataccatatagcacaacgaagaggttttttgagtaatcgcttagatcaatcagccgaaggtgtttttgaagaacataacccgcaaattcaaaatttaattgaagatttagatagttcaaatacgatcttaaacgaattaaaagagtattatattaatcttggaattatagatgagtcagagaaaagtggttttaaaaaggatttagacgaaggagaaaaaaatctaaagaaattatacacttcattagtatccattacaaaaaagaatgctaatgatattgaaacatgtaaacaagagcttattgcgcgtctcaataaaaaagaagatttaggcaaagtaaaaggagaaattaaagatatttcacaagcaatgcttgatggaaattttaaaaccttaggtcaatatttttttagtttatacaacaaaacaagaataagaaaccaatacacttctcgtgaagaacattatttagaagagtttattataatttgtcaaacacaaggaattgaagagatcaatacaaatgaaaaattacccgaaaaaaagtttacgggtttagctaaagatttataccgagctattttttttcaaagacctctaaaatcgcaaaagggattaataggaaaatgttcctttgaaaaaaacaaatctcgatgtgctgtttcgcatcctgattatgaagaatttagaatgtggtcgtatttgaataccataaaaataggtacacaaagcgaaaagacattacgtttcttaaccctggaagaaaaattaaaattagttccgaaattttacagaaaaaatgactttaattttgaggttttagccaaagaactggttgaaaaaggagctagttttggctattacaaatcttctaagaaaaatgagtttttttattggtttaattacaaacctacagatagtgtttctgcttgtgtagtttctgcttcactggaaaacgcaataggaaaagactggaaaactaaaacgttcgagtatcaaactagtaatactaaaaaagaagaagtcacaaaatctgtaaattacaaagatctttggcacttactttcagtagctacctcagatacgtatttgtatgattttgccatcgaaaaactaaaactagaacctaaaaacgcaaaagcatttagcaaaacaaaacttaaaaaagactttgcaagtcttagtttggcagctattgcaaaaatattaccttatttaaaacaaggattactgtactcgcatgctgtgtttatagcaaatattgagaatattgtagatgctgacatttggaaagataaggaacaacaaaaatttattcaatcaaaaatagttgatttaatagataattatttagtagaaaaaagcaagctagaaattattaactgtttattgaaaatatataatacagaagacatagaggggcgaaaagtgtattattctaaagaagctgaatcgctttttgaggctgatttgagaaaaaagcttgttccattttataaagcaaacactattagtgagcaacaggaacaagaaataatatttaaagatttattccctgttttaatcgaacaattaaaaaaacaggaattcattaaaatagttaggttagataaaaaaattgaagcttttcttaaaggcgaaaatgaagagggacaaatattttgtaactatcctgaaaaatttaaaaaactctatcatccatctgatattgaagtattcaaaaagaaaattatcaaagacgaatggggcaatgaaaaagtagttttaggtagtccgcttaccacttctataaaaaacccaatggcaatgcgtgctttgcatcaattacgtaaagttcttaatactttaatactagatggacaaatagacgagaaaactcgtatccatatagaaatggcaagagaattaaatgatgcgaacaagcgaaaaggaattcaggattttcaaaaagaaagagaagagttatataaaatttatgaagctaaaattaaagaactttatcaagtaaaaacaggaaaagaactactccacgttaccgatgaagatttacaaaaattcgaatgggcattagaacaaactaaagatggaagaattataactaaagaagaactaataaaatacaaaatatgggaagagcaaaatcatatttgtatttatacaggcaaaactattagtatcgatagttttttagggggaaatccaaaatttgatattgagcatactattccaagaagtatttcccaagataattctcttatgaataaaacactatgtgataaagattttaacagaagtgtgaaaggcaaaaaaatgcctgtagaattatcaaactacaatgaaattttaccgagaattgcgcattggaaaaaacaagcagaggaactaactcgacaaattgaaaccatttcaagatccataaaatcagcagctacaaaagtcgcaaaagataaaaacataagaaaaagacattacctcactttaaaacgcgactatattcagggtaaatatgaccgatttacatggggtgaacctaaagtaggttttaaaaacagtcaaatacctgatacaggtattataactaaatatgcgcaagcctatttaaaatcttattttaaaagagtagaaagtgtaaaaggtggcgcagtagccgaatttagaaaactatggggtatacaagaaagttttatcgatgaaaacggattcaaacacttcaaagaaaaagacagaagtaaacacacccatcataccattgatgcgattaccattgcttgcatgcctaaagataaatacgacttgttagcacacgcgtggcgtttagaagacgaacaaaataaaaaagcagcaaaagctttaatagaacaagccaagccttggaaaacctttaaagaagatatagaaaaaatagaagccgaaattttagtatcacattttacgccagataacgtaaaaaaacaagctaaaaagattcttcgtgtaagaggtaaaaaacaatacgtagccgaaatagaaagaaatgcaaatggaaaagctattcctaaaaaggatgctagtggtaaaataatttataagcttaacgaaagaggtaataaaatacccatactacaacagggcgatacaataagaggatctttacatcaagacagtatttatggtgccattaaaaacccactaaacactaatgaaattcgttatgtaattcgcaaagatttagaaagtttaaaagcaaatgatatagaaaacatagtcgatgaaaatgtaaaagcaaaagtaaaagaagcagtagctaataaaattttacttatttcatctaacccccaacaaaaaaacaaatttgccgaaggtaaaaatgtttggatgaacgaagagaaaaaaataccaattaacaaagttagaatctatgctaattctgttaaaaaccctatagaaattaaaaaacatagtactttatcaaaatcaaaacacgaacacaaacaaactgtgtacggacaaaacgatgaaaattatgctatggctttatatgaacttgatggaaagcgagaatttgaattaatcaataattttaatttagcaaaacttctcaaacaaggtcaaggttactatccgttacataaagaaaaagaaataaaaggtaaaaaagttttaatacccattgagaaaagaaacaatagagatgtagttttaaaaagaggtcaacaggtagtcttttacgataaaacagttgaaaattctaaagatatttcagaaatagtagattttagaggaagagtatatttaattgaaggattgacaatacaaagacaaaaagacaaaaaaactggtaaggtcaatgaatatggcatcattcaacttagatattttaaagaagctagaaaatcagaagaaattagcaaagacagcttcaaacctgatggagagttcaaaatcaatgaaaacaaaccaactagaaaaatgaatcacaatcaatttacagcatttgtggaaggaattgattttaaagttttaccctcgggaaaatttcaaaaaatataaaaaaacaatcacagaagtaatcctctaggaatcaacttcgaattaaaagttctttgacataaaaaagtaaaaatcttaacaaaattagaattgtaattcctcaaaccatatagactttcactctttgttggtgattttaaaagtttgagaataatttcatttaaaaacacaagtttatatttgtcattggtgtgtttgtgattataattgattaaagattagaaaacacgatatttataaaagtttagtgtttgtttagtgcaagttgtggtttgattaaagattagaaaacacgatattctatcctacctattggacggcggtactcatgttgtggtttgattaaagattagaaaacacgatattccgtttcaaaacattagtcatcgtaagttggtttacaaacaccaagttaatatttattataggtgtgtttgtgaatctccctctggtcgatttgattaaagattagaaaacacgatattccttcgaacaaaaaggaaagtcaggtaagtgttgtggtttgattaaagattagaaaacacgatattgctttgaatttggtttaaagggtatgcctggttgtggtttgattaaagattagaaaacacgatattattgaaagctgaactggatggtgaatttatgttgtggtttgattaaagattagaaaacacgatattactaaaaccttgtaccacattgctcataatgttgtggtttgattaaagattagaaaacacgatattcgagaaaagggatgcttacctgttgtggttgttgtggtttgattaaagattagaaaacacgatattgattgagctatgagtagttgcgatatattagttgtggtttgattaaagattagaaaacacgatattctgtttaaatcaaacggttcctgtttataagttgtggtttgattaaagattagaaaacacgatattagtcaagttggtgttaagtttgacattgaagttgtggtttgattaaagattagaaaacacgatattaaacacttggttataatggtggggttagagttgtggtttgattaaagattagaaaacacgatatttttgtttgtccaaacatttggcttaatgcagttgtggtttgattaaagattagaaaacacgatattcgactttcttctttcgctccatcttcttcgttgtggtttgattaaagattagaaaacacgatattaatgtaaagattatctaaaaaaacttatacgttgtggtttgattaaagattagaaaacacgatattaagtatgtgaattcaccgcaaacggctttggttgtggtttgattaaagattagaaaacacgatattttttgagccaatattaataacagaagaatggttgtggtttgattaaagattagaaaacacgatattgacgaccttgtttattatgttagcaaacatgttgtggtttgattaaagattagaaaacacgatattcacagccagcacattataaacaggacttttgttgtggtttgattaaagattagaaaacacgatattatggttataaacatgatgttgaagaggcggttgtggtttgattaaagattagaaaacacgatattattcatcgtttccacaatttgggcatgttagttgtggtttgattaaagattagaaaacacgatattaaaaataatttcacaatctcagggaatgggttgtggtttgattaaagattagaaaacacgatattgataaaggaggaattataataccaccacatgttgtggtttgattaaagattagaaaacacgatattcattagaaagtatgatagttaaggattatggttgtggtttgattaaagattagaaaacacgatattctaatattagtaatgatactaaaatggatcgttgtggtttgattaaagattagaaaacacgatatttggttcgagtgattggataaaaacaagtaagttgtggtttgattaaagattagaaaacacgatattattttgttttgaagttgttgtttagttcggttgtggtttgattaaagattagaaaacacgatattcccaatacctcacaaactaatactacgttagttgtggtttgattaaagattagaaaacacgatattaccaggtttgttattcaatagcgaaattgagttgtggtttgattaaagattagaaaacacgatattaactgtaatcacgaaccattacgccattatgttgtggtttgattaaagattagaaaacacgatattttctatccatgcgtcttttgttgcatccgtgttgtggtttgattaaagattagaaaacacgatatttaacgggcgtttcgaagttcaaaacgataagttgtggtttgattaaagattagaaaacacgatatttatgcagaggtgttcattagacaaaagtgggttgtggtttgattaaagattagaaaacacgatattaattgataagtttgcgagtagcaatcaaaggttgtggtttgattaaagattagaaaacacgatattagttgatgttttatcttctaattatcaaatggttaagttttgatatcgttaaaaaaaatgcttcttttttggggtgctatgccaaaattgaagcatttttttattcctaaaataattcaagttgagtgggttgaggtcccgaaggaatttctacttttccccagaaattttgtatattcccaaattgcttgtctgtaattcgtaatatacttacttttcctgaaggaggtaggagtttttgtacacgtttttcatgtacatcagcactttcgctactcgcgcaatgtcgtatatacaccgagtattgcatcatactgaatccatctttcaaaagttggttccgaaagccagaagcattttttcggtcttttttagtatcagtaggcaaatcaaaaaatacaaacaaccacatgattcgatacccgtttaaatccataattttgggtattttatctttttgcgctccccagcaaaacattgctgcaacgaactagccgttttttgtaaacctaccatcaaaggacttttctcatccttaaaataaaccgttcgggtgagtaattgcaggagttcggctttgatagccgtgtttagttcttgctcctcgtaagtttgtaccaattcatatactttttcgtctactataggtctaaaaggttccataatatcatcggctaaagcaaacgcattgtatttactcttatgatgaatacccagtgtgttgagtaaaccactccccgataatgcacgagcagtagctgcccttaatatagcataaccataatttaaaaaagggttaggataattcccgtatcgttcccttttaaaatccatctcaaaaaaatctttccaatactgaccagccgccactccctccatattactgctgtctccgcttaatacttttgaagctaaaaaaggaaagacgtttttattcccttttattttttctaataaaagcccttgatttgtaattttttcaataatagtttgttgccataactgtttttttaaaggaatactagcatctatttgaaatctgaaaatttcttgttgaatatggtggctctctaaatttaaaaacattccgtttggaagatgatttttattgcaaataattactgctgaattatgttctattaacaaattcatagcaggaatacttatgtatatttcgggattatcaaggataataaaacctatatcttctacaggtatagcgttttctctttcttctgtcttaatatgtaactgattgttttttgtaacaatagaacatttgttttctataagtacggttttttttagcatagttaatgtttgttatttataacaatttactaactaaaaaaaaataaaaaagatgaaatcgtttaacgactcttattaaacgataatatgtataaaagcgttttaagataatgaaaataggtaatataattctaatcttttttatatttgagccatgattttagttacaggagcaacaggattggtaggttcacacttaatcttgaaattaatcaattcaggagaaaaagtaaaagcgttatttcgtacagaaaaaaacaaagaaaaagtaaaaaaagtatttgaacattataaaaaagaagatcagtttgataaaataaattgggtcttaggagatatactagatgtaccctctttagaatttgcatttcaagatattgtacaggtttaccattgtgcagctttagtatccttcgaacccaaagaagaagaaaaattaagaagagtaaatattgaaggaacagctaatgtagttaatttgtctgttgattttggagttcaaaaattatgctatgtaagttctattgctgccttaggagatctaaaggaatacgaacataaaataacagaagaaacagagtggaatcctgagttacctcacagtgattacgctatctctaaatatggagcagaaatggaagtttggcgagcttaccaagaaggattgcctgtagtaattgttaatccaggagttgttttaggccccttgttctggagagaaggaagcggtgatatttataataaagtagcttctcaaattcctttttatacaaaaggaggaaccggctttgtatcagtagatgatttagtttgtatcatgaaaaaactaatgaaaagccccatcgtcgggcaacgttttattgtagtatcacaaaccatatcataccaagaagtaacaaatcttatagcaaaaaaattaaatgttaagaaaccaaccattttaatacggtcttatgcactaagattggcatatacttttgattggtttttaggattatttggtaaaaccagagttttatccaaagatatgattcgtactttacaaacgatggataattatgatcattctaaaataaaagaaacccttaaatttgaatttaaaacaatacaagattacttaaaccaagattgtgtattgtaaagttcagtatagataaaagaattttaaatctaaaaagaaatttgtcttctgtgctctcaatctaaagagataaaattttgcttacaaaaaaaatcaggttcttgtcatcccgacattaggagagatcacaaacataacctttttaaattctcatgatgctattcctcttttatcaagtggttttggttttgattatgtgatacctccttacgtagtgacaaacaagagactaaaaatagaaccaaaaagagtcttcgttgaatcaaaaagggtattattttaatctaaaagagttttcgttgaacctaataccatttaaactttgaaatttcctcataatactgattatgagactcctccttgtgttggagtgataaaaagcatgttgatttaggtattattttacaaaaacaataaaaatcatcattggttctcgatgtgcttcacgctcgaactaacgatgatttcaattatatacttaaccgtccgtttgagttgtttttaaaatgaaaaaaacatatcaagaactttattttctaatccagtatattttaagtttaaatggtattattcgtgatatttttgaaataataaaattatttaggcacattcagaagtaacctcacttttgtaaaaaaataaaacaatgacccattttgatttacaaatttgggtcatttttgttttttaaaggattcaaatgtttaaaaataggtttttgggtcgcaacacgacgcacgttcccctatgatgctggtcttacattttttttatgctactaaagtttgctgttgtagataaatccgtctccctatttctaatgcattggctgtgtgaatgccaaagaaaatccaaaggatctcacttttttgggttttggctttgattttcttgagatggtaatgttccttctccttgccaaaacttccttctagtcgagtagctcgttctttcttgatgtgttgcgctaaaattttgcgttgttcttcattttttccagcttttcctttacgtacaaaatcggtttggatagtattggtagacgtgaaggttcgatttttattggtagcataaatggcatcggctccaagtatttttacttttgttttagttaaattctgagcgcaaaaaacactgctttgcagacgagttccttcgttgaaagctcgatattgaatgtgttcgatgaagttaatgccatcgatttgaattttgtttactttggctccaaattcaacttgctttacttctttcccgcgaacaattgggcggatataacttttgctaatacttacaatcctgtctggaacacttttaccagttttaaatatctgaatttgttgtttgtatacttgtttgataatcaggcgctgtttgctatattttgtagtggcttcaaacggattttgtgcttcaatacggctaagttcgccattgagtttgtataataatttaagtaaacctcgggtaacttttgtgcgatgttttgattgtttttttctcttttttgaatattgattgtatcgcttacaccaatctaaatatttagttcttggtagttttattttaaacaaatgacacaaagcttccatttgcttataattccactgtacacactcccaaagcaatttctggttcgtaggaaagcgcacttcactctcgtaacaagtagcatccgtaagcattttatctaaatctcccatataaggaatccagttcttagctagtacttcttgagctttgccaatggttaaagtcttggatagctccattctgatttgactcacgattttaaagtttttcaaaggtttatcaatcggaatcagaatatcacaaaaaaattgcataaagatatttccattgagaagttcaatcaactttttatccgaacaaccgtagtagtttttaagcatcatcagagcaattttgcctttaggactaaaataacaatgagtccctttttgagaatctttcagtttgaaggcttgagcaagctctgaaaaaggcatcgaaagataaattttacccaaatctgtttttaaaaattgggcgtaaaaaccatcaaaatctttattgatagtaaaaaatggaatttggtattgaaattcgcttaaacgtattatttttggcatagcatttaaagaaaaaccccgtttttgactctttttgagcaatttcggggtttgtttcttctaaaataacacttattttgttgatatgcaagtgtttgggtaattatgaatgtgcctatttattgaaattttcattataaaaagacctgataaacttcaatcattttatctataattattctgctttttttagtttttcttttttcaattcagcttgtcgtagtttttcagttttgattttttcagttttgattttttcgataacacgatcatatatttttttatagtttgcaatatcataagagtagtatttattactatttacaagttgtaaactgtctatatgatattttttataaacgtattttttgggatcaatctgattcgttggaagtaatttggcatcatgccccttaattgcttgaatcaatgccaaatcatataatattttttccatagttgcttcatctatcagattatcaggtttttcaggagtgttgaatttctgacaagacagagaaaataaaattaaaaaaaagcaagctattttgttcatattataagagtcttttatttaccggttaaattctagtcgcattccttcttgaagatctttgacttggttgttttcatatactaaattaccatttacaaaagtatgtgtaatttttgatttaaaagtataattttcaaaaggtgaccaaccgcattggtacagaatgttgtctttagaaaccgtccaaggagaatttgtattaataatggctaaatcagcataatacccttttttaataaaaccacgacgatctatctgaaataatttagctggattatgagccattttttcaacaattcgttcaatagaaattttaccttgatgaaaagcttcaaataatgctactacagcatgttgtacaagaggaccgccagaaggagcacttgtgtaaggtttttgtttttcttcctgtgtatgaggtgcgtgatctgtggcaattacatcaattcggttatctaataaagcttcccacaaagcgtttttgtctgtttctgtttttacggcaggattccatttaattagggtgcctttatccgcataatctttatcagtaaaccataagtgatgtacgcaaacttcggcggttatttttttgttttctaacggaattgaattgtctagtaaactcatttctttggccgtagaaagatgaaaaatatgcaaacgagcaccagtttttttagccaattctatagctttagatgaagaaatataacaagcttcttcacttcttattaaatgatgacaatctataggaatattatcaccgtatttttctttataatcagctaaattattctgaatagttgtttcgtcttcacaatgcacacaaataatcatattcgtatggctaaagattttttcgagtacttcttcacgatctactaacatattaccagtggaagagcctaagaaaattttaatagctgctacattacgtggattggttttgagaacttcttctaaattatcattagtagctcccatcataaaggagtagttggcataagaagttttagaggctatttcgtatttttgttctaacaattcctgtgttaccgcgttaggtacggtattaggttgttccataaaactagttatgcctcctgctatagcggctctagattcagatgctatagtacctttgtgggttagaccaggctcacgaaaatgtacttgatcatctatagccccaggaattaaatagttattttgagcatcaatgatctcaaaatcttttaagggcgtaatgtgttcagcgatgtctatgataaacttgttttcaattaaaacatctcctttaaaaatatgaccttcgtttactatctgagcgtttttaattaaaatagttttcataatgtgttgtgtttttataataaattaaacatcttgcgaactcgcaacataattacgccaaaaatagcttctcgtatgatagcgccactcatcttagattcgccttttgtacgatctgtaaagataataggtacttcaataattttaaaatgattagcaaaagttctgtatttcatttctatctgaaaagcatatcccgtaaactttaattggtttagatttattttttctaatacttgacgttgatagcatataaaaccagcagtggcatcctgaatttgcatgcccgtaatcaatcgaacgtagacagaagcaaaataagatagtaaaacacgatttaaaggccaattaactacgtttacgcccgtaatataacgagagccaatagacatccccgcattttgtgttttgcaagcctcgtaaagctttgtaagatcattaggattatgcgaaaaatcagcgtccatttcaaaaatataatcataatgatgttgtatagcccacttaaaaccatgcacataagctgttcctaatcccgcttttccttgtcttttttcaagatgtaatgcttttgggtattctttttgtaattcaattacccgatctgcagtgccatcaggagagttatcatcgacaattaaaacatcaaattttttaggtagagcaaaaacagctctaataatagcatcaatattttctatttcgttgtaagtaggtatgataacgatagagtcctgcataaatttactgaattgtgctgcaaaaataatctttttaaattatgagactcctaaattatctataattcgatgaagggaatgaaaaatttgtaattttgtactatgaataactatgagttaattcctcgaattgtagagaataaaaattggattactatagtttttattgtagctataggagtggtaacgattactaaggccgtttttgaaaaacgctttactgattttgttagattat

SEQ ID NO: 3104 - DNA, 24449 bp, synthetic construct
  source 1..24449: mol_type = other DNA
  misc_feature 1..24449: note = Synthetic
ttttgagtaatcttaatttctggggttggcaattaatcattgtagcagcagccatatcattgccattaggctatacttcttctaaagaatatgctgaattagaatggccaatagatatagcaattgcattgatttgggttgtttttggtatcaatatgattggaacgattataaaacgtagagagcgacatttgtatgttgccatctggttttacttagcaacattcgtaacggttgcggttttacatattttcaacagtttatcattgcctgtttctggaatgaaaagttattctgtttacgcaggagttcaagatgctttagtacagtggtggtacggtcataatgcggttgcgtttttcttgactacaccgtttttaggattgatgtattattttataccaaaggcagcgaatcgccctgtgtattcttacagactgtcaattgttcacttttggtcgttaatttttatttatatctgggctggaccacaccatttattatattcagcgttacctaattgggctcaaaatttaggagttgcattctcaattatgttgattgctccatcttggggtggaatgataaacggacttttgacactgagaggtgtttgggataaagtgcgtgtagagccagttttaaaattcttcgttgtagcaattacaggttatggaatggcgacttttgaaggacctatgttatcgcttaaaaatgtaaatgctattgcgcattatacggattggattattgcacacgtacacgtaggagcattagcttggaatggatttatggcatttggtatgatttattggttggttcctagaatgacaaaaagcaatttgtattctcttaaattggctaattttcacttttggattggtactttaggtattatattatatacaatcccaatgtatgttgctggttttttacaagcttctatgtggaaacaattcaatccagacgggactttaacatacggtaactttctagaaacagtaactcaaatcatgccaatgtattggatgagagctattggtggaaccctttatttaattggaatgtttaccctggtgtataacattattcaaacggttagatttggttctaaaattgaagatgaattagccgaagcacctgaattaatgaaaattagtgcaggaagagtaaaaggagagaaatttcacccttggttagaaagaaaacctattcagttaactattttggcgactatcgctattcttattggtggtgttattcaaattgtacctacaattatggtgaagtctaatattccaacaatagcaagtgtaaaaccttattctccactagaattagaagggcgtgatttatacattcgtgagggttgtgtaggatgtcactcgcagtcagttcgtcctttccgaagtgaagtagaacgttatggaccacaatctaaagcaggcgaatttgtatacgatcatccattcttatggggatcaaaacgtacaggtccggatttgttgagagttggagcaaaatacaatgacaattggcattttaaccacttttggaatccacaaagtatatctgcaggatctattatgccaggttataaatggctgtttgataataaacctatggatgtttctttgactcaaaagaaaatgcaggttatggcgacattaggggttccttattcacaagctcaaattgcaagtggtttagatgatctaagaaaacaagctattgcaattgaagagagcttgaaaaatgatcctgactttgtcaaaagttatgatgaaagcaagaaaaaagcggctgcaagaggagagaaatttgttccaatgaacgaaagggaaatcgttgccatgattgcttacatgcaaagacttggtactgatattaaagtaaaagaataaaaataaaagtcatgttcgaacaaattaaacataatatggaaacgattgaaggtgtggccatatatcccatcttatcattattgatttttttcgtcttttttgttgggctaggcctttgggtgttatcctacaaaaaagaaacgataaatgaattgagtcaaattccattgagagacaatcaaatagtataattttttaaaattcagaaaatgaaaaaattaattccagtatacgtgagagtacctgttattttctttgctgtaatgatggcaatggaatatatgattgactcaggagatcgtcctgcttttataaaatttccgatggtttccgtattcttacttgtgttcctttttcttttgattgcaatagaaattacgatgaaagcagttgataatataatgtatcagttattgactgaggaacaaaaaagccagttaaatgaagcaaataatttgagtttcaaggataggcaatggtataaaaacctaatggcaaaattgactaaaaccgagtcaatagacaatgaaggtcaattattattagatcatgattatgacggtatcaaagaattagataataatttaccgccttggtgggtatatttattctatgcttgtatcatttttggtgttgtttatatggtgcgttatgaagttttaggtgctgataatcaagagatggaacttaaaaaagaagttgctcaggccaaaattgatattgcagaatacatgaaaactgcaccggatatgatggatgaaaaaacagtgactttattgacagatcctgctgatttagctgctggtaaagaaatttacactactaattgtgctgcctgtcacagagcagatgcaggaggacaaattggaccaaaccttacagatgatcaatggatattgggtggtgggataaaaaatgtatttcatactttagtaaacggagggcgtgatggtaaaggaatgatttcttggaaaggtacattaaaacctaaagaaatgcagaaagtagccagttacattctatccttaaaaggaagtaatccaccagatgcaaaagctccggaaggggaagtttgggtagaagaagatgttactgttgcggttaaataacaattagaaacacacgtttttatttaacttaagaattttaataattattttaaacttgtgttttaaataaaaagaaatgtcaaaattaccagacgaagcttttagagataccatcggtacaattgatgaagaaggaaacagaaaatttatttttcctaaaaagccttcggggaagttttatgattacaggaaatgggtgagttattttttactgattgtacttgttgcgaatccttttataaagataaatggcaatcagttcatgatgttcaacatactggagcgccgttttaatatattaggatttccattttggccgcaggatatctatctttttgttctggttattattgtaggagttgtttttgtgatactttttacagtgatatttgggcgaatattttgtggttggatttgcccacaaaccatctttttagaaatggttttccgcaggattgaatattggatagaaggtgatcgtggtgctcaaattcgtttagaaaagcaagaatggaacgctgaaaaaatcagaaagaaagctataaaatggacgatattcctaattatttctttttttattgccaatgtatttctagcatatctaatcagtagtgacaagttgttgttaatgattgaagagggacctgcaaatcatctaagtactttagtgtccttattaatttttactggggttttctattttatttttgcatggttcagagaacaggtttgtattattgcttgtccttacggaagattgcaaggtgttttattagatgataaatcgataaatgtagcctatgattttgtacgtggtgaaaaagaagttggtagagctaaatttaataaacaggaagatagagttgcatcgggtaaaggtgattgcattgattgcaaacaatgtgtaaatgtttgcccaacaggaattgacatacgtaacggtactcaaatggaatgtgtcaattgtacagcctgtatagatgaatgtgataccattatggatggtattggattgccaaaaggtttgattcgttatgcctctgaagatgaaattgagaaaaacatcaagttcaaatttaccccaagaatgaaagggtattccgctgtgttattcatcttgacaggtattttgattggattattattcttgcgttcggatgttgaagctattattttgagacttccaggtcagttatttgaacacaaaggcgaaaacattagtaatatttatacttttaaaatcataaacaaaaccaacaaggattttaatgatattcattttaaattagtagatatcaaaggagttttaaaaattgtagggaaacaagatattaaaataccaaaacaaggcatggatggtggttcactttttatagaaattaaccaaaatttactagatagtgataaaacaaaactgaaaattgaggtttttaatgggagtgaaaaaattgaaacaacaactacaaactttttgagtccgcgtagttttgattaatagggtgcaatagagattcatcaaaaaatataacattatgaaatttagctggggaacaggaattgtaatcgcttttggtttgtttataacctttattttgtattttgtttttaaagtacaatccgattcaaaatatgataatgagttagtggttgaagaatattacaagcatgatgctcattttggagatgaaatggctcgaattcaaaatgcagcagatttgaatcaaaaacctacaattaataatgtttcgaacggaattgaaatagtatttccaaaaatctttgttccaaaaaacattaaaggtaaagtgtccctttatagaccgtctaacaaaaaattagattttgaaattccaatttcattatctgatgctactactttgctcatacctaaaaaaagtttggcaggcggtcgatgggacattaatatggaatggcaatatgatggaaaatcatatttgtctaaagaaacaatatatatcaactagtcttaattttaaaagcttaaagacaatttattggatttaaaacttttatttttatgacattagacaaaaaaaatgctttatactgcctttatttttggtttaataagtagttttcactgcataggtatgtgtggtcctattgccatgatgttacccgtagacagaaccaatcagtctaaaaaagttattcaaatcatcacgtatcatttaggaagattaacggcttacgccactataggtttcgtttttggactgcttggaaaaggttttttcatggctggcttacaacagaaattatcgatattcattggtgtagctatgattattgtagtgctgattcctgatactctttttgcaaaatataatttttcgaaacctgtttttaaattaatttcaaaaataaaaacagcgttaggaagtcagttcagaaacaaaagttacaaatccctttttacaataggtttactaaatggctttttgccatgcggaatggtttatgttgccttatttggtgctattgccatgcaaagtgaaagtcttggtgttttatatatgattttattcggattaggaactgttcctttgatgagcagcgtggtatatatcaattcattcttaacagtaccaattcgaaaccgcatccagaaagctattccttatgtagcggtatgtattggttgcttatttattttaagaggtttgggattgggaattccttatatttctccatctgatatgagtttatttattcaagctgatcccaattgtcattaagttttagttgtatactaatagaaaagcacgccatttagcgtgcttttttatatcttcaaaaatttctaaaacattaaattgtcatcgaaaacagtgctgtttctggagcttttcttttcaatcgtaagtcaaatgccatacaaatattacgcacatacggtttcccattttctgtaacggcaatgccattgtcttttatgattagcaatccatcattttccatttctttcaattgaagaattatatctggaatttcattgaaataatcttctttttttacccaagatgtttcaaattgacacattaaattcagaatgtgttttctgataataaggtcttcatcagtcaataaatgccctttgaaaatcggtaatttattccattctaatatttgataataatcttctaaattttttacattctgtgcaaaactgtaccaactgtcactgatggaagaaacccccaaaccaatcattaattgtgttttagaggaactatagcccataaaattacgatgcaatgtcccgttctgaaaagacttgtataaactgtctgattctaaagcaaaatggtccattcctatttcattatatccgttttcatacaataattttttaccggtctcgtacaatattctctttttatcatcttttggaatgtcttcgtcattaaaacctcgttgtccattgcctttaatccacggaacgtgtgcataactataaaatgccaatcggtcgggctgtaatgattttgttttttcaatcgtatcaatgatatcttctacttcctgaaagggtaatccaaaaatgatatcatgtcctatagaagtatatccaatttctctagcccaaaaggtaacttttgccacattatgaaaaggttgaaaacggtgaattgctttttgtactttctctgaatagtcttgaacaccaaaacttactcttctaaaacctaaatcataaagtttttgcaaatgttcatgcgatgtgttattgggatgaccttcaaaactgaactcatgatctttggcttttttggcatgaacaaaaattccattgattaaatcctctaaatttttagtggaaaaaaatgtaggagttccaccgcccaaatgaatttctttgattgttggtttttcccccagaattttacaataaattgcccattctttcaaaactgcttcaatgtatgggttttcagcgctatgatttttggtaatacgcttgttgcagccacaaaaagtacacaagctttcgcaaaacggcaaatggatatacaaactgattccttctgtagcattgctttcttgaaatgatttttttaacgtttcaacccaaatttcttctgaaaaatcagtttcatcccaataaggaaccgtagggtaactcgtatatcttgggccgggtacattgtatttttgaatcaaagaatttttcatggcaaaatcatttatcgttgttcaaaagtagaacgactactcaattattaaaatgataattatcatatcaatgtaataattcgttattataaaatagtccaattgtgatttcgtacgcagtcaataaccataatgacatctcgactgcgctcgatataaatgtcattaagctaaaagtttatttgttattctgacgaaggaggaatctctgttttttgctcacgtttgttaggattcctccttcgtcggaaagacaaaatcatgaggatttttccttaacgtaatgacattgcgctcgatataacaaaaaaatatagagactgcaatgtgtatgtcaatagtgacttatgcaaaaaaaaaactcgaactgtttaagttcgaggtttctgcattaacgttaactaagatttattcttggttaagatttctcaattgttttagtttttctttccaaacatcaagactttctttatgaatagcgatgtttttacgaacttctaatacaatagaattttctttttttgcattttttgtattagtaaagaattgaatgttattttctaattggaaaatttcattctgaacttcttcaatcttacgcattagaaaaatcttttcgttttccagttttcgggtatcgttactttcagacaaatgatccattctgtttgcaaaacgcatcatatctgtatctttcttgctcaaactcaatttttcaaaaagcgcatctaggattttattaaatttcccttcaatatgccttcttgggaaaggtacttttccaaagtttttccaagtttctatatgcaatttgatagcatctaaatctgttttgtgatctccggtcaactgaaattctctcagcgtttccagataggcttttttattatcaaaagcggctacttcttcgccattttcttcatttttttgctcttttaacttgtcaaaataatgattgcaggcatctttaaattctttccagattttatcagagtattttcttggtacatgtcctatctgtttccactcatcctgaatttttttcatgataggtgtagtcacattaaaatcaacactttcttgcaattctttagctttagcaacaagagctattttcttgcttaaattgtcgttttgatcttttttaatgtctttataaaatgaatttttgaaagtattaaaatttctgacagccgttttaaaactagcccaagtttcttcattcacatcagatggaacctttccagcagagaagaaagcagtacgcaaggcttccactttttctatctgagccagccattgtgagtgtgcatttactttttcagtagctaaaacttcaattttggcaataatttcttttttcttttctaaattctcaagctcagttcctctttggttttcaaataaaacttcacgtttatcatgcatctgtttggtcaagtcgctaaacttattccaaatcacgtcacgatgttctctagaaacaggtcctatatcttctttccaaattctatgtaagtcttgtaattctcggaatgctttattgatatccgcctcgtttactaattcttcaacacgagcaacaattttttgtttttgctctaaattatgtttaaaatctaagtctctcgcttctcgatctaagtgtaaataatcataaaaattttccacatgaaaatgaaagttgttccacacgtggttgtatttatccttaggaataggtccagcatttttccatcgttctcttaaatcattaaaatgctttaaggtgtctttgatatttgcctgcggatttatcaactcctttaattcctcaacaatagctaaacggttctctaaattggtttttagattcgtttgtaaactcttgaagtgtgtatttttaatatctctaaactgagaataatatttatcaaaattagtcttaagtggagaatgatattgaaaatcttcatttggatcttgattttctgccagaaattcttcttttttctcctccagtagatgattgtatttagctaaaaatactttttttatttcttcaatatgctccttaaatgacatcactttgtcattagcaactaaacttttcagttcgtctactaatgcttcgagtgacaaactatcataatcctgcaatggaatttcatgacgctctttcagcgtttcatcttcgctttcttcggcgtttgtttctgcaatggcgtcaatggctgtttgattttctgtctctgaaaccgtttcttccatagaaggcgacactacattatcttccgcaggaaaatcagttggttctactaattctgatacttccgcagcagccgcagtagcatcaattgagttattttcaatatttccatctgcttcaagcaggttatcattcttttcttctaacattttttcaatgtgtaaggtttctaattagatttaacacgaaaggtactaaagcagtatcaaagtacaaaataaaaccccttatttattgtcattttatgttgcaaatgttttttttttggagcaatttcctgctgttcgctgtattcctaatttaaaaaaactacggctaaaaaagccttgttttcctaaatcgggagatgccgctgccatcagggttagggttttgtggatgaaagtgtaagttgtattcaaaaaaaaagtcccaccgaagcaggactaaagattttcatctacggcatatagccttattgtgataagattaaagattagaaattttaatcagtaacaaacataaataaaaaatagttaagttgcaatgcggaaaaccgtaaaatgaacaattattttaattgtactttgcaatattcttacaaaacacatagtagtatggcaaaaatattaggattagatttaggaacaaactcaattgggtgggcgatagttgataaagatgggaatgaattttctctagtagataaaggtgttaggatattttcggaaggcgtaaaatcagaaaaaggtattgaaagttctcgtgcagcagaaagaaccgctttcagaagtgctagaaaattaaaataccgtagaaagttgagaaagtatgaaactttaaaagtgctttctaaaaacaatatgtgtccattatctattgaagaagttgaagaatggagaaagtcaggatttaaaaaatatcctatgaatcctgaattcttgaaatggttgcgaactgatgaaaatgaaaatataaatccttatgtgtttagagataaggcaagcaaacaaaaagtttctttgtttgaattaggtagagcattatatcatattgctcaaagaagaggttttttaagtaatcgattggatcaatctgcagaaggaattttggaagaacattgtccaaaaatccaagcaagtattgaagatttgagttctaaagaagaaattatttcagaattaaaagaatattttttagaaactggaatttttgatgccaatgaaaaaactggttttgcaaaagatttagatgagggcgacaaaaaattagtttcattgtataaatcaatgttggcaataattaagaataatgagaataattttgaaaaaggtaaagaagaaattattgcaagattaaataaaaaagatgctttaggagcagttaaaggtaaaatcaaagacatttcccaagcaatgattgacggaaatttcgaaacactaggtcaatatttctttagtttatacaataaaagcaagattagaaatcaatatacttcgagagaagaacattatcttgaagagtttaatataatttgtcagatacaaggaataggagaaatcatagtcgatgaattgttacctgaaaaaaaatataatggattagctaaagatttatataaagcaatattttttcagcgaccattaaaatcacagaaaggattgataggtaaatgttcgtttgaaaaaagcaaaactcgttgcgccatttctcatccagattttgaggaatatagaatgtggacttatttaaacacaataaagattggaactcaatcggataaaactttgcgatttttatcacaagatgaaaagcaaagtttgatttctaaatttttaagaaaaaaagacaattttaattttgaagatttagccaaagaattgattccaaaaggagctacattcaatttctataaatcttccaaagctaacgaggttaattatttgtttaattacaaaccttatgatactgtaacggcaagcccagtttcggcatctttaaaaaacatttttggagaagattggaaaactaaaaccatttcatataaaaccaaaaactcaaaaggaattgaagtaaatcgaactgtagattataaggatttatggcatttactttccgtttcaacatcagatatttatttgtttcaatatgccaaagagaagttaggattggatgataaaaatgccaaatcatttagtaaaattcgattgaaaaaagattttgcaagtttgagtttgaatgctatcaccaagattttgccttatgttagagaaggattgctgtattctcacgccgtttttatggcaaatattgaaagtattgttgatgaatctatatggaacgacagcaatcaaagaaaatttattcaagataaaattgctgaaataattgaaaatcacacttttgaaaatggaaaattagaagtaattaatagtttgattaaagagtgtaaagcggtaggtgctttttattctaaagaagccgaaaatatctacaaatcagatttggataaaaaattaattcctttcgttaaattccataaaatagaatcagacaaagaatcaattttaagcgagctatttcctgttttaattgagcaattgaaaaaatatgaatatataaaaatcaatcgtttagatgaaaaagttttagacttcataaaaggtaaaaatgatgatggcgaaatattctgtacaaaagaaaagcgaattaataaactgtatcatccatctgacatagaggtttttaaaaagaaaatcattaaagacgaattcagaaatgaaaaagtggttttaggaagtccgttaacgtcatcaattaaaaatccaatggcaatgcgtgctttgtatcaattgcgaaaagtgttgaatacattgatttttgaaggactagttgacgaaaaaactattattcatattgaaatggctcgtgaactgaacgatgccaataagcgaaaagggattcaagattatcaaaatgaaaataaaaagaatagagaagaatatgccaaagatataaggaagttatattttgacgaatgcaaaaaagagattgaaccaacagaagatgatttattacggtatcaactttggctagagcagaataggcaagaaatttatgaagatggaagaaatataagtatatgtgacatcattggaactgacccaaaatatgatttcgaacacacaattccaagaagtcgttcacaagacaattctcaaatgaacaagacgctttgcagtcaaaagttcaatagagaaatcaaagggaataaaatgccttttgagttaagtaattatctcgaaattttaccaagaattgcacattggaaagaagaatcagataatttgactagagaaatcgagattatttctcgctccataaaagcagcagctacaaaagagcttaaagacaagaaaataagacgaagacattacttgactttaaaaagagactatctaaaagggaaatacgaccgatttatttgggaagagccaaaagttggtttcaaaaacagtcaaattccagatacagggattatcacaaagtattcgcaagcctatttgaaatcttatttcaaaagagtagaatccgtaaaaggaggaatggttgccgagttcagaaaaatttggggaattcaagagagttttcaagaaaacgataaaaaatattttcacgaaaaagaccgaagcaaacacacacatcacaccatcgatgcgattacaattgcttgtatgaccaaagagaaatatgatgcattagccaatgcttggacacacgaagacaaaggacaacttggcgaagcacgaaaattattagccgattctaaaccttggaagacttttaaagaagatttaaaaaagatagaagaagaaattttagtatcacattatacacccgataatgtaaaaaaacagtctaaaaaaattgttagaattagagggaagaaacaatttagagatgaaaatttattagataaaagaggaaatacaattccaatttttggaaaaagattaaatgaagaagaggttttatcaaaagttgaaggaaaagattattttaaaattcaaaagaatagcgaaaccttatattatgagtatctatttgataaatctggaaatataatttacaagaaaatcccaatctttaaacaaggtgataccatccgcggttcattacaccaagacagtatttatggagcaattaaaaatccattaaatacagaggaaatccgttatgtaatccgtaaagatttagaaagtatcaaagcatccgatatcgagaatattgttgatgaaatggttaaagaaaaagtgaaggatgctatcggaaataaagttttattaatttcatcaaatgcgcaacaaaaaaacaaattagacggaacggtttggatgaatgaagaaaaaggaattccaataaacaaagttagattgtatgcgaattcagtaaagaatcctttagaaattaaagagcatagttcattatcaaaatctcgacacgaacataagcaaaaaatatatgctcaaaatgatgagaattttgcaattgctatctatgaagattttgataaaaaaggaaaaataaaaaggtcgtttgaaatgattaataatatcgatgctggttcatactataagttaagtaatggagaaaataaaatgaactatgacattgtaactaatcctcacgataaaacaggattaccattaaagtatattctaaaaaaaggattgatggttttgttttttaaagaaaaccaacaagagattttagaattgcctattaatgatttacataatcgattatacaaattagctaaatttgatgcccaagggaggttaacttttagaactcattttgaagctaggcaagctagtgatttaaaagaaatttataatgtagattttgaaaacccatttgaacaaattagattgcaagtaagtaaattaaatatgttagtcgaaggatatgagttcgtattgtcttcctctggcaaaataacttttatttaaaaagattaaaagttctttgacatgtttcattgtcttaaacagccaaaccacaactgaaaggtatggcatccgcccagcagggatgcagtagctttcagttgtggtttgattaaagattagaaaacacgatattccacatttgcaagcgcattagagacgtttagttgtggtttgattaaagattagaaaacacgatattttcaataactaataaatatttataaaaatggttgtggtttgattaaagattagaaaacacgatatttgtttttagaaaaacaacttttgaagaatggttgtggtttgattaaagattagaaaacacgatatttttggtttatgcttggatttctttcagccggttgtggtttgattaaagattagaaaacacgatattattatagtttttgaatcgtccacaacctcggttgtggtttgattaaagattagaaaacacgatatttagcttatctaattccagtttattactttcgttgtggtttgattaaagattagaaaacacgatatttgcaccaataacagggttaatgcttgctgtgttgtggtttgattaaagattagaaaacacgatatttatggaattatacaccgaagttactacgagttgtggtttgattaaagattagaaaacacgatattagttggtttgttaccttctaattttcagctgattatgagtaaatatcgtataaaaaaatgcctcttttttggattgataacccaagattggagcatttttttatttgtaggtacaggtcgcgacccgtacctacaaataataatgtatttttaaaataaattttgttatttgcaacacgtagggacaggtcgcgacctgtctgtactaccgtgtgtcaaggcgtaatggctgaaaatagcaaatcaatatgaaaaatagaaaagcaaatagattgaaaggatatgattattcgaaaaataatttatattttgtaacatcatgcgtgaaaaatatggaatgttgttttggtgatgtggtttcggtagggacaggtcgcgacctgtctttacgtattcccgataaaaatatttctgataaaaacaatccatataaaaatatttctgataaaaacaatccagataaaaataatcttgataaaaatattcccgataaaaatgatctcgatgaaattgaagcagaaatgattttaaatgaatatgggattatagcgaataatcaattggaatggttagaaaaacaatatccttacattagtcttcattcttatattgtaatgccaaatcatattcatgcagtgattgaaattgattctaatttaataaaggcagctactaatcaatgtttgccaaaagagattgttaaaataaaatcgctttctcaaattatgggagcatataaaacgactagttctaaattaattcatgaagctggtaatgatgagtttgcatggcatcgttctttttacgaccatattattagagatgaaaaatcgtattttaacattgtaagctatatagaaaaaaatcccaatacttggcataaagataaatttcacactagttagaattaaaacaactccaactgcgttggtgcagcatcagcatcttgttttgccttacctaaataattgatgatcatgccaaattgtttatcggtaatccgtaaaacactcactttacctaatggtggaacaagtctgttaatgcgtttttcatgtacatcggcactttctccactcgcgcaatgcctaatataaacggaatattgcatcatgctaaaaccgtcttttaagagattacctctaaactgagaagcatttcttctgtctttttttgtttctgtaggtaaatcaaaaaatacaaatagccacattattcggtatccgttaagttccataatttcggatatttaattttttttcgttctcctgtgaaacattgttggagtgagctggccgttttttgtaatcctaccattaacggacttttttcttctttgaaataaacagtttgtgtcaagatttgtagtagttcagcctttatagcggtgtttagttcttgttctttaaactttaacataatctcaaaaactttttcgtcaacaataggacgaaaaggctccataatatcatccgcaagtgcaaaagcattgtatttacttttgtgatgaattcctaaagtatttaataatccgcttccagaaagtgctcgggccgtagctgctcttaaaatagcatatccatagttcaaaaaattgtttggataatcgccatagcgttctctttttataccatctttttcatgatttggcaaagggaaatatttccagtattgttgtgctgcaacaccttccatattagatgtatcaccgcttaatactttactcgccagaaattcaaacgtatttttatttccagttattttagctaacaattctccttgatttcttatcttttcaacaatggtttgctgccataaatttttttttaatggaatagaggcttcgatttgatttttgaaaatttcttgctgaatatgatgactgttgaggttcaaaaacattccatttggtagatgattgctgccgcaaataataattgcggtattgttttctacaattaaattcatggcaggaatacttaggtaaatttcagcatgatcgagcacaagaaaacctatgtcttctattggtatagtactttctctaacttctgattttaggactaattgctgattttttgtcgtgattgaggatttgttttcgacgaggattgttcttttaatcataatttaaagtgttaaattaaactcaagaatttgattgtcagtcaaattaacacaataaataaccaactgttttacgggaaacctcaatttgtcttttaaattactgacataaaaaaaacgtcttgttttaaaacagcatgacccaaaacgagtaatgctaattttaaaacaagacgattaaaatattcttgaattattttctacttatttattccaaatcttccatgctttctctgcttgaaaaataagcatatccaatccatttttgatttgcgcgccttgttgtttggcttttttgaggaattgtgtttcagcaggattataaatcaaatcataagcgatatgcttctctgtgaaaaactcatatggaatcaacggaaaggcatccacattagggcttgtgcctacaggggttgcgttgattatgatttggtaattatcaaatgtagttgcgttgatacggttgtaatcaattccattttctttagcttctctcgaaacaaaagtataggttatatccagttcatctaatgcaaatgcaactcctttagaagcaccacctgtgcctaaaatcaatgcttttttatggtggggttgcagcaatggttctaatgattttttgaaaccatagtaatcggtattataacctttgagtttaccttttttagtgattttgatcgtatttacagcgccaattaacgccgctttttttgacaatttatctaaaaacggaataactgcttctttgtacggaatggtaacattcaaaccttttaaatctgaagtgtctttaattacttccgtaaaagcggttatttctggaatgtcaaaattttcataggtgcaacctacaaagttttcactattgaatttctctgtaaaatatcctttagaaaacgaataactaatgttacgtcctaataatccaaagcgttttctaactgtgtcaatcattattgttttttatattttgcaatgtaattttgaaccattttttttgtccaaactactggaaataaatcttcgagtattatataattatcaaaattcaaacgcaaagcattgcttaaatggaattttgcttttgtagtatcggaaagcataaaatacaatcctgccaatcggtattcgatttcattttcctctggataatactctgaggcttgtaataatgtttgaatagcactttcaaattcgcctaaaaattgcaaaatatcaacccaaaacaaccaagtttctaatcctgtttcaccaaattctactgcttttctgtaaccaaactcagcttcttcaaagaagttcatttgcttattaatactggcaaaacgtttccaatacagtcggttttgattgtctattgctaatgctttattgacaaaaaatagtgctttttgataatttttttgacgtacataaaaatcagtaatggcaatccaacctttatctaatagtggatcttcatgtacggtttgattgaaatattttaatgctaaagctttgtttcctaatctttcataacattttcccattcttagcagtgcatacgaagtgacatcatccagttcgatggttctgctatagctttcaatcgcttcggcgtatttttttaatcgttcgtaggcttttgctttttccataaaagcacctaggaattcatcatctattaaagtggcataatcaaaagcgcgaattgcactttcatattcttttacaccgtaatgcaaacgtcccagttgatgccatgcaatttcgctgtagggatttttgtcgatgtatttttttaaataactgatcgcatcttggttttgatctaagaattcaaagcaataaacaacgttgtacaatgcggattggtcttctaaatcttcttctaaacacttgataaagctttcttttgccatttcaaaattgtccataaagagatattccatacctattaaattatagacatctggataatcatcagtatattttaatgctatttttaataattcaactgccttttcgtgttggtctcttttggagcaaatattagctttttgaatgtatatttcttcattggttggttcaatggcaaacaactcattcaataacttttcagccagttcgagtttgtcatcatacactaacatttctacttgaactagttttagtccggtagattttggatgttgttccaatgctagttttagtgctttttttgccaatgctgccttacccatgtccagataatgaagaataatttcttcaaattcttcagagtcaaaaaagagtactttgttggttttcaacatggactcaaatttagacaaggataagttatagtcttcttcttcgttgcttaattgcatactgtatgtttttaatttggcctaaataaaattaggtaatcgtgggtatgctaagagggaatgttagaattgttgtgaacaatttaattaacaaaaaagctttagtaaaaacggatttcttagctctgaatactttactatatttttattttaatagtagttcatagaactttatttttaatgaatagcaggaatagtttctaatcactacttttctgactattaatttttgttcatcatttcattcattacttccagtatgatgctacaaccttctcgtatttcttcttcagaaatagttaatggaggtgttattcttatagcacaaccttcaaaaagtagccaaaataaaatgagtcctctgtcttgacatttgagaatcacctcattagtaatgtcggcattttttgtcattgcggcaagcatcaatccttttcctcttatttcttctatcaaaggatgtaccaaaagggaacgaaataaattttctttctctacagcttcggccatgagattggtctcagttatttccttcaaagtcgccaaacaggctgacgcaatgacaggatgtccaccaaaagtggtaatgtgacctagttttggatcatgacttagcagtttcatcatagcagatgaagctgtaaaagcgcctacaggcattccgccacccattccttttcccataactacgatgtcaggaacaacatcataattttgaaatccgaaaagttttcctgttctcccaaagcctggttgaatttcatccagaatcatcatggcaccaacttcagtacagcgctcgcgcacttttttaaggaaatcattatgtggttgaataaatccagcgccaccttgaatggtttccagaataattcctgctgtttttgtcgttattttttgtaaatcttcttcgttgttgaaagtgataaaatcaacatcaggtattaaagggcgaaagatttgtttgcgttcttcaaatcccataacgctcatcgagcccatggtgttgccgtgatatgcattatgacacgaaatcaaatggcttcttccggtagttcttctggcaagttttaaggcgccttctattgcttctgttcctgaattgactaaataagtagtgtctaaaggagcgggcaggagtgaggctaacaatttgcaatattctaccgccggactttgcgaatattcgccatacaccataacatgagaatatttatctagctgatctttgatagcttgattgactctaggatgttggtgtcccaatgcgcaagccgaaacaccagctacaaaatctaaatatttattagaatttgtatcgtaaatgtaagaacctacagcatgtgaaacttccattcctagtggatatggtgaggtttgtgcttgatattttaaaaaatctgtgttcaattttttagaaatttaaccgcaaagttcacgaagttttttcgcaaagttcacgaagttttttaatggtattttttaaacaggtattttgaaagctgttgtctgtaacttgagactgaaaactgagactgacgactgaatactattttttccctttcttcttatcgtaattcagagtttcttttcgaattttcataggaatatcccctttggccttagatgattgagttgctttagcaattttatcattgtcttcattttcttcgggaggaaaaatatcgtcttttgattttattcgttcatcgccacgccagactaagcctcgaagttttctagcattttcaggcaagtctttttccggaaaaatatccccatctacttgctgaaaaaaggtaatggtttcgatttcatttttttctaaaacaagatttatcttactactcacgtttttgttgataccaatgagttcttgtgcttcgtttcgcatataatagataacttctgcatttttcacaatatctacatcatgcagttttccatcctgaaatttgccatagagattttgtcccttgacttgattatagccggttcctatggtgtctttagagactataaacgtgttttcgagtactttgagtgaatctagtttctgtgttgtattattaccaataagatgcattacatcacctgtgatttggttttctgcgttccagagtattggacttccaatcattttagtcaaggcatttttagaactagaatgaatcgaatcacattttccgctcatatccgttttgaaaaaacgaacattattgaacgctcggataattctgtttccttcttttccggtaaccatcaatttttttccgtggatgtagactgagtcattttctacaaaatttacagcaagggctcttttagttacatacatagaatccagttttttgtacacttcggcataatgtccttttacgattccacgattgatagaatcggttatttttacattgcgagttgccgatgcaaattcctggttgcgatcataatacaaactatctcctttaatcactcgatcatcgtatctgatgtaagatttattcaggaaatgcgccagattttttttggtatcataaaaccctttttcggtataaatataattggctttactggtgattgtagaaggtccaaaaagataagaatgcccagaattactaaaataatctagatgatttgatttgattacatacgtaggattagtgatggtaaccgctgtcaggaattggaattttttttggtttacgaagtacctccccgcattgcttttaagcgtattatctttattggtaatagttcctggcgtgtcgtaaaatacttcttgaacatttcggtcaaaatttataatctctgttaccaatgttgcgtctggggaactcattacggcatctcctgaagcataggctttttttacgtttccgttgtattctgcatatttactattcaaaaataaagtgtctccttgtaccatttgtacatttccaaaggctttgatgtagttttctttttggaaataataggctttattacaggtcattaccacaccgtcatgattgacacgtacgttaccgataagcaacaacgcatcaggaacttcaagctgatttacatctgcaaaatccgagttttcaacaataattttttttggggcttgcgccaaaaccaaatttgtaacaaagagtatcaaacaataaggaaggaaaaatagcgatttcttcaatggatttaatttttgtcaaatttatgaaaaaggaaacaatcctaatctatattaggatttatttataattagttaaatcgtaggacaagctatttctgtacttttttaaagttattaacaaatagaacaactccttcgttgtagtatttgttttttaaaaattgaattacataattaagaacgaattagacatctataatttaaaaaatattaaatttaaaaattgatattcagttgctattaaaagaattaaaatatagatgaataattttatatgatgaaaaaaataactattgttgcaggaataagcgtggtacttttagtaactgcttgtaaaacgaaagatttaaaaatgagcacagaacaacaagtgacagtctcgcgtaaaaaagaggttgtatatcaggtgtttacccgattatttggaaatataaacaccaccaataagccttggggaacaattgaagaaaatggagtaggtaaatttaatgattttactgaaacagcattgcatgaaattaaggatttaggagttacttatatttggtacacaggcgttccgcatcacgctttgatacgggattattctgcaataggtatttctaatgatgatcctgaagtggtcaaagggcgagccggttctccttatgccgtaaaagattattacaatgtaaatccagatttggccgaaaatccagcgaatcgtttacaggaatttgaggctttaattgcgcgaacccacaaagcgggtttaaaagtgattatagatattgttcccaatcacattgcacgtaaatatgaaggaaaaagcaatccagtaggtgtaagagattttggggctgatgatgatataacggttgattacaaaagagataataacttctattatataccgaatacacgttttgaaattcccgatacagacagaccattaaatggagaaaagaatccattaattgatggtaaatttgaagaaattccagcaaaatggactggaaacggttcccgaatggcaaaaccagataaaaatgattggtatgaaactgtaaaagtaaattatggtattcgtccagatggttcaaaagattttccagaacttcccgcagattttggttccaagtcgtatcaggaacattttgatttttggaaaggaaaagacgttccggattcttgggataaattcaaagacattgcgctgtactggacagcaaaaggagtggatggttttagatttgacatggccgaaatggttccatatgaattttggagctatatgaattcagccatcaaagtgaataatccagatgcttttttattagctgaagtttataatcctaaagaatacagaaattatattcgtttgggtaaaatggattatttgtatgataaagtagaaacgtatgataaattgaaagatatcattcaaggaagatcattgcctgatggattatcagagatacaaaacggaatggcagatatcgaacatcacatgttgcattttttagataatcatgatgaacagcgtttggctagtcccgaatttgcaggaacgccagaaaaaggaaaacctttaatggtagtttctacaaccattagcacttcgcctactatggtttattttggacaagaagtaggagaggcggggaatgaaaatgcaggatttggaacacattctaggact

SEQ ID NO: 3105 - DNA, 24443 bp, synthetic construct
  variation 14645..16010: note = note, n is a, c, g, or t
  source 1..24443: mol_type = other DNA
  misc_feature 1..24443: note = Synthetic
ctaactttcacttttggataggtactttaggaattatattgtatacgattccaatgtacgtagctgggtttttacaagcttctatgtggaaacagtttaacccagacggaactttaacttatggtaacttcttggaaactgtcactcaaattatgcctatgtattggatgagagcgattggtggaaccctatatttaacgggaatgcttgttttagtctataacattgtccaaactttaagagcgggctctaaaattgaagatgaattagcagaagctccagctttaataagaattagctctggaagaataaaaggagaaaaatttcatccttggttagaaagaaaaccaattcaattgacaattttagctacagtagcgattttaattggtggtgtgattcaaattgtacctacgattatggttaaatctaatattccaacaattactagcgtaaaaccttattctcctttagaactagaaggtcgtgatttatacattcgcgaaggttgtgtgggctgtcactctcaatctgttcgtccttttagaagtgaagtggaacgttatggaccacaatctaaagcaggcgagtttgtttacgaccatccatttttatggggatctaaacgtactggaccagatttattaagagtaggtggaaaatacaatgacaactggcattttaaccatttctggagtccacaaagtatttctgcaggttcaattatgccaggatacaaatggttatttgataacaagccaatggatatttctttaactcaaaagaaaatgcaagcaatggttacattgggagtaccttatacagaggctcaagtagcaagtggtttagatgatttgagaaaacaagccgttttaattgaagaaaacttgaaaaacgatccagactttgttaaaagttatgaggaaagcaagaaaaaagcagccgcaagaggagaaaagtttgtcccaatcaatgaaagagaaattgtagctctgattgcttatatgcaaagacttggaacagacattaaagttaaaaatactgctaaaaattaagagtcatgtttgaacaaataaaacacaatatggagacgatcgatggtgtatcgatatatcccatcttatcattattaatttttttcttcttctttgtgggattggggatctgggttttctcctataagaaagaaacaattgatgaattgagtgaaattccattgaaagacaattaaaaagtataattttttaaaatttagagaatgaaaaaatttattccagcatacgttagcgtacccgttattttctttgctgtatttggagcaatcgaattctttatagactcaggagatcgacctgcttttataaaattcccaatggttgcagtattcttattcgtgtttcttttccttgttatagcaatagaaattaccatgagagcggtagataatatcacttatcttttattgacagaggaagaaaaaatcaaattaaatgaaacaaataatttgagttttaaggataaagaatggtataaaaaattaatggaaaaattgactaaaactgctccattagctgatgagggtcaattattactggatcatgactacgatggtatcaaagagttagataataaccttccaccatggtgggtctatttattctatgcttcaattgtttttggcgttgtttacatggtccgatttgaaatattaggagctgataatcaggagatggaacttaaaaaagaaatcgcccaagctaaaattgaagttgcagagtatatgaaatctgctccagatatgatggatgaaaaaacagttacattgttaacagatcctgctgatttagcggcaggaaaagcaatctttactgctaattgcgctgcttgtcacagagcagatggtggagggcaaattggacctaacctaaccgatgatcaatggattttaggtggtggaataaaaaatgtttttcacactcttgtaaatgggggtcgtgatggaaaaggaatgatttcttggaaaggtactttgaaacctaaagaaatgcaaaaagtagccagctatattctatccttaaaaggaagcaatcctgttgatcctaaagcgccagaaggggaagtttgggtagagggaaatgcaacagttgcagttaaataaaaagtacaaacacacatttttatttaacttaaaaatagtccgaattatttgaacagtgttttaaataaaaaaaaatgtcaaaattaccagatgaagcttttagagatactattggaacaatcgacgaagagggcaaccgaaaatttatttttcccaagaaaccttccggaaagttttatgattacaggaaatgggttagctattttttactaattgtacttgttgcaaacccatttgtgaaaatcaatggcaaccagttcatgatgtttaatattttagagcgacgatttaatatttttggatttcctttttggccacaggatttttatctttttgttcttttcatgattgtaggggttgtttttgttatcctgtttaccgttatttttgggcgaattttttgtgggtggatttgtccgcagaccatctttctagaaatggtttttcgcagaatagaatattggattgaaggagatcgaggtgctcaaatccgtttagaaaaacaggactggaatgcagagaaaatcagaaagaaagggcttaaatggactttatttttaattatctccttttttatagccaacgtattcctggcttatcttatcagtagcgacaagctactattgatgatcgaagaagggcctgcaaatcatatcagtactcttgtttccttgttgatttttacgggtgtattttactttatttttgcatggtttagagagcaggtttgtatcatcgcctgtccttatggcagattgcaaggtgttttgttagacgataaatcgatcaatgttgcctatgattttgttcgaggtgaaaaagaagctggtagagccaaatttaataagcaagaagacagagcatcaactggaaaaggagattgtattgattgcaaacaatgtgtaaatgtttgtcctaccggaatcgacattcgtaacggaacgcagatggaatgtgtcaattgtaccgcctgtattgatgaatgcgatacaattatggaaaatgtgggtttacccaaaggacttattcgttatgcctctgaagaagaaattgagaaaaacacaagcttcaagtttactccaagaatgaaaggctactcagcggtgctgtttattttgaccggtatcttaattggacttttgttcttacgtactgatgtcgaggcaacaatcttaagattaccaggacaattgtttcaacacaagggggataacattagtaatatttatacttttaaaattataaataaaactaacaatgattttgatgacattcattttaaattagtgggtataaaaggaactttaaaagtagttggaaaacaagctttaaaagtcccaaaacaaggaatgagcggtggaaccttgtttgttgaaatcaataacaacgttttagacagtgataaaacaaagctgaagattgaagtctacaacggaaaagaaaaaatagaaaccagtacaactagctttttaagtccacgaagttttgactgatgtcaaacgagttgaaatttataaatagaatagtatgaaaattaattggggaacagcaatagtcattgcttttgggttgtttataacctttattttatattttgtttttatggttcagtcggattctaaatacgataatgatctagtagtggaggaatattataaacatgatgctcgttttggcgaggaaatggaacgggttcaaaatgctgaggatttaaaagaaaagccaataataacggctggagcatctggaattacaattgtttttccaacggtatttgttccaataaatattaaaggaaaagtgtccctttatagaccgtctaacaaaaaattagattttgagattccaatttcattatctgatgctactactttgctcatacctaaaaaaagtttggcaggcggtcgctgggacattaatatggaatggcaatatgaggggaaatcttatttgtctaaagaaacaatttacatcaattagtcaagcaggtttaatcttttaaggttacagtacactttaagactttcgacttctggacataaagctacaaaaatgctttactctgccttcattttcggtttaataagtagttttcattgcattggcatgtgtggtcctattgctatgatgttgcctgtagatcacactaatcagaccaagaaagcaattcaaatcatcacgtatcatttaggaagattaacggcttacggtaccattggatttgtttttggactactgggaaaaggatttctattggctggtttgcagcagaatttgtcgatatttattggcgtagccatgattagtgttgtcttaattccagacaaaatttttgcgaagtacaacttttcaaaaccggtttttaaattaatttctaaaatcaaaactgcattaggaagtcagtttagaaacaagagttttaaatcattatttactatcggtctactaaatggatttttgccttgcggaatggtttatgtcgctttatttggtgctgtagctatgcaaagcgaaagcttgggtgttttatacatgattttatttggattaggaactgttcccttgatgagcagcgtggtatatatcaactcttttataaccttgcctattcgcaacagaatccaaaaaacgattccttatgtggctgtagctattggctgtttatttattttgagaggattgggattgggtattccttatatttcaccagctaacatgagcttatttattcaagctgatccaaattgtcactaaccttttcataatttttcatataaaaagcacgccattcagcgtgctttttatatgaaaaaggttaaaattatatggtcatcgaaaataattccgtttcgggcgcttttcttttcaatcgcaaatcaaatgccatacagatattgcgaacataaggttttccattttctgtgacctcgatgctgtttttagtagtaatcaataagccatcattttccatttcttttaactgatatactatttcggggatttcattaaaatagccttccgtatcattccaagaggttttaaattggcacattaaattcaaaatgtgttttcttataattaggtcttctgtggtcaatacgtgtcctctaaaaacgggtaatttatcccattctaatatttgataataatcttctagattttttacattttgagcaaaactataccaactatcactaattgcggaaacacctaaaccaagcatcaacttcgttttagaggaactgtatcccataaaatttcggtgtagtgtgccattttgaaatgcttcatacaaactgtctgtttctaaggcaaaatgatccattccaatttcatgatagccattttcgaagagtaattttttgccagtttcatataactttctttttttgtcgtcttgtggaatatcctcatctttaaatccgcgttgtccatttccttttatccaaggaacatgagcataactataaaatgccaatcgatcaggctgtagtgatttagttttctcaatggtatcaacaatatcttcgacttcctgaaatggcaagccaaaaataatatcgtgaccaatagaagtatacccaatttctctagcccaaaacgtcacttttgcaacattatggaagggctgttctctatgaattgctttttgaacttttacggagtaatcctgtactccaaaactgactcttctaaaacctaaatcatatagcttttgcaaatgttcatgagaggtattgttaggatgtccttcaaaactaaattcatgattaggcgctttcgtggcataggagaaaataccgtttattaggtcttctaagtttttagttgagaaaaaagtaggagtaccaccgcctaaatgaatttcttttatacttggtttttctccaaggattttacagtagatggcccattctttcaatactgcttcaatgtaaggatgttctacgctatgattttttgtgatgcgcttgttgcagccacaaaatgtgcataaactttcgcagaaaggcaaatgaatataaagactgatgccttctgctccattactttctaggaatgatttttttagagttgctgtccaaacttcgtatgaaaaatcaacttcatcccaatagggtacggtaggataactggtatatctaggtccgggaacattgtatttttgaattaaggaattattcatggcaaaatcatttatcgttgttcaaaagtagaacgactactcatctattaaaatgataattatcatattgaagaaaccttttaaaaaaaaatgaagaggcttaaaagcctcttcataatgaaatttattttttaaatagtaatgcaattctgaatcatttttgtccattttttggctaattgatgatcttcgtataaacaaacttgacctatttgatcattctcaattttgtaaaatgataaacagtctgctttcttgctttctttgtattgaaattcaaattcaatttttaaaacggtatcactattgatctctgttgttgaaatcagtttgcaggattgaattgtatttaaatctacaaaataaacaacttcttccttagcattaaaatccattaaaagaaaccctttgtttttttcggctaaagccaagacttttttgttttgtgtttcggttatttcaaaattaaagcgattgttttgactgaatttattttttatggctttgatttttgctttgttaattgaagatgacctcatggaatagaatagagggatggcaattattaaagttaatactagtccaattatagttacggaagtatccattttttatttttttagttatttgtaaaacaggataagttgaactgaaatccaaagggaatcaattcaaaaaggaagataatgtatcttcaatttacgaaatcagtgtttcaaatcaccaaaaaaaatggaaaggaaagagcaggagcgaaaccatctcacatcgattgatgtcttgtttcgcaaaacgaataacgaatgtactacttttaaaatctggaattacaatcagaaaattttccagatattttgcaatcgtataatcaggagttttatgataggaagtaaaggtactacttacttgaggttgtatgaaatctaaagaatggatgctgtcaacataaaccgaagaacttgatttttcgattttattggaatcaacagtagcatcatttgcattaaaagcaaataaaaacgctattgaaagtccaatgaaaacaagtgtttttcgaaaccaattcatgttgcaaaaataaaaattatctgtagattactacaattttttcaaataaatcaaagttaaaattatatggaggaaatcgtttttataaaaaaagccccgaactactattgtccagggcttatagttataaaataatatcaaaaaattactcgactttcaagtttctcaattgttttagtttctctttccacacatcaagactttctttgtgaatagcaatgtttttacgaacttctaacacaatagaattctcttttttagcattgcgagtattggtaaaaaactgaatgttgttttccaattggaaaatttcattttgtacttcgtcaattttacgcatgataaaaatcttttcattatccagtttacgtgtatcatgactttcagataaatgatccattctattggcaaaacgcatcatatcggtgtcttttttactcaaactcaatttttcaaaaagagcatccagaattttattgaatttcccctcaatatgtcttcttggaaaagggacttttccaaagtttttccaagtttcgatatgcattttaatagcgtctaaatcagttttatgatctccactcaattgaaattctctcaacgtttctaaataggcttttttgttgtcaaaagcttctacctcttcgctattttcttcgtttttttgttcttttagcttttcaaaataatgattacaagcgtctttgaattccttccagattttgtctgaatattttctaggcacatgtccaatctgtttccactcctcttgaatttgcttcatgataggtgtggtagcagcaaaatcttggctttcttgcaattctttagccttgaggaccaaagcagtttttaggcttaaattgtcgttttgatcttttttaatgtctttgtaaaacgaatttttaaacgaattgaaatttctaacagccgttttaaaactagcccaagtttcttcgtttacatccgaagggacttttccagcagagaagaaagcggtacgtaatgcctctactttttcaatttgcgccaaccattgcgagtgtgcattgactttttcagtcgccaaaacttcaattttagcaataatctcttttttcttttctagattttcaagttctgtacctctttgattttcaaataacacttcgcgtttgtcatgcatttgcttagtcaaatcactaaacttgttccatatttcatcgcggtgttctctcgaaaccggtccaatgtcttctttccagattcggtgtaagtcttgtaattctctaaaagccttgttaatatcagcttcatttactaattcttccactcgggccacaattttttgcttttgctctaaattgtgcttgaaatctaagtctcgagcctctcggtctaggtgtaaataatcgtagaaattttccacatgaaaatggaaattgttccatacatggttgtatttgtctttaggaattggaccagcatttttccatctttctcttaaatcattaaaatgtttcaaggtatctttgatgttctcttgcggattaattagctcttttagttcttcaacaatagccaatcgattctctaaatttgtttttagattagtttgtaaactcttgaaatgagtgtttttaatatctctaaattgagtgtagaacttatcaaattgagtttttaaaggcgaatgatattgaaaatcttcagtaggatcttggttttcagcaagaaattcctctttcttctcttctacaaggtggttgtattttgctaagaatgctttttttacttcttctatgtgatccttaaaagacatcactttctcattggaaactaaatttttcaattcctcaacaagttgttctaatgataaagtatcataatcttgcatagaaatttcatgacgatctttaagcgtctcgtcttcactttcttctgcgtttgtatcagcaatggcatctagagccgattgattggttgtgtccatagcagtattagtgggggatgcctcagcaggaataactacgttatcttcggctggcatatcacttggttctgtttcaggtgttgcttcaaggtgttccttttggaattgatcggatgccgtagcattgttttctaagtttccatctgcttcgttttcctgacgagacaggttatcattcttttcttctaacattttttcaatgtataaggtttgtatttatatctattgcgaaagatactaaagcagtatgaaagtacaaaataaaaccattattaatagtcgttttatgttggaaaatgttttcatttggagctatttcctgctgttcgctgtatctttttgtttgctaaaaagcaaactaaaaaggatgccgctgccatcagggctagggtttagaggtgaaattatgaattgttttcaaaaaaaaagtcccaccgaagcaggactaaagattttcatctacggcatatagccttattgtgataagattaaagattagaaattttaatcagttacaaacctaaacaaaaaatagttaggttgcaatgaggaaaaccgtaaaaggggcaactattttctccgtagctttaaaaattcttacaaaatagacattgatatggcaaaaatattaggattagatttagggacaaactcgattgggtgggcgatagtggataaagatgggagtgaattttctcttgtagataaaggagttcggatattttcggaaggtgttaaatctgaaaaaggaatagaaagctcccgtgcagcagaacgcacaggttttagaagtgccagaaaaataaagtttcgcagaaaattgagaaagtatgaaactctgaaagtgctttctgaaaataatatgtgtccattatctgtagaagaagttatagaatggagaaaatctggttttaaaaaatatcctcttaatccggaatttattgcgtggttacgtaccgatgacgacaaaaacataaatccctattattttagagataaatcaagtaaacaaaaagcttctttgttagaggttggaagggctttctatcatattgcacaacgaagaggttttttgagcaatagattagatccttctgcggaaggagtcattgagcaacataaaccagatttagaagatattattgaaaatgcttcaactattaccgaacttcaaattgaattaacagattattttcaaaatcgtgatttgattgagcgtaaagccattgatttagacgaaggagaaaagaaattgaagacattgtataattcatttcttaaaactattaaagattatcacaaagattttgacaaaactaaatccttacttacggagcgtttaaataagaaggatgatttaggcgtagtgaaacaaaaaattggagaaatttcccaagcaatgaaagacggaaatttcaagactttagggcaatatttctatagcatatataataaggggaaaatcagaaatcaatatacggctagagaagaacactatctttctgaatttgaagtcatttgtttggctcaaggaattgatggaattttaacttctgaaaaattacctgaaaaaagatatttaggattagccaaagaattatatagagcaatcttttttcaaagacctttaaagtcccaaaaagggttaattgggaaatgtacttttgaaaaaagcaaatcaagatgtgccatttcacatccagattttgaggtatatagaatgtggtgttttatcaataccataaaaataaaaactccggatgatgaaagtttacgatttcttactaacgaagaaagattgaaaataattcctaagtttttacgtaaaaaagacaactttaattttgaagatttagccaaggaattggttccaagtggtagcaaatacgcattttataaatcatcaactgcagcatctgtaaattacttgtttaattatagtttaaattcctccgtgagtggttgtgtggtttctacttcgtttaaaaatgctttgggagaagattggaagacgaaaatctatagctacgaaactcttaataaaaatggcgaaagtgtaaccagaaatgtagattatactgatttatggcatttgatttcagtttctacatctgatttatacttggaggaatttgcaaaagacaaattgaaattagacgctaaaaaagccgttttattcagtaaaacaaaactaaagaaagattttgccagtttaagtttaacggcaattaataaaattaatccttttttaagagaaggattattgtattctcacgctgtttttatggcaaatatcgaaaatattgtagatgtagatatttggaaaaatcttgatgacaggaaatatattcaaactaaaattgccgaattaatcgccacaaatacttttgataacaatttattggagataataaatggtcttattaaagaatgtaaagttggaggatgttattattcaaaagaagcggaaggaagctataagttagatttagaaaaaaaggtgaattcctatgtgaaatcaaataaaattgaagaccaaaaagaaattattattggtttgttattccccatttttatcgaacaactcaagaaatatgaattcattgcaataaaaaggttggatgaaaaagtatttgattttttagatggtcaaaatgatgacggtcaagttttttgtaattctaaaaacaaactaaaaaagttatatcatccttcggatattgatgtttttagaaagcaaatagcaaaagatgggaatgggaatgaaaaattagttttaggaagtccgttaatatcttcaataaaaaatccaatggcgatgcgggctttgcaccaattgagaaaagtattgaatgctttaattgttgaaggtcaagttgacgaaaaaactagaattcatattgaaatggcacgagaattaaacgatgccaataaacgaaaaggaattcaggattttcaaagagacatagaaaaaaataggaaagactacattgaggagattaaaaaagattacaaagcagcaaaaggtatcgatattgaacctacagaggatgatgttttacgctatcaattatggattgagcaggataaaaaaacaatttatgaagaacaatgtacaaatatagggattagtcaaataataggcatcgaccctgattatgacatagaacacaccattccaagaagtagatcgcaagacaattcacaaatgaacaaaactttgtgtagtaagcgatataaccgagagattaaaaaaaataaaatgcctattgaattaagcaatcaccgcgatattctggacagagttgaaccatggagaaagaaatatttggtattagaatatgatattatcgttatctcaagagccattaaagcggcaactaccagggaacaaaaagatcgaaaaataagattgcgtcataagttgaatttggaaaaagaatatttcaaaggtaagtatgaacggtttacttataaagaaccaaaagtaggtttcaaaaacagtcaaattccagatactggaataataacaaaatacgccagtgcgtatttaaaatcgtattttggtagagtagaagcggtaaaaggtggaatagtagcggagttcagaaaagcttggggaattcaagaaagttatattaaagatggaaaaaaatattatcaagtaaaagatcgtagcaaacatacgcaccattgtatcgatgctatcaccattgcgtgtatgaccaaagacaaatacgatgtaatggctcatgcctgggatttagaagatgacttggataaaaatcaatataaattgatgaagtcagttctcgaacaatcaaaaccatggaaaacttttacagaggatttgaaaaagattgaggacgaaattttggtttctcataatacaccggataatgtaaagaaacaatctaaaaaaattattagggttcgaggtaaaaaacaatttgtcgccgaaatggaaactgatataaatggaaaaaatagtccgagaaaagacagcaacaacaaaattattttcaagaagaatttgaatggagaaaacacggcaaggtttcatcaaggagacactattcgaggttctttgcatcaggatagtatttatggagcgataaaacaaccagaaatagatgataatacaaataaacctaaacatacaactaaaggtgcttttgtaattaaaaaagatgaaaaagggattgatgaaattaattttgtgattcgtaaagcattatctaaattgtcagaaaatgatataaaaaacattattgatccaattgtttgtcaaaaaattcaaagagcagttattgatggcatgattacttttaaaacagttcaaggcaaaaaagtagctgttgttaaagaaggaactacaatttggatgagagagccaaacaaagaaaaggatttagttggtattcctataaataaggttaggatttttactggattaaaaaatccattagaaattaaagagcatagtactttatcaaaatcaagatttgagcataaacaaaaagtttatgctcaaaacgatgagaattttgcaatggctatctatgaaggaattgacaaaaaaggaaatgtgaaaaggagtttcgaatcggttaattatatggatgctggtaattattttaaattaagtaatagaaataacaatgctaattcattggttcctttaattcatttaaaaactcaattacctttgaagtatgaagtaaaaaaaggagatttagtcttgttctacaaagaaaataaagaagaattaaatgaaattagcaataaagatttaacgaagagattatataaagtgattgcttttgaaggagatggaagaattcaattcagatatcataaaactgcgatgcaacaaagcagttcaaataaagaagaattgacaattgttaaatttatggctgacaataatttaaaaaattctcaagttgattttgaaaatccagtgccttggttgagattaagagtttcaaattgcaattttttattaataaaaaaagaatttgaaattacaccaacagggaggattgatattttgtagttttgggtgctctttgatatttttcattgtcttaaacagccaaaccacaactgaaaggtatggcatccgcccagcagggatgcagtagctttcagttgtggtttgattaaagattagaaaacacgatattaaaagcaaatttcaaagccaaagttttattgttgtggtttgattaaagattagaaaacacgatattcattgnnnnnnnnnnnnnnnnnnnnnnnnnnnnnnnnnnnnnnnnnnnnnnnnnnnnnnnnnnnnnnnnnnnnnnnnnnnnnnnnnnnnnnnnnnnnnnnnnnnnnnnnnnnnnnnnnnnnnnnnnnnnnnnnnnnnnnnnnnnnnnnnnnnnnnnnnnnnnnnnnnnnnnnnnnnnnnnnnnnnnnnnnnnnnnnnnnnnnnnnnnnnnnnnnnnnnnnnnnnnnnnnnnnnnnnnnnnnnnnnnnnnnnnnnnnnnnnnnnnnnnnnnnnnnnnnnnnnnnnnnnnnnnnnnnnnnnnnnnnnnnnnnnnnnnnnnnnnnnnnnnnnnnnnnnnnnnnnnnnnnnnnnnnnnnnnnnnnnnnnnnnnnnnnnnnnnnnnnnnnnnnnnnnnnnnnnnnnnnnnnnnnnnnnnnnnnnnnnnnnnnnnnnnnnnnnnnnnnnnnnnnnnnnnnnnnnnnnnnnnnnnnnnnnnnnnnnnnnnnnnnnnnnnnnnnnnnnnnnnnnnnnnnnnnnnnnnnnnnnnnnnnnnnnnnnnnnnnnnnnnnnnnnnnnnnnnnnnnnnnnnnnnnnnnnnnnnnnnnnnnnnnnnnnnnnnnnnnnnnnnnnnnnnnnnnnnnnnnnnnnnnnnnnnnnnnnnnnnnnnnnnnnnnnnnnnnnnnnnnnnnnnnnnnnnnnnnnnnnnnnnnnnnnnnnnnnnnnnnnnnnnnnnnnnnnnnnnnnnnnnnnnnnnnnnnnnnnnnnnnnnnnnnnnnnnnnnnnnnnnnnnnnnnnnnnnnnnnnnnnnnnnnnnnnnnnnnnnnnnnnnnnnnnnnnnnnnnnnnnnnnnnnnnnnnnnnnnnnnnnnnnnnnnnnnnnnnnnnnnnnnnnnnnnnnnnnnnnnnnnnnnnnnnnnnnnnnnnnnnnnnnnnnnnnnnnnnnnnnnnnnnnnnnnnnnnnnnnnnnnnnnnnnnnnnnnnnnnnnnnnnnnnnnnnnnnnnnnnnnnnnnnnnnnnnnnnnnnnnnnnnnnnnnnnnnnnnnnnnnnnnnnnnnnnnnnnnnnnnnnnnnnnnnnnnnnnnnnnnnnnnnnnnnnnnnnnnnnnnnnnnnnnnnnnnnnnnnnnnnnnnnnnnnnnnnnnnnnnnnnnnnnnnnnnnnnnnnnnnnnnnnnnnnnnnnnnnnnnnnnnnnnnnnnnnnnnnnnnnnnnnnnnnnnnnnnnnnnnnnnnnnnnnnnnnnnnnnnnnnnnnnnnnnnnnnnnnnnnnnnnnnnnnnnnnnnnnnnnnnnnnnnnnnnnnnnnnnnnnnnnnnnnnnnnnnnnnnnnnnnnnnnnnnnnnnnnnnnnnnnnnnnnnnnnnnnnnnnnnnnnnnnnnnnnnnnnnnnnnnnnnnnnntagacgggttgtggtttgattaaagattagaaaacacgatattagttggcttgttaccttctaattatcaatagaataaggaataatatcgtataaaaaaatgcctcttttttggattgataagccaatattgaggcttttttttgtttctatcacaaaaaatttgaggaattagccagaaaggtgtttttaattgcataaaaacaaccctgaaacggggaacgatagcatatattttgaaacaaaaaaaattaaaacaactccaactgcgttggtgcagcaaaagcatcttgttttgccttgcctaaataattgataatcatgccaaattgtttatcggtaatccttaaaacacttacttttcctaaggcaggaacaagtcggttaatgcgtttttcatgcacatcggcactttctccactcgcacaatgcctaatataaactgaatattgcatcatactgaaaccatctttcaataaatttcctcgaaactgagaggcatttcttttgtcttttttggtttttgttggtaaatcgaaaaacacgaacaaccacattattcggtatccgttaagttccataattttggatatttaatttttttacggtctcctgtaaaacagtgctggagtgaacttgccgttttttgtaatcctaccattaagggacttttctcttctttgaaatacaccgtttgggtcagcatatgtaatagttccgcttttatcgtagtgttaagttcttgttctttataccgtttcataatctcaaaaactttttcatcaacgatgggacgaaaaggctccatgatatcatctgcaagtgcaaaagcattgtatttacttttgtgatgaatgccaagtgtatttaataatccacttcctgatagcgcacgggcggttgcagctcttaaaattgcataaccataatttaaaaaattgttggggtaatcgccatagcgttctctttttacaccgtctttttcatggttgggtaaggggaaatttttccaatattgttgtgctgcaacaccttccatatttgatgtgtcgccacttaatactttgctggccagaaattcaaatgtgttcttatttttagtaattttttctaataattctccttgatttttaattttttcaataatggtttgttgccataattgtttttttagcggaatcgaagcctcgatttgatttttaaatatttcctgttggatgtggtggctgttgaggttaagaaacattccgtttggcagatggttactgccacaaataataatagcagtattgttctctatgatcaaattcatagcaggaatactcagataaatttcagcatgatcgagaaccagaaaaccaatgtcttctattggaatagcattttccctaacttcggatttgattactagttgttggtttttcgtcgtaattgaggatttgttttcaacgaggattgttcttttaatcataatttaaagtgttaaattaaatttaagaatttgattgttagtcaaattaacacattaaataattgattacgatacgggaaacctcactagtattttaaattaatgataaaaaaattgtcttgtttaaaattacttcacattaaagtaaattttaaataagacaattaaagtatttttaaatgtaaagttttttatttattccaaatcttccaagccttctctgcttgaaaaataagcatatctagaccatttttgattttggctccttgtgctgctgctttttgtagaaattgtgtttcggcaggattgtatatcaaatcataagcaatatgcttctttgtaaaaaattcatacggaagtaaagggaaggcagctacatttggacttgttcccaccggcgtagcatttatgatgatttggtaattatcaaatgttgttgcgttaatgcggctgtagtcaattgccttttcactggcttctctcgaaacaaatgtatagggaatgtttagttcatctaaagcaaaagcaacgcctttagacgcgcctccagtacccaaaatcagagcttttttatggtgtggttccagtaacggttgtaatgactttttaaaaccataataatccgtattgtacccttttaactttccttttttggtaattttaatggtgtttacagcaccaattagtagcgctttttttgaaagtttatgcaaaaatggaattactgcttccttatacggaatagtgacactcattcctttgaggtcgggcgtgtttttaacaacttcgggaaaggcatttatttctggaatatcaaaattctcatacgtgcagccttcaaagttttcgctattaaatttatctgtaaaatatcctttcgaaaaggaataacttatattgcgacctactaatccaaagcgctttctaacgatatcaaccattattgttttttatgttttgcaatataattctgcaccattttttttgcccaaactactggaaataaatcttctataagaatataattctcaaaattcagtcgcagggcattgcttaaatggaattttgcttttgtattatccgttagcataaagtacaaccctgctaaacggtattccacttcattctcttctggaaaatattccgttgcttgcaataaagtctgaatagcactttcgaattctcctaaaaattgtaatatgtctacccagaacaaccaagtttctaaggaatgatccccaaactctactgcttttctatagccaaactctgcttcttcaaagaaattcatttgtttgtttatggaagcaaaacgtttccaatacaacctattttgattgtcaattgctaatgctttattgacataaaatagtgctttttgaaagtttttttggcgaacataaaaatcggttatggcgatccaacccttgtctaatagaggatcttcatgtactgtttcattaaagtattttaaggctaaaacagaattacctagcttttcatagcattttcccattcgcaatagcgcatatgaagttgcatcatccaattcgattgttctgctgtagctttcaatagcttcttcatatttttttaatcgttcaaaagcttttgctttttccatgaatgcccctaggaattcatcgtcaatcaacgtagcgtaatcaaaggcgcgaatggcattctcatattcttttactccataatgcaacctacccagctggtgccaagcgatttcgctatacggatttttgtcgatgtatttttttagatagcttatagcctcttggttttgatctaaaaattcaaaacaatacacaacgttatatagtgctgattggtcttctagatcctcttctaaacacttgatgaagctttcttttgccatttcaaggttgtccataaagagatattccatgcctattaagttatagacatcagcattatcatccgtgtattttaaagcgattcttaataattcaactgctttttcgtgttggtctctttttgaatagatattggctttttgaatgtaaatttcttcgttcgttggctcaatagcatacaattcattcaatagtttttcggctaattccagtttgtcatcaaagaccaacatctccacttgaactaattttagtccagttgattttgggtgttgttctaatgctagttttagcgctttttttgccaatgcggccttacccatatcgagataatgaagaataatttcttcaaattcttcagagtcaaaaaagagcactttgttggttttcaacatcgactcaaatttagacagggataagttatagtcttcttcttcgttgcttaattgcatctttgtttttttagaatttggccttattaaatgtaggcatccttacggttaatgtgaggaggagcaggaattgttttaaacaatttaattaacaaaatctaggctgttttagtactgatttccatgcttgatacaggtggaaatcttttttactgtccttctctaaacgaaggtgaaaaatggcaatttttctttaggatgggataagagtctgcatttatgttggcaggattctcctaaagaaactaatttttattcaaaatcgaatccattacttctaacataattgcacaaccttctcggatttcttcattagaaatggtcaaaggtggcgtgattcggatggcgcatccttcaaatagcaaccagaataaaatgagccctttgtcttgacattgcagaattacttcgtttgttatatcggcacttttggtcattgcggcaagcattaatccttttcctctaatctcctctatcaaaggatgtaccaaaagtgatcggaatagattttctttctctaaggcttcaggcattaggttggtctcagtgatttcttgcaaagtagctaaacaggctgacgcaatgacaggatgacctccgaaggtggtgatgtgtcctagttttggattatcactaaggagatccatcattttagccgaagcggtaaaagcacctacgggcatgccgccacccattccttttcccataactacaatatcaggaacgacatcgtaattttggaatccaaaaagctttccagttcttccaaaaccaggttgaatttcatccagaatcattatcgcgcctacttcgtcgcagcgttggcgcactttttttagaaaattatcatggggttgaataaatcctgcaccaccttggatggtttctaatatgattcctgcagttttggtagtgattttttgtaaatcatcttcgttattgaaagtgataaaatcgacatctggcactaagggacggaaaacttgcttgcgctcttcaaaacccatcacgctcatcgatcccatggtatttccatgataagcgttgtgacatgaaattagttggcttcttcctgtagttcgtctggcgagttttagagcgccttcaatcgcttctgtgccagaatttaccaaataggttttgtctaaaggagcgggtagcagtgaggctaataatttgcaatattcaactgctggactttgtgaatattcgccataaaccatcacgtgtgaatatttgtctaattgctgttttatggcattattaactcttggatgttgatgtcccagtgcacaggcagaaactccagcaacaaaatctaaatattttttattagtggtatcgaagatgtaagaacctatagcatgcgagatttccatacccaatggataaggagttgtttgtgcttgatattttagaaaatcactattcaattttttataaatttaaccgccaactttgaaaaatttgtaaagttcgcgtagtttttaaagatgcttatttgtttgtgtgtcttaaattgaaaagcgaaacttttcacttttcacttttcgctttttatttttttttcactttcttcttatcgtagttcagggtttccttgcgaattttcataggagtatcctctttagcttgggctgatttagttgcttttgctattttttcattatcttcattttcttcgggtggaaagaggtcgtctttcgattttattcgctcgtctccgcgccagactagccctcttagctttcttgcattttcaggtaaatctttttcggggtaaatatcgccatctacttgctgaaagaaagtgatggtttctatctcatttttttctaaaaggagattaattttactacttacatttttattgatgcctatgagttcttgtgcgtcatttcgcatgtaatagatgacttcggcatttttgacaatgtccacgtctcgtagttttccttcctcaaatttaccatagagattttgtcccttgacttgattataacccgttcctatggtatctttggagactataaaggtattttcaaggacttttagtgaatctagcttttgggtggtgttattgcctatgaggtgcatgatgtcgcctgttatttgactttctccattccaaagtattggatttccaatcatttttgtcaaagcagtttttgaactggaatgtattgaatcgcatttgccgctcatatccgttttataaaatcgaacgttattgaatgctctaatgattcgatttccttctttaccagttaccattaatttcttcccatggatgtaaacggagtcattttcgacaaaattaactgcaacggctcttttagtaacgtacatggaatctagttttttatatacttcggcataatgtccttttacaatgcctcgattgatagagtctgttatcttgacattacgcgtggctgatgcaaattcccggtttcggtcataatacaaactgtcgcctttaatcacacgatcatcgtatttgatgtaagatttattcaggaaatgagccagattttttttggtgtcataaaaccctttttcggtgtaaataaaattggctttactggttatcgtggaaggtccaaaaaggtacgaatgcccagaattactgaaataatccaagtgatttgattttatgacatacgttggatttgtgatggtaacggccgtgaggaattggaattttttttgtttcacataatatcttccagaattacttttaagggtattctctttgtttgtaattgttccaggagtatcgtaaaatacttcttgaatatttcggtcaaaattgattatttctgttaccaaagttgcgtctggcgaactcatcactgcatctcctgaagcaaatgctttttttacatttccgttgtattctgcatatttactgtttaaaaataaggtatcgccttgcaccatttgtacatttccaaaagccttgatgtaattttctttctgaaaataatacgctttgttgcatgtcattacaacgccatcatgattcacgcgaacattccctataagtaataatgcatcaggaatttctacttgatttacatcagcaaaatcagagttttctacaataatttttttcggagcttgcgccaaaactaaattagtaattagcaataggaggcaataacgaaggaaaaacagcgatttcttcaatggatttaatttttgtcaaatttatgaaaaaggaaacaatcctaatccatattaggatttatttataattagtccaaagggctttaatagcgaatgtttcatcttttgaaagttattaacaaattagggaactccttcgttgtagtttccgtctcaattagatactattcttaaattttaatgcgtatcgatcgagattatttaaaaaacagtaaatttaaaaattgatatttagtttacgataaaggaattgaaatcagcataaatatttttatacaatgaaaaaaataactattgttgcagggataagtgcggtacttttagcatcggcttgtaaaacgaaagatttaaaaatgaatgtagaaaagaaagaggacgtctctactaaaaaagaagtggtttatcaggtgtttactcgattatttgggaataaaaatactgcgaataaaccatggggaactattgaagaaaacggagtagggaagttcaacgattttacggataaagcgctacatgaaattaaggacttgggcgttacttatgtttggtacactggagttccgcatcatgctttaattcgcgattacactgcagtaggaatttcgaatgatgatccagaagtagtaaaaggcagagcggggtctccttatgccgtgaaggattattacaatgtaaacccagatttagcagtaaatccggcgaatcgtttagaggagtttgagtccttaattgcccgaacccataaagccggattaaaagtgattatagatattgttcctaatcatatagcgcgccaatacgagggtaagactaatcctttgggcgttaaagattttggtgcgacggacgatgtaacggtagattacaaaagaaataataacttctattatattccgaatactccttttgaaataccggacacgacaaaaccattaaatggagaaagtaatcctttaattgatgggaagtttgaagaaaacccagctaaatggacaggaaatggttctcgtatggctaaaccggataaaaatgactggtacgaaaccgtcaaaataaattatgggattcgtccggatggctccaaagattttcccgagcttcctagtggttttgatacgaaatcctatcaggaacatgatgctttttggaagggaaaagatgttccagattcttgggataaatttaaagatattgctttgtattggaccgctaaaggtgttgatggttttagatttgacatggctgaaatggttccgtacgaattttggagctatatgaactcatctattaaagtaaataatccagacgcgtttttgctggcggaagtctataatcctaaagaatatcgtaattatattcatttgggtaaaatggattatttgtatgataaagtggaaacctacgataaattgaaagatatcatacagggaag

SEQ ID NO: 3106 - DNA, 24437 bp, synthetic construct
  source 1..24437: mol_type = other DNA
  misc_feature 1..24437: note = Synthetic
tttagctaaaatgcctcacttactaatggcgggagctacaggacaaggaaaatccgtaggtctaaatgccgttcttacctcattactgtacaaaaaacatcctgccgaagttaaatttgtcctggtcgatcctaaaaaagtggagctaacactttttaataaaattgaaagacattatttagccaaactcccggatactgaagatgcaattcttacggacaacgccaaagtggtcaataccttgaactccctgtgcgtggaaatggacaatcgttattcgctgttgaaagatgcgatggtgcgaaacattaaagaatacaatgataaatttaaggcccgaaaactaaatcctgaaaatggtcatcgctttttgccatacatcatattagtagtggatgaatttgccgatttaataatgactgccggaaaagaagtagaagttcccattgcccgtttggctcaattggccagagcgataggaatccatttaattatagcaacacaaagaccttctgtaaatgttattactggtttgatcaaagccaactttcctgcaaggatcgcttttagagtaacatcaaaaattgattccagaactattttagacacttccggagcagatcaattgattggacgcggagatatgctttatacaaatggtaatgatgtggtgcgcatccaatgtgcttttatagacacccctgaggtagagaaaataaccgatttcattggttcacaaaaggcatacgccactgcttacttacttccggaattcgttggagaagatagtggcataaatcttgatgtagacatctctgaaagagatactttgtttagagaagcggccgaaattattgtcaacgcacagcaaggctcggcatcattgttacaaagaaaactaaaactaggctacaacagagctggtcgactaatcgaccaattagaagctgctggtattgtaggaccgtttgagggaagtaaagcacgtggtgtacacatcctggacatgagttctcttgatcaattttttaacaatgaacaaaacaattaatactatgaaaaaatttactctaattacatttattcttctttttagcttttcgatacaagcacaagataaaaaggcaaaagcccttttagatcaggtaacagcaaaagtgagaagttatgagaatattgtaattgatttcaaatattccttgaataatgcaaaagaaaatattaatcaggacagtaaagggaacgtaacgatgaaaaataatcaatatgttcttaattttatgggaattaccaaaatttttgacggtaagaaaacctacactattgttccagaagatgaagaaatttcaatttcaagctttaacgaaaaagacgacagtgcaattacaccttcaaaaatgttaactttcttcaatagtggttataaatactctacgaatatcctgcaagatgtaagaggtcgaaaaatacaatacatcaaactaatccccactaattcgaaagatcaaagaaaagaaatactattaggtattgatgtacaaaccaaacacatctataatttgatagaaatgggtaaaaacggaacaaaaactactttaaccgttaattcttttaaaaccaatcaacctttgtcgaaaaatcaatttatctttgccgaaagtaaatatccaaattactacatcaataaattagattaattcttaggtgaaaattcttgacaaatacttattaaaaacattcctgattacatttactacggtatttgtaatcttgttttttatattcatactgcaaaccgtctggctgttcattgctgaactagccggtaaagatttggatgttgctttgatcattaagtttttgttattttcgatgcctcgaataattccacttgtattaccgctttccatattgctagcttcgataatgacctttgggaatttagcggagaactatgagtttgcagctatgaaatctgctggtatttcattacaaagagcaatgcgtagtctcacggcttttattctcctgctaagcatcgtagcctttttttttgccaacaatgtaattccgtacgcagaatataaattcatcaatttcagaaaaaacattgcccaagtaaaacctgccatggccatagccgaaggacagtttagcgacgtgggtaattataatatcaaagtcaataaaaaatccggaaagaacggaaatattttgaccgggattaccatccataagaaatccagtataggagacgggagcaaaacagtaatcaaagcaaaagacggagaattagtcagcagcgagcaatccagcatccttcaattagttctaaatgatggttactattatgaagatctcgtaccgaaaaaatacgaagatcggataaagatgcctttcgcaaaaagttactacaagaaatataccctcaatatcgatttatcacaattgaataaagtaaatgtcgacgacaagaatattgccaacaccaatacgatgttgacgataagcgagttaagctacactttagattcgctgcataaaaatttgaaaaccgaaatcgtatcgtattcggaaaacatcaatttgcgaaccggaatcaccaacaacaatattcttcctaaaacagccgtagaaaaaaagaaaacaattcccgctgacattttatcagtatatacaaataaacaaaaattagagatcttaaaaatagcgaacagtaacaccgtaagtaccggatactcgattgacgcaactaaagtcaatttagagaacaagcagaaaaacatcaacaaccaccaacttgcctttttcgataagtttgtaatcgcatatgcctgttttatgatgttttttataggagctcctttgggcgccatcattagaaaagggggacttggactgcctattatatttgctgttttaatttttatttcttttcactttataaacactttcgggaagaaaatagcgcaagaaaacggcatgtctccttttatgggagcctggatgtcttcctttattctcaccccattagctatactgttaacctatcgcgcaacaaacgacataggattaataaacatggatgttattttaagtccgttccaaaaactatttcaaaaattatttccatctaaaaaataaatacctatcatggtcacaaataaaatacaacttaacacaatcgaggaagcaatcgaagacatccgtcaaggaaaaataatcatagttgttgatgatgaagatcgagaaaacgaaggtgattttttggcagcagccgaaaaagtaactccagaaatgatcaacttcatggcaactcatggacgcggattaatttgtgccccattaactgaaagccgttgtaaagaattaggattgcacgtaatggtcactaacaataccgatcctatggaaactgctttcacggtttccgtagatctaagaggtggcggagtaaccacaggaatatccgctgctgacagagctaaaaccgttttatcttttgccaatgctgacactaaaccacatgatttagccaggccgggacatatcttccctttgattgccaaacaaggaggtgtcctcagaagaacaggtcatacggaagcagcgattgatttcgcccgattggcaggtttcaagtcggcaggagtgattgtagaaatcatgaatgaagatggtagcatggcacgtttgcctcaattggccaaggtggctaaaaaattcaatttgaaattggtttctattgaagatcttgtagcctacagaatgcaacacgacagtctgattataaaaaaagaagattatgacattgagacgcgctacggtacttttagacttagagcgtaccaacaaacgacaaacaaacaaatacatattgccttaacgaaaggaacatggaatatcggcgaaccggttatgaccagaatcaattccactttggtaaacaatgatattttaggaacactaacaaatgatgccgataagaaactggacaacatgttccagctgatcaataaagaaaacaaaggcgctattctttttatcaaccaagaagtgcagtctgttgacttattgaatcgcatagtagaattgaaagagctgcagacaaaaggtgtttttaaggcgccacaggtcaaaatggacaacaaagattttggtatcggcgcacagatactgcatgatatcgatatctcaaaaataaggttagtctcaaatgctgaacaaacaaaacgggttgggatgataggatacggcttggaaatcacagaatatgtaaactattagcccttttttaattcttttttaaaaatatattttccctaaaggcaagaaaatgaaacatttaaaaaacagtctaaaaaatagcttaaatttttatccaaattgtttttgtaaaccgaaaaaggtgcttatatttgcactcgcaatcaacaaatgattgtcgctcactggagaaatggcagagcggtcgaatgcggcagtcttgaaaactgttgactgttacaggtccgggggttcgaatccctctttctccgcggaattaaaaccctaacaactgttaatcagtgagttagggttttttatttacaatatatccccacataatccccacaatttaattgttttagaataaggagaaacaagacatgattacctcaacactattttatatttttcttacatgctatttatgattgaataaattgtagattgacttcgaagtatttttagtcaacagtcaatcatctaaattaaaaagatctaataaaagtattatttatgccttctagatcttagataagaagtaaatattatttacagttaattgttataatatcttttagattcgttgaatagcaaggtgaaagactttcttgtttcatcttccattttctttttaagtcttgactagcaaacttaaccttatcccctatcttcatatttagtttatccattacattcatcaatactttatgcttaggattttcatactcaaacatagataattgctgggtttgatctttgctaattcccataagaatcacacctgcctttttataactatagccttctttatatatagattgtaatgctgcttgagcatacttatttaactcaaatgtagatgatgtaggaaatggtaatttaaccgttttatagccactgtactgaggcaaatcctgtctgaatctgttggtataaataaagacttgaatcaattcacaattacttttttgttttcttaatttaactgcagctaatgatgcaaaagaagaaacacgttcacgcaattcattcttcgttttcatcattatgtcaaaacttcgtgttgttgcgatgttttgtttgggtttgatatcttcgaaattaattgttggctcaccctctaaatcctttttaagccttaaccctactactgtaaaatactttttaacgtacgtatcacttaattgagtaaattggtatgcatttgtaacaccaattgattgtaatctttttgaaaactgcctacctatgccccaaacatcttctattttagtccatttaagcgctttaattctcttttcttcagaatctataatataataattttttgtgcgttcagggtactttttagcaatcttattagccacctttgctagtgcttttgttggtgcgaaacctacactgacaggaatcccaactccttttttcacaattcgatgcatctccaaacctattgcatctaagtttgcatacttatgaccatgaaacttaaggaaagcctcatctattgagtaaatctctacatcaggagaaaatgtgcttaaaagcatcattactctattagataagtcaccatataaagtataattagaagaacatactacaatgccatgttgcttaaccatatcttttatttggaaaataggaacacccatttttacacccaatgctttactttcattagaacgcgcaacaacgcaaccatcattgttacttaaaacaacaataggcttgtttctaaggctaggcttaaacactcgttcacagctagcataaaaattgttacagtcaattagagcatacatgttatctccttttacgatggtattttaaggtatttattacgattccccatatttgaaaggattcattttctgtaatctgaatgggtttgtaattatcattttccggcattaaccaaacgcaatccttttctactctcagtcgtttcaaggtaaattcatcataaattagacaaactgctatatctccatcctctttctccgcagaattaaaacactaatacttgctaatcagtgcgttagtattttttatttgcaatatatccccacattatccccacaatccaactaaatagaatcaaattcatattaaaagagtaaaacccaagttcaaataataagtacgtctcgaatattattacccctgctcccttctatttaaataattaacccttaaatactttttctagttacatcatcagttgcaattctgcaaagaccgcaatgtttgcagaattgcaaagtatatccgttggaacacagaatttaaatgtatttttaaaaagaaaaaaaaagaaagcactgcaaattgaggaaagaatgaagggaaatggagaaaagaatgactgactggaagtgaataatgaactctaaatttgcttgatttttttatcttacaattaaatactcttcgttagaataacaaccccaaacaccgaagtaaaaaatggaatttttatgaaattttgtatgaggagcgatgtggcgttattgcggcaaatgaacagcagcctcaggatgggaaaagaacggagtttacggagtttacggagtttacgaagtgatatggaatactgatagtgttgcacgttaagaaaaacaaaagacagcatagcgttccttgatttaatgcaaagtgataacggagtaaacccaactgctggtcataggagcaaccgctgaattaacaaggagcgacagacatagcactgctcaattgaatgtaccggagtttacggagtgaaatgagatgaagctgtgttctggatgtagtagctcctacgaacgcaggaagagaacgtgtggagatgatgaacgaacaacttaaaataacaactgcttattttcaagctgttgttattttagtgctgtgaagtgtctgtggaatgaaaggaaggaagaatgactgactggaacagcatcatttaacaaagtgaacgaccaaagtgagaacgcttgattgcctttatttcattggtatattgctgctacaaccaatataattagttaacagcataattccacaggcaatagctcctacaataaaattataaaatacattttctgttgtagacttactttttaatgcctcattatcaaacataagtctcccaatgtaaccaaataataagcaaaaaagagggagcgttattaaactaaattcaaatttttcaaaaccactcatagtattagttaaaattacgtttttaaaaaggaatattgctcccaatatgagcaaacccaataaaaggtttaatcacaattcgttccttaagaaatgagtttttatttttaaaattgaaacactcaattaaattgattatttcactttaaatgatctcaaatgacttacagttatctaaagttataaagcaagatgggttaattatacagttttaatcgatagaattaatccttaatacaacgaacagaaaaatcaccccagttatatatcgatacttctccaaaccatttatagccataatacaaggatcgaacgtaagcattgttaaaattttcagtagaactccacgataaacttacctccaagaaggattccactcttctcttgcattgtgatttattctaaccacatttgttccgtctgaattcattgtataaattgaacttccaccgtccttgtccttacttgatatgaatactactttagcaccatcaggagaccaagaggcgcggcctgtgtacgtagggttagtaccgtttgtgaaattggtgattttgatttcatttgacccatcagagttcatagtgtatacgtgggcgatatcgtttacttctgactcaaatagaacttttataccatttggagaaaattttggattactttctcctcttacgttatgatttattctaaccaaatttgttccatctgattttatcgtataaattgcacttccgccatcgttatccttacttgatatgaaaattattttagttccgtctggcgaccaggaagcttcacctgtccaaagtggattagtaccatttgtgaaattagtaagtttgatttcatttgtcccatcagtattcatagtgtacaaatgagcgatatcgttgacttctgatgaaaatagaattttagtactgttgggagaaaatttgggattgctttctcctcttgtactatgatttattctaaccacatttgttccgtctgaattcatcgtataaattgaacttccaccatccttgtctttagttgatatgaaaattatttttgttccgtcaggagaccaagaagcgttgcctgtgtacgtcgggttaataccgtttgtgaaattggtgattttgatttcatttgacccatcagagttcatagtgtataggtgggcgatatcgtttacttctgattcaaatagaattttattactgttagctgatgatgtagataaggtaacactaaattcattagaatacgccactgcattacctactgcattataagatattattctgtacgtgtacgttgaattagacgccaaactattatccttgtagttataaacattagtacctacggaaccaatttcagtgaaattaccagaacctgtttttctttcaattttaaatcctgtttcatctgaagaattatctgtccaatttaatgaaacctgagtgctgctggttaagttacctgttaatcctgtgggagctgtaggaacttttgcagatgaggatgaacagaagaaatcataagtaagattagtcaacgaataattttcctggtaaagaagttgaccattataaaattgaattacagtcatttgagagccagtagaattaatgctgaatttaaatgattctttatcgtttacaccaccatcaatatctaaccataattcagtagtagtgtttttgacaattgtaacaatataactgtttccattagaggaatttgatcctttactaattttagaacagatcatctgattgttatttgcagtttcaataactacagtgtgaaggaaaacatcttcatctttaaacccccaatagtcatttcctgtaggatcagaattttgatttttccaaaaagtattttgatatttttccaaaaaggtttgagaatccccgacaggttcagtattagtactacaacctagaaacaaaacaaaaactaacactaaaattaagatatttttcataacatttaaagttgtaaactaattagtgatttttttaaagaattgacttacagttatataaagttaatacagtaggatgaattaataatgcgtctttattcatttaggaaaacaacttattaacaatcagattagtatgggaggctatcggaggtgaaaataacatctgggggttattgctgggagtggtctaccctacctttcacacagaaaaataaagaaattataacccagcaggttatatttttgatagaataacctgtttcatgataagagctttgggagataaaaaagactagttaatgccatatattatttttggatccaacattttgatttcctatagaaaggaagaaattatgggtggtgggtatacaaatcagattcatcacaaatttttaaataaaatttgaagataaaaaaagtcccaccgaagcaggactaaagattttcatctacggcatatagccttattgtgataagattaaagattagaagttttaatcaattacaaatctaattataaaataattagtgtgcaatgtggaaaaccgtaatgttgctaattactttagctgtatttttgaaaattcctacaaaaaaaggattgatatggcaaaaatattaggcttagatttaggaacaaattcgattggctgggcgattgtagataaagatggcagtgatttttcattagtagatcaaggggttaggatatttccagaaggagtcaaaactgaaaaaggaattgaaagttcaaaagctgccgaacgaactgcctatagaaatgccagaaaaattaagtttcgaagaaaattaaggaagtatgagacacttagagtactttctgaaaataatatgtgccctttatctgtggaagaaattatagagtggagaaaatcaggctttaaaaaatacccattaaatccagaattcattagttggttgcggactgatgatgataaaaacattaacccttattattttagagataaatcaagtaaacaaaaagcaaccttattagaacttggaagagccttttatcatattgcacaacgcagaggctttttaagtaaccgattagatcaatcgttagaaggtattatcgaacagcatagatctggtttagaagatattattgataatgcttcgtcttttactgaacttcaaattgaattaacagattattttcaagatcgtgatttaattgagcgtaaagcatctaatttggatgaaggtgaaaaaaagttaaaaacaacctataattcatttcttaaaattattactgacaacatcaaagattttgacaaaaccaagtctttacttattgaacgtttaaataagaaagaggacttaggagttgtaaaacaaaaaattggcgaaatttcattggcaatgcaatctggtaattttacaactttaggacaatatttctttagcttatataataaaggtaaaattagaaatcaatatacagcacgagaggagcattatctttctgaatttgaaatcatttgtttggcgcaaggaattgaaggtattatagcctctgaaaaacttcccgagaaaaaatattttggactagctaaagaactttatagagcaatcttttttcaaaggccactaaagtctcaaaaagcctccatcggtaaatgtacttttgaaaaaaacaagtctcgatgtgctgtttcacatcccgattttgaggaatatcgaatgctgcaatatatcaatacaataaagataaaaactccaaatgatgagcgtttacgctttctttctaatgcggaaagattaaaaatcatgcctaagtttttacgaaaaaaagataactttaattttgaagaattagtaaaagaattagtccctagcgaaagtaaatacgccttttataaatcatcatctgccccaacggctaattacttatttaatttcaatttaaattcctctgttagtggctgtgtagtttctgcctctttcaaaaatgttttgggcgaagattggaaaactaaagagtatagctatcaaactattaataaaaaagcagaaattgtaacaagaaatgttgactataatgatttgtggcatttgatttcagtttctacatctgctttgtacttgcaagaatttgctaaagacaaattgaaattagacgacaaaagagcaatttcgttcagtaaaataaaattaaagaaagactttgccagtttgagtttaaaagcaatcaataagatcaatccttttttaagagaaggtttattgtattctcatgctgtttttatggcaaatattgagaatattgtagatgtcgatatttggaacgatcctaatgacaggaaatatattcaaattaaaattgccgaattaattgccacaaattcctttgacaataatttattagatatcataaatgatcttattaaggaatgtaaaactgaaggatgttattattcaaaagaagcggaagctacttataaatcagatttagataaaaagctaagttcctttttaagatcaaataaaattgaagaccaaaaggaagctattacaaatgagctactcccactttttattgaacaacttaagaaatatgagttcattacgatcaaacgattagacgagaaagtattcggttttttaaatggtcaaaatgatgatggtcaagttttctgtaacaataagaataagcttaaaaagctatatcacccttcggatattgatgtttttagaaaagaaataacaaaagatggaaatggaaatgaaaaattagttttaggaagtccattaatttcatctattaaaaacccaatggcgatgcgtgccttacatcagttaagaaaagtgctgaacgctttaattattgaaggacaagttgatgaaaaaacaagaattcatatcgaaatggcacgagaattaaacgtcgctaataaacgaaaaggaattcaggattatcaaagaggtatagaaaaaaataggaaagagtatattgaagagataaaaaaagattacaaagcagcaagcggtctagatattgaacctactgaagatgacattttacgatatcaattatggattgagcaggatagaaaaacaatttatgaagaggaatgtacaaatattaggattagtcaaattataggtagcgatccagactatgatatagaacatactattccaagaagcagatctctggataattcaaaaatgaacaaaacgttatgtagcaagttgtacaatcgtaagattaaaaagaataaaatacccgttgaattaagtaattatagtgatattttggatagaattaaaccttggcaaaagaaatatttggccttagagtatgaaataataagtgtctcaagagccattaaagcagcgactactaaggaacaaaaagacagaaaaattagattgcgccataagctgaatttgcaaaaggactatttcaaaggaaaacatgaacgttttacctatactgagccaaaagtaggtttcaaaaacagtcaaatcccagatgcaggaattatcacaaaatatgccaacgactatttaaaatcgtatttcgggagagttgaagcggtaaaaggaggaatggttgcggaatttagaaaagcctgggggatccaggaaagttatattaaagacggtaagaaatattacgaagtcaaagattgtagtaaacacacccaccattgtattgatgccattactattgcttgtatgactaaagacaaatacgatgtcatggcacatgcttgggatttagaggatgacgtcgagaaaaatcaagataagttaatgaagtctgttctcgaacaatctaagccatggaaaacctttaccgaagatttaaaaaagattgaggacgaaatattagtttcccatcatacaccagataatataaagaaacaatctaaaaaaattatcagaattaggggtaaaaaacaatttgttgctgaaatggaaattgatgtaaacgggaaaaaaattccaaaaacagacagtaataacaaaattatttttaagaagggtttcaagggagaaaaaatagcaagatttcaacaaggagataccattcggggttctttgcatcaagatagtatttatggagcaattaaaaacccattaaataatgaagaaattcgatatgtaatacggaaagatttagaaagtattaaaacttcggatgtagaatatattgttgatgagatagtaaaacaaaaagtaaaagaagctattttaaacaaagttttattgctttcatcaaatgctcaacagcaaaacaaatttgccgacaatcaaaaagtttggatgaatgaagaaaaaggaattgcaataaacaaagttcgtttgtatgcaaattcagtgaaaaatcctttgcatgtaaaggaacacgctttgctttcgaaatcaaagcaggagcataagcaaaaagtatatgctcaaaatgacgagaattattgtatggctatttacgaaaaggatggtagaaaagattttgaattaatcaataatttcaatttagcaaaattggaaaaacaaggaaaaggatattattctttatttaaagaaaaaacaaataacggaaaaacaattcaaatgcctattgcaaaaaggaataatcgtgatttagttttgaaaagagggcaacaagtcattttctatgatctcggaactgaaaacccggatgatgtaaatgacttaattgatctgaaaggtagaatttatattatagaagggttatcaattcaacgaattgtccgaccatctggaaaagttgatgaatatgggattataatgtttcgatattttaaagaagctagaaaagccgatgacttaaagagtgataaatataagccagatggcgttttcaaattggaggaaataaaaccgaccagaaaaatgaatcataaccaatttactgcttttgtagaaggaattgatttcaaagtcatgccatctggtaaatttgaaaagttgtaattagattaaagattagaaaaaacgatattgttgataaatttcatgtacagggaatacatgttgtggtttgattaaagattataaaaaacgatatttactatcaattcccaatctaacaaagcatagttgtggtttgattaaagattagaaaaaacgatattcgccttaaagttatcgccagtaacttctatgttgtggtttgattaaagattagacaaaagttggaattacaaaagtcccgataaaactaaatacatattcgataaaaataacaatacttgaaacgataaccaatcaaggaaacattggacttgtaaaaaagagtatttatataagttagacgtattacaggagtacgaagttgattggaaagaattttctaaaataggagattctatttttaaatattgtttaattaaaatggatataggataagataaataaacaacgaacgcacaaaactagcaacgatagatctgggcaataggcttaatggaaagttggttttgtatttgggacgctttagtaaatcccaaaatagagcttaatttaatcccagacccgctgcagtaacagaacgttgtgtgctatagtaatgaaaaaaaccgaaaacagaaaaatgaatttagacactaaaattgcattaataacaggagcaaatacaggaattggaaatgctctaacggaaaaactaattgctgaaaattattttgtaattggaacatctagaaatgggaaaattgaaagtattaattctgaaaacttatttgttgtagagttagatttgacaaaccaaaagtcgattgaaaatgcgaacaaaataattaggaataaattcaagggaattgatattttagtgaataatgcaggaattggtccagatttaggcaaacgggaaccagatttagaaagtttgagattgacttttgaaacgaacgttttcggtcttgttaactttactgaaactgttttagatttcgtaaatgaaaatgggaaaattttaaatatttcctccattatggcaacattgaatctgatttcaaaaatggattcgacagcatatagaatgtcgaaagctgctttaaacatgtatacaaaaactttatctgcaagattaaaagatagaaacatagatgtgaattcaattcatcctggttgggtaaacacaagattatcaagagaaggcgcgccattaacaacagagttttcagcaaacggaatatttaaactaatagaaaccaaaatggaaactggaactttttggaacgctgaattacaagaaaaaatgttgtggtaataaaaaatacggccaagctaccgcctgcatgaatttagtcatagattgagtcaatcggctcaccattatgctgtcggcagaattgataagcaaggttctaaatgctgttctcaacattttcccagcttctcccgctctacggaattcggcaccgttctctcgcgttctatacaacgcaggataagttgcaattcttttcgcatcgataccgcctttttctctggccaaatgcccgtctttggttttgtaaaaagtaatatctccgatagtacctttcaatttgattataccgttctgtattgccataatttctaaaatttaaattaatagttgtttcaaatttcctcaatcatcctcctgttgcaaagctttcgattgatttcgaaaacaaagattacacttaaactaataatacagaacaaggcattgttccttatgtcttgcggtggcttaaatgacctttttaaacataaatatcactcaaaaaaggaaagggaatattcgctaatcatatcatctcacaagaatcaacagagtagcaatacaaaagccactcaaagcctactcaaagttatagaaagtgcatgcaaatcgaaaacaagagcttgtgtatctacctgaaggacatactaggcattatagggaagagttaccggcaaagcaagagtattgcaaacaatacctaaagaactaaacaagctttaaaacaaattggcggacatagtcaatttctgctcgtagactagtataaaacacgaacaagtagcatcctttattattggacagaaacctttcttaagttgtttaaattttatttaacaaataattcctgaaaaaaattcgttaatcttatacttttaataccttagctctgaaacattatgccttaattatgaagcatctaccagaatgtcaacttattttgaataaacttaaaattgacttgccggcaaatctgttttatcacactattcaccatactcttgatgtatatcgatgcgctgaaagtattgcgaaagaagaaggcataagttcttctgatttaaaactgcttcttgttgctgtcatttatcatgatgctggatatcttaaacaaaataaagatcacgaagagttatcctgtgccatggcccgagaacatctatctctttataaatacactaaaaaagaaattgatgttatttgtgctattataatggccacaaaaatacctcaacgaccgaaaacccatttagaagaaatcatttgcgacgctgacttgaattatttaggtcgtgatgatttttttagtattggagaatatctatataatgaaatgcttgcttttggttatatcaacaacagggagcaatggaacaaagttcagttggattatatgcaacagcataattattttacagccacagctattaaacacaaccaatcgcgaaaaaataaaaatttaaaagaattacaatcactgataaaaaaatatcaataatgggaacgaatactagaaaaaatataattgatgtaattacgactattactggcatattgttttgtggcttcgcactgaaaggatttttggtgcctaatcagtttttcgatggtggggtaaccggaatctccttgttacttcatgaattataccattggaatataggctacgtaattgttgcagtcaatatcccttttattattatgggtgcattccaggtaaacaaaacgtttgcattaagaactttgcttgctgtcgtaggtctggcgctttgccttcattttattccctatccacagataacatccgataaattgcttgtttccatttttggtggtgtattcatgggattaggtgttgggctggccattagaggtggttgtgcacttgatggtattgaagtactggctttatatacaggaaaacggatcagttttacgatcagtgaaattatattggggataaatataatcatctttttaatcgcagccgtgaagttaggattacctgtagcgctatattctattttaacttattataccgcttcccgtactatcaactttgtcattgaaggaatcgaagaatatactggagtcaccattatttctagtgaaagtaaaaaaataaaggagaaactagtattggatttaggacgtggtatcacagtttacaaaggagaaagaggcttcatgaaagaaaattttgacacaagtcagcccgtagatatcgtttttaccgttgtcacgcgaatggaattaaaacgccttaaaaatatggtagaagatatagaccctaaagcttttgtctttactagtataattaaagaagcggctggaggtatccttaaacgcagagctagacattaaaaaattctgctattcgacaacctcgtaagtagttacaggtttttctttatttttcaaattaaattcaccattgtgtttacatataaacgattcctgtgtttgcaaatacacttcttccgaaataataatttgccctgctttagcaatggtttgaagacgttgggcaacattgacagcgtcaccaattacagtataatctagccttcttaacgaaaccgaaccaatatttccagataccatttctcctgaattgatgccaattgatatttcgggcttgtatgtttgcccccctttcaacgctacttcaatagagctgatttgttctttgacggcaagtgccacgtctatagccctgtccagatggtattcgcccctaaaaaccgccatgactgcatctcccataaacttatcgacatgccccccctgagcgatgatttcctttacgattttgtcaaaaatcccatttaacaacgcaacaacctcatttgccggaatcttttcagtaatagatgtaaatccgcaaacgtctataaacataactgttgcttccagtaattcgttcttcagcagactgctttcaaactccttattagtcataaaacttaatacattcgaatccacgtacatttttagaatattattttccttgatcgctttaatcgtttcccgcaattgtttaacatggagaatcgtcttttccatggtcaagtcgagatcatcaaaatcgaccggcttgatcacaaagtcaaaagcgcccctgttcatggctgtcctgatattctgcatatctccataggccgacaccataatggctttcaacaaagagttggcttcaggcaacctactaagtaaagtaagcccgtccatcaccggcatattaatatcactaagaatgatatcaagatcagggtgttcatgcactttctgaagtgcttcctcaccgtttctggcaaagatgaattcgtatttgttttcgcgaatttttcttctaaatttctgtttgactagcatttctaagtctgcttcatcatctactacaagtattttagccattattccagaaggtgtttaagtttttctttcaataaattaaaatctaaaggcttggtcaaaaaatcgtttgcaccatttttatcggcctgtcttctattttcatcatcgccatatgctgtaatcatcatcacaacaggttcgggttcgtggtaatttaagcgaatttcagacaaaagttcaataccgctcattcccggcatattaatatctgagagtattaacacgatttgcgaatgtccctttttcataaaatcaagtgcttcctcgcctgaaagagcaaaatcaaattcaaattcgttcgcgcgtaattccttcctgaaacgctgcaagaaaagcggttgtacatctgcttcatcatcaactactaatattttcatcatgtgttcgtcttaattaatttatcaatagtctttttcaatcattaacattattaaagataagatataaaaaagttccatttatcctaaaggcaagcaaatagtaaaaatagtgtattccttttctttactatctatagcaattgttccaccatgagcgtttactatgatatcataacttattgacaagcctaatcccgttccttcacctgcaggctttgttgtgaaaaatggctccatgattttgtctttgatattctctggtattcccattccgttgtctttaactacaatttcaattaccttgcctttaaggacagtagtgacagtaataaggggtttataatccttgctcgccattttctgtttatgatgagtcgcataaaatgcattggtaaacaaattaagcagcactctcccaatatcttggggaatcacgtttatcttgggtaaactctcctcaaaactggttagtaactccgtattaaagcttttgtctttagctcggagtccatgataggccaagcgcaggtattcatcggcaatcacattgatattagtaggctctttaacattattaccaacccgactttgtttcaacattcctttcacgataccgtcagctctcttgccgtgataattgattttttccaggttttgtttgatgtcttttgcaatggaaagtgcttcctccttttctcctttaatcatttcctcttccatttcgtcaattaactccatgctcacttctgagaaattattgacgaagttcaacgggttctggatttcatgcgcgatacctgcagtaagttcacccaatgaagccattttctcagattgaatgagcttggattgggtggattttaaatcttctatcgactgtttcaaagatgcggtacgttcttgaacttgcttttccagagtttcattttgtaaggataaaatagactctttttcttttgaaagcttttgcacccgctctagactaagtcttaactcttgactgcgtttaccaaaggaataacctaaatatacggctaaaattatcgggttaaccataaagacaaaaggaataaacgctattatatctatctgtaggaaaccaatcatctccaatacaattaaagaccaatatacaagacaaataaaactagagcttgtaaagaggatactacctactttatttttgttccaggattttacagctattcttataatggtcatatatccaagaattccccaaacgggacttaaaatgtcaggatcatatagaaagtaacaacctatagctacgaggcctaaaaaacttacaattttataaacaatatctaaaggctgctcgaaaatcttgtataaacaatacaatgcaataatccaggaaattacaatacaagcaccatagcagaatgtaatccaaaatggaataccgggataaacactaacccagattacaccgataacaaatagaattaaaaaaaatatagatatcgcaaagtatccattgattttttcacttgaaaaaaagagaaaaaaggataagaaaataataaacatcaaaatagttattcctaaagcgatataatagttatttataaattgttgatgaaaatagatccgattattttttataatatctctggagtttgcattgctaagtgttgaggccgcaattcttatgaaaccattggtagtagcatattttgggaatttatattgtgcattcacatagcgtactgccaaaatctgttcttttcctttttctagcggtaattcaagtgtttgttgataagggttattgtagataattttatctatatctgaacttactttccctaattggtgaattaacctcccatctaaataaatttcagaagcgcctaattgataaatatttaaaacaatagctttgtttaagctactacccgctttaatgcacattctaaaccagacaatttcaccacggtttgcaattgcattttcaccattaggcatgtttaaattataagacaaagaggactccttccaggatgaatcgtcaaacgaagggttcgcccattgcatgttatctcctttttgataacgccagttattttctaaagtcaaccattgatttgctaagttgctgtcagtgacaacacatgctttttcggattgactgaaagtggcgagcgaaaacaatagagtccaaatataaagaatgtacttcatgaaatttatgaatttaatgttagtgaaataataaattcagttccttcgttttctattgtgtttactttcaattcgccaccatgcgcattgacgatatcatagctcatagataatcctaaacccgttccctgacctgttggttttgtagtgaaaaaaggttggaatattttgtccaacaccttttgtggaataccattaccgttatctattacgcttacttttacagtatcgccaacttttttggtgcttactgtaacggttggttcaaaactgtttactatttccccttcggagattaggatacttttctttttttcattggtagcataaaacgcattggtaataagatttaaaatcactcttcctatatcctgtggaataatatcgatattaccaatggtttcatcataagtggttactaaagtcgcattaaacgatttgtctttggcacgtagtccatgatatgccaatcgtaaatactcatcggctaaagcattgatatcagttggttctttgacaccagaactactgcggctgtgttgcaacatgccttttacaatagcatcggcgcgtttaccatgatgatttattttatcgaggtttcgtttaatgaaatccgcaatggcaaagccttcatctacgtcaccttttttgaattcttctttcatttcgtcaatcaactcattactcacttcactaaaattagtcacaaagttcaacggattttgaatttcatgggcaataccagctgttaattcacccaatgatgccattttttcagattgtatcaattgcgattgggtggatttaagttcatccaatgctttttgtagttcgtctttctggcttagaagttcagcagtacgttctgccacttgaatttctaatttttcttttaacatttctgattgttggaagtctttttctctttcgatggcttttaactgttcactttcaatgtctttgcgttgttttctgtttatgaaaaacatagcaaaaaaccaaatgattgaaaaagcaattccagtttcaaaataattactcaataccgtataaaaattaatatcgatgaattcagttgaatctttaagaaaatttacaattacaaaaggcagaatggaatatataatagatttaactggcttaaactcgtttagagtaagactaaaatatagtaaacttatcaatataaaatgggctatccaacctaataccccttcgcttgcatcaaaaatgattgatgtaatcaatagtactatcgaaatgtaaaatccgacaaacaaatacttatcaattttaggcaataatattttgcttttcaatgtttttcttaaaaagaagaaaactataatcaataaaacatattctaagttcataagagcaaaaatttaattaaaattacatcatataggtaaagttatgcaaaattctgttccctagccctctttagtctccattttcaagtccccgccatgtgctttcacaatatcataacttaaagacaaccataaaccagttccttgaattacaaaaaaatttaatgtctgctaaataaacataattatttataaaagcatttttactgatatagcatctattgtattttattcttcttctttcacactttctaaaccatacaaaatggcagctactatatccggtgtaagcaaaacatcttcttcattttaatcaccatctaattcagcaaaactttcaaaaccatctgttacatctaagatgtgtgctaattcttcttctgttagttcatctgcaaagatcatttcaaatgttacttgctgcatgtggtcagcatttttaatataactcttaaggtttttaattcctttttcaactgctacaatctagtcttatatgttcatactcatttttattctctgttatttaatttgttgatagcgttgttaattgccgagtataaatgtctaaaattcttatatcggcagaggttatttttttccatcatttcaacagctaaaaaaccattcttaaatataaactcttgctgaagacttttaaatagctatacaaatgcttatggtttgtatatttcatagcagaaaaaccaacccgtggtaagcgacatcttcctttttagctactttaccgctttgacatacattttataaaaaacttaacaaagtccgtataaggctccgtattgacggaaagaaatggatacccacctaccgccagaaaacagaaacaacttttaagcttccttaacttacaatgaaccgaataattattgacagatacagtcactccattaggaaatcaataatcaaaataaattgcttcctgttttgagcaaacagaaaagtagactgaagaaagctagttaatcaattgtgccgttactatttaaatagccaaaaaacataataaatctgattaattacgcctacttttatactagctacataaataatccaaaattaaccattggctattcgtaaaaacaactgcccctttttaataaaaaaaccccttgaaaaaagtttctttcaaggggtttttaattacggtctcctagcatttattctccaggatggtactttcgttcgctctgtttttctatatcttctttgtaaaaaagcacgtctttgaattgccctttttgatacatttccgactgatcattaaaatgttttgatttaggatcactactatttcccccagccaataaagacttagcttt

SEQ ID NO: 3107 - DNA, 24431 bp, synthetic construct
  misc_feature 1..24431: note = Synthetic
  source 1..24431: mol_type = other DNA
gtatctcttcttcatcgtcaaaaaccagcatatagtcagtctttcctttaaatacaagcgaaggtttgatattgaacgactcaataattgaatcggtcaaatcagtttcttccactatgtctattggaaaattcaatgaaagtaaattaccttctcgggttacaattaattctccacttctaggagagaaaaatgaaataatagtaccattatggttttcgtagttgaataacacaaaagccgctgctaatgtggcatgcccacataaatcgacttcaacagttggagtaaaccatctaatttcataatgattgtctttttttacataaaaagcggtttcggccaaattgttctcggcagcgattttttgcatgatactgtcaggtagccattcggttaaagggcatattgcagctggatttcctgaaaaaacttcttgggtaaaagcatcaatttgatagattttcatagctgaattgttgtttttgattagtcctaaggggggcaaatgttttgatttataaaaaatcctctttttaaattggattaaaaaaaaggatttaaaaagaatcttattttattattttataaaacagcttttattttttcgataatattttcatattcctcatctgtaagggttactctgttaggaaacatttcaaaaacacttccaaatccatatccatcggcatatttagggacaatatgaaaatgtaaatgtgataatttatccgaaaaggagccgtaatttattttatcaggattgaacactttagcaatggctttcgaggtagtagctacatcttccataagcgcattacgttgttcgtcagtaagttcatgaaattcaactccatgatctttgtatacaacatttaatcgtccagtataagattgctctttaaaaataaataattctgatacttttaaatcagtaattttaatcattaaattatctaacgcttcgtttttttgacagtacgaacattctgaaacaggtgttggtataattagggttaattttattaatttgtgttagtctataaacaaatctaacgatagtattttatttatccaaatagcctttttcttttaagcgagccaatactttttcatcaatttctctaccccaattttgaccagctttcattgattcttgcatgactaaaggcattgtgttaatcatttttttaccaattggggagttgtagaaagtaattaattgatcgatatcagtttcagtgtaatatttatcataaacgggtaaaattaaattctcgatatcattagcattgatttcttttctaaaattatcccaaaattcttgtttaacagtggaataggaatttttaaaactactcatcatttgatccataacttacatgcctaattttcctgagccagttaattctaaaagatgtttaatcttttctctttttgagttatcttgagcattcgccaaaaaggatattaatacgaagctagccattaaaagtgtttttttcatgtttgttgaagttaattatttagaaaagtaaatgtaggattatttttgtattaaaataaatttgatgtaaaaaaaagcgttccctttcgagaacgcttttcatattgtagaactaaaattagttgttttcaatccattttctggcatttacaaatgcttcatgccatggagaaacctcgtctttttgacctctttctgggtagtgtgcccagttccaaggatagtaagaacgctcaatgtgtggcatcatcactaagtgacgacctgttttatcacacatcatagccgtgttgaaatcagaaccattagggttagctggatagctgttgtaaccgtatttaccaacaatttgatatttttcttctgagtaaggtaagttgaatttaccttctccgtgtgatacccaaactcctaaagtagatcctgctaatgaagataacattacagagttattctcttggatagtaactgatgtaaaaccgctttcgtgtttgtgagagttgttatgttgcatttttccgtgtacttcgtgttccggattaattaattctaattccatgaacaattgacatccattgcagattccaacagaaagtgtgtcttcgcgtttaaagaagttctctaaagccgttttcgctttttcgttgtataagaaagctccagcccaacctttggcagaacctaaaacatccgagttagagaaacctccaacagctccgatgaattgaatatcttctaaagtttcacgacccgaaatcaaatcggtcatgtgaacgtcttttacatcaaaaccagccatatacatagcattagctacttcacgctcagagttcgatcctttttcacggataatcgctgcttttggtcttggacctgcaggaatctctgcttttttacctgtaaaatgagcaggaaaagtaaagtttaaagcttggttcttatagttgtcgtaacgctctttagctgttccgtttttagattgtttttgatctaataaatacgatgttttgtaccaaatatctctgtatttagcaatgtctaattggcaagggccaaagtttaaagtagcctcgtttgttactgttcctaatttgtagaaagaaactccgctagcatttaatttactttctaaagcagcgtcgtctttcgcctggaaaacaataccgatgttttctgcaaataagtatttgataatgtctttttcttcaaaaacagagaagtcaatttttgctcctaagtttacatcagcaaaacacatttctaataaagtagtgattaaaccaccacttccaatatcgtgtccagccacaatttgacggtcattaattaattcctgaaccgtgttgaatgcttttttgaagaatgcagcgtccttaatcgttggaacttcatttccaattttgttcaatgtttgagcaaaagaagaacctcctaatttaaagtcgtcctgagaaaggttgatatagtaaatagaacctgcatttttttgtaaaaccggctcaactacttttgtgatgttagtacagttaccagcagccgaaataattacagttcctggagcaattacttcgtcatttggatatttttgtttcatcgaaagcgaatcctttccagttgggatattgattcctaattcgattgcaaagtcagaacaagcttgaaccgcttcgtataaacgagcatcttcaccttcatttttacaagcccacatccagttagccgataatgaaacacctttgataccgtctttaattggagcccagataatgtttgataaagactcggcaatagcagtacggcttccagcagcaggatctactaaggcagcgataggagagtgaccaatagaagtggcgataccttcttttccattataatccaaagccataaccccaacgttgtttaatggtaattgtaatggtccggcacattgttgttttgccactcttccgcttacacaacggtccactttgttagttaaccagtctttacaagctactgcttctaattgcaatacttcttctaaatatttagcaatattgtttttatcgtaagctaattcagcgtagctataggctactgaattatcagtgattacggttttaggagaacttccaaagaaatcttccaaagcataatccatcggtttttcacccgtagtttttgattcaaaagtaaaacggtggtcaccggttacatcacctacctgatacattggagcacgctctctttcggcaattctttgtaaagtatcgatatctttttgagcgataactaatcccattctttcctgagattcgttaccaataatttctttagcagaaagagtagggtcacctacaggtaatttgtctaagtcgattaaacctcctgtttcttccactaattccgaaagacagtttaagtgtccaccagcaccgtgatcgtgaatagaaacgattgggttgctatcgctttctactaatccacgaatggcattagcagcacgtttttgcatttcagggttagaacgttggatggcatttaattcaattcccgaaccaaaagctccagtatctgcagaagaaaccgcagctccacccattccaattctatagttttctccaccaaggataacaattttatcaccttcttgtggtttgtgtttgatagcttggtctaattttccgtaaccaataccaccagcttgcatgattactttatcgtaacctacttttctattattttcttcatgttcgaaagttaaaacagaacccgtaataagcggttgcccaaatttatttccaaaatcagaagctccgtttgaagctttaattaagatatccattggtgtttggtatagccattgcctttcgtccatggccttttcccaaggtctttcttgttccaggcgagagtaagaagtcatataaaccgcagttccggctaatggaagagaaccttgtcctccagctaaacggtcacgaatttctcctcctgaacctgttgcagcaccattgaaaggttctacagttgtagggaagttgtgtgtttctgcttttaacgaaattactgaatcaaattcttttgtttcgtaaaaatcaggtttgtcagcgcttttaggagcaaactgagttacttttggtccttttaaaaaggctacgttatctttgtaagccgaaacgatatcgttagggttttcctgagatgttttcttgattaatttaaaaagagaagtttctttttcttcaccgtcaatgataaaagttccattgaaaattttgtgacgacagtgctccgagttggcctgagagaaagcaaaaatttcagaatccgttaattttcttcctaatttggtagccaaattattcaggtattctacttcttcttcgcttaaagctaaaccttcctgtttgttgtaagtatcaatatcatcaatttccaagataggttccggttgaatattgatagtaaaaatatcctgatttaattcagtgtatttttgcgaaagcattgggtcaaaatcattgaaatcttcagaagctctgaaaaattcttcaatacgaatgattcctgaaatacccatattttgagtgatttctactgcattggtactccaaggcgtaatcattgttgcacgtggaccaacaaaaaaatccgtcaatacggatttctctattttagttgcattggcaaaaagccagtttagtttagaaatatcttgagccgaaatttcgccttgagtttgtacagcaaaaattgcgttgctttggttttcaaagaaatgaatcatcgtaaaagtataagtttgttaaattaacgctgcaaatttaggttaaaaaaacagtacgaacaagtgtaaaaaagactttttatggtagttgaaattagtgttcagattgtagatttcagaaagcagatgtgggtatttataaagtttttagagatttaaatacaaggtgttaacagcttaatggctatttaggaaaggttgtattttgataagcgcctaagtcaggaggtgaagttctggtttttccattaatatcgaaaggaattaaataaatcggattcccttttgcgaaagcggaagaagtattgtcaatatttagcttgttttttacaatgtcaaaaaagtgaggattttgattgattatgttgtttaggtaatggtttgtgtctccgaaattaaatagaggattggagctattggcttcctgttttaataagcaattgttgaattggtattcaaattgaactgtattatttttgtcaaaaatcaatgaattagtgtacgctccgtaaataatgcaattattaaaagttgcctgagttagatttgaaatttctggattgttggagcttttacgattacttagcgttagggtcgattgttgtggactattccaatagttgttaaatgtacaatgcgtaaactgatagtttccgccataaatacaggctaaggtagctttgccagcggtattaattacgatattttcgcctgtgattttagcgttttcagctaagattccataatgagaagaattgtaaatctggctgttttttatagaaaccgtgttgttgtcttgattgtcaattcgcaaacctattgttgcattcttaatggtaagatggttgatagtatggtttgtacttccacttcgaagccagatggttgaccattgtccgggaatactagcatacatagcttccagacggttgccttcaaagataatttcgttttccagttttgttgaggtcgaaacagtcccgttgcattgtaaacttgctgattgtggtacaattaagcctgagttagcatggaaataaactctaacgcctgcatcaaaaataacagttttaccttctggtacgcaagcatatccataaatcacatagggtttttgattggtaaaatgcagttcgtttccattgatagcgtcattttcgtccaaatagaatccgcttaattctttttcatcaaatgttactgtttcggtagcattatcattgaagcgttttggatagagaaaaacagcatcttttactagtgtgagtaatttgactttttgcaaattactaccactgtcaaactcaatttcatcagcatacaaaaaatctacaggattagaatccgaaatagttggtgtggtttctataaaaatatagagactgtccctagctaaaagagtaacattgttaaagattttgttgttttcgccttgcatgccatcaacggtcatgcggtatttagaattcagtcctttaccaagtttgatagagggtatgttaatatcatttttgcttttattgtacacttttagcatgtaagtactggagcttattgtagaaaaaacagtatctaaaaaaacagtatctctggaaaaaactaatttaccattgctgggtatagtagaaaaatcagtacgacaagcactgataagtagggttattccaagtataaataatagcgaaatgggacgcattgttttgtttttttgtaaaaatagaaaaaaacgtattgtcttagcgttaatttttaaaatggatgacacaataagctttggatttagcacaaagtatcttttcttttctttatttttacaatcgattaaaataaaacacatgacattcgataaagaaaagatattggaatactgtaatcgtatttctaaaaataccttaatggaaaccttaaatattgagtatgtggatgctggagaaggttttttgacagcaacaatgcctgttaattccagtgttcatcaacctatgggtttgttgcacggaggggctacggtagctttagccgaaagtgtgggtagtgcggcttcttttatatttgttaatccagaagtaagcgaggtacgcggaattgaaatttcggccaatcatttaaaatcgaaaagagagggagtggttacggctactgccaaaattattcatcaaggtgcgagcatccatttgtgggagattcgaattgttgatgaaagaaataatttgatttcgctttgtaaattgaccaatatggttttacctaaaagaaggaaaattaattaaagtaaaattcggttacgtagatttttaatacaatctttaatacacaactgtatgattgatttctttataaaaataaagcagcaacaagcgcaaaatttaccttttgttgtttatagaaagccttacaaagcagagttaagaggtttttttcaaaaaaatgatcatttgtattttgccgaaactttggatgaaactggatttgtttttgctccttttgacggcaatcaaatgattttgatgcccaaaaatcaatcggttatatgggaagcagatgttagttcattaacagaacaacaagctgttaaaatagaatcttcagaaaatcagaaagaaaaagaacgctttgagtcacttatccaaaaggctgttgaagctattaaaagaggtgatttgaaaaaggtagtattgtctagaaaagaaattttagaggttcctaattttgatttagtggctgcttttacccaattgattcaaaattttccaactgttttttgttattgctggtatcatcctaaaattggtttgtggatgggagcaactccagaacgcttgcttaaagcaagtagaaaaaagttttatacgatggcattagcaggaacacaaaattttgaaggcaggactgatgtgatttgggaatcaaaagaaattgaagagcaacaatttgtaactgattttattttagaaaatttaaaaggtttgacctctgaagttgctatttcaagtccgtataccgttcaagcaggtaatgtattgcatattaaaacagatatcgagggagtaatcaataaatcatcacatttaagtcaggtggtttctgtattgcatcctacaccagcggtttgcggtttgcctaaacaggaggctaaagattatattttagcaaatgaagcttatgatagagaatattacaccggctttttaggagaattgaataaaaaagattttacagagaaaaagcaaaaatcggatttgtatgttaatttgcgttgtatgcaaataaaagaaaagcaagcgcatttgtatatgggctgcggtattacaagagaaagtatagcagagaaggagtggaatgaaagtgtgaacaaatcctttacgatgaaaagtgtgctttgaagttaggagttagaagttagaggttagaagttagttgtttccatcatttaaaatttagaaaccatacgaaaattatcctctttggggtaaaaaatagatttagaatacagaaaaaagaaataatgaaattagatatactggcgtttggagcacatcctgatgatgtagagttaggttgtgcaggaaccattttaaaagaagtttccctaggaaaaaaagtagggattatagatttaacaaggggggaattaggtactcgtggatcagcggctataagagatgaagaagcaaaggctgctgctgctattttaggagtatcggttagggaaaatttagccatgcgtgatggtttttttgtgaatgacgaaaaacaccaacttgagattataaaaaggattcgaaaataccaacctgatattgttttgtgtaacgctattgatgatcgtcatatcgatcatgccaaagggagtaaattggtttcggatgcttgttttttatcaggcttgattaaaattgaaaccgaattagatggacagccgcaaaaagcttggagacccaagttagtttatcattacatccaatggaaaaatatcgaacctgattttgtggtagatattactggttttgcggataagaaaatagaatctattttagcctaccgttcgcagttttatgaccctaattctaccgaaccggagtcgcctattacttcaaaaaacttttctgagagcttgaattatcgttcgagggacttggggaggttagtaggtttagattatgctgaaggttttacagtagagaggtgtttggcagtcaatagtttagcggatttgttgtaattttttttaattttttttcaaaaaatgtttgcagaactcgatttctgttgtatctttgccaccgcaaacaagcaaacaaatggtggttgtagctcagctggttagagcatcggtttgtggtgccgagggtcgtgggttcgaaccccatcatccacccaaaattcaaaagcctcttcgaaagaagaggctttttttgtgccttttattttcgaggaatttttcaaaatttttgattttttttgaaagaatggatagctcgcgggctgtccgtacgaatctctatatcgaaaattataagtataaaaaaagtcccaccgaagcaggacttaagattttcatctacggcatatagccttattgtgataagattaaagattagaatagtttaatctgtcacaaacataagaaaaaagtttcagaaaacaaccattaaaaatgtatttttctgtagttttttatttatatatttatcattttgtaaataaaggaatataaaatggcaaaaatattaggattagatttaggaacaaactcgattggatgggcgattgtggataaagagggcaatgaattttcattggtagataaaggtgttagaatattttcagaaggagtaaaatctgaaaaaggaattgaaagttctcgtgctgctgaaagaacagcttacagaagtgcaagaaaaataaaataccgtagaaaattaaggaaatatgaaactctaaaaattctctctttaaatggaatgtgtcctttgtcgattgaagaagttgaagactggaaaaaatcaggttttaaaaaacatccgcttaatcctgaatttctgaaatggttacgtactgatgaagttgaaattaaaaacccttatgtttttagggatagagccagtaaacaaaaagtagctttatttgaacttggacgagctttctaccatattgcccaaagaagaggatttttgagtaacagacttgatcaatcagctgaaggagtttttgaagaacataatccacaaatccaagctttaattgaggatttagataacacaaatttgattttggaagaattaaatggttattatctgaatataggaatcatagaattaactgaaaaagttgtttttaaaaaagatttagatgaaggagaaaagaaactaaaaacactttataattccttggttgcgataactaagaaaaatgaaggagatattgagaaatgcaaagaagaacttattgcaaggctaaataaaaaagaagatttaggaaaagtaaaaggtgaaataaaagatatttcacaagcgatgcttgatggggattttaagactttagggcaatatttttatagtctttataacaaagagaaaatcagaaatcaatatacttcaagggaagaacattatcttaaagaatttgaaataatttgtgaagttcagggaatcgaaggaattgataatactgaaaaattacccgaaaagaaatttacaggtttagccaaagatttgtataaagccattttctttcagcgaccattgaaatcacagaaaggcttgattggaaagtgttcttttgaaaaaagcaaatcacgttgcgctatctctcatccggattttgaggagtacagaatgtggacgtatttgaataccataaagattggaacccaaagcgaaaaaacattgcgttttctgacacaagaagagaaattgaaattgattccgaaattctacagaaagaacgattttaattttgaagttttagctaaagaacttgttgaaaaaggagcaagtttcggctattacaaatcttcaaaaaagaatgagtttttttattggtttaactacaaaccaacagacagtgtttctgcttgccaggtttcagctgcgttgaaaaacacggtcggggacgattggaaaacaaaaacattcacgtatcaaacattaaatgcaaaaaaagaagaagtaaccaaaacagttgattacaatgatttatggcatttgctttctgtttcgacttcggatatttttttgtatgaatatgcaaaagaaaaattaggattagatgataaaagtgcaaaagcttttagtaaaataaaattgaaaaaggattttgccagtttgagtttatctgcaatcactaaaattttgccttatgtaaaagaaggacttttgtattctcacgcagtatttatggcaaatattgaaaacattgttgatgccgaaatttggaaagatgaatctcaacggaaatacattaaaactcaaatagcagaaattgttgaaaattatacttttgaaaaaagtctattggaggtaataaatggtttgatgaaagaatacaaaaccgaaaaagaagatgaaaaaaaggtgtattattcaaaagaagcagaaccagaatttggaacagatttaaagaaaaaattgattggtttttacaaatcaaataagattgaggatgaaagagagcaacaagtaattttcaaccatttgttaccaattttgatcgatcaattaaagaaatatgagttcatcaaaataaagagattagatgaaaaagttttagaatttctgaaaggagaaaatgaaactggtcaagtattttgtagtgaagaaaaaggaacagaccaagagaaggaaaagaaaataaataataggttaaaaaaactatatcatccatcagatattgaagttttcaaaaagcaaaaagcgaaagataaagacggaaatgaaacaggtcaacttattttaggcagtccgttgacttcatctattaaaaatccgatggcaatgcgggctttacatcaattgcgtaaagttttgaatacgcttattcttgaaggagaagttgacgaaaatacaagaattcacattgagatggctcgtgaattgaatgatgccaaccgaagaaaaggaattcaggattatcaaaaagaaaataaagatttcagagacaatgccataaaagaaatcaagaaactttatttggatgaatgtggtaaagaagtagaaccaacggaagacgatattctaagataccagctttggattgagcaagataaatgtgagatatacgaacaaggcaaaaatatacgtatttgtgatataataggaagtaatcctgcttatgatatagagcatacgattccaagaagtatttcgcaggataattctcaaatgaataaaacgctttgtagtcagagatttaacagagaaataaaaaagcaaaaaatgccaattgagttaaataatcatttggaaattttgccaagaattgctcattggaaagaagaagcagataatttatcaagagaaatcgagataattagccgttccataaaagcagcatcaacaaaagaaataaaagataaaaaaatacgaagaagacattatttgactttaaaacgagattatcttcaaggaaaatatgatagatttatttggaaagaaccaaaggttggattcaaaaacagccaaatcccggatactggaattattactaaatatgcgcaagcttatttaaagtcgtattttaaaagagtggaaagcgtaaaaggaggtatggtagcagaatttagaaaacaatgggggattcaggaaagttatattgatgaaaacggattcaagcaatacaaagaaaaagaccgaagtaaacatacacaccatacaattgatgccataacgattgcctgtatgaccaaagacaaatacgatgttttggctcacgcatggaaattggaagacgagcaaaacaaaaaagaggcaaaagctataatagaacaagcaaaaccttggaagaccttcaaagaagatttgctaaaaattgaagaggaaattttagtttcgcatttcactcctgacaatgttaaaaaacagtctaaaaagattgttagagttcgtgggaaaaagcaatatgtagccgaaatagagcgtgatgcaaaaggaaaagcaataccaaaaagagatgctaatgggaaagtaatttacaagttaaacgaaaaaggagaaaaaattccaagattgcatcagggagatacgataagaggttctttgcatcaggatagtatttatggagcgattaaaaatccattaaacactgatgaaatccgttatgttatccgtaaagatttagaaagtttaaaagccaacgatattgaaaacattgttgatgaaactgtaaaagagaaagtaaaagaagccattgccaataaagttttgctactttcttccaatgcgcaacagaaaaataaaattgccgagaataaaaaggtttggatgaatgaagaaaagcaagttccgataaagaaagttagaatttacgctaattcagttaaaaatcctttacacattaaagagcatggtttattgtcaaaatcacgtcacgaacacaaacaaaaagtttatggacaaaatgatgaaaattatgcaatggctatttatgaactggaggggaaaagagaatttgaattgattaataattttaatgtagcaaagcttttaagacaagggcaaggaatttatcctttgaacaaagaaaaagaaataaaaggtaaaaaaatattatatcctattgctaaaagcaataaccgtgatgtggttttgaagaaaggtcagcaagttgttttttatgataaatcagttgaaatgcctaaagatattactgaaattattgattttgtgggtagggtttatattattgaaggattgtcgattaatagagttaaatcaggaaataacttttatgagtttggagttattcaattgagatattttaaagaagctagaaaatctgatgatattaaaaaagataattttaaacctgatggagattttaaattgggggaaaataagccaacaagaaaaatgagtccaggtcaatttaccgcatttgttgaaggaattgattttagagtgttatcatctggaaaactagaaaagatataaattatggatgaatcaaaattaacaaaagagcaaataaaggattcaagaaaaaattgataaagctgaaaaaagtagttttgtcaaaaagcaaactcgtgaagaaatgctagccgaatttaaaaaaagattaggattggtttaaaaataagatttaaagatgttctttgacataaaaaatcaaatcttaaacatctcaaaccacaactgaaaggtatggcatccgccctgtagggatgcagtagctttcagttgtggtttgattaaagattagaaaacacgatatttacgaatctgaaaacaatggacgatttccagttgtggtttgattaaagattagaaaacacgatattagaacaggattgaaaataaacttgcctatagttgtggtttgattaaagattagaaaacacgatattggtggtggtattgaattgaagtggaacggcgttgtggtttgattaaagattagaaaacacgatattatctttcgggtttaacagctgatagttatggttgtggtttgattaaagattagaaaacacgatattcacacttacaaatccaattacaggtacagggttgtggtttgattaaagattagaaaacacgatattggacataaatatcgacaacacttcaaaatggttgtggtttgattaaagattagaaaacacgatattagtttattttttacaaagccattcgaagcagttgtggtttgattaaagattagaaaacacgatatttcgcatttgattagcagcaccgccggatgtgttgtggtttgattaaagattagaaaacacgatattcaatgccaacgctatttgtgccttcgcttagttgtggtttgattaaagattagaaaacacgatattttcagttcattaaaattgctcaagatataggttgtggtttgattaaagattagaaaacacgatattacagattgtattaatagagacaggagaaatgttgtggtttgattaaagattagaaaacacgatattagttggtgcgttatcttctggtggtcagtgaattaaagtaaaatatcgtataaaaaaatgcttcttttttggattgataacccaatattgaagcatttttttatttataaaagaagattttaataaagattgaatccgttttaatttttgtagctttgtgaaaatactttaattatgagagtagtaatagaagcagatgatcaatttaaaaaaatgctggaagaaatagccattgctatcaaagctaaaataagtttcgaagaatctgatgccgatttttgggatgaattgcctttatctgttcaaaaaaaaatattagaatctaaaaatcagctttcccaggggaattatattttgcatgaagatgtaatggagcgatataaaaagcgttttcaataatgcaggttatttggactcaaaatgcccaaatcagttttgaggcaattgtactatatctcgatgaaaattttggtaaacaagtggtacaaaaatttttgtctaaaactagttctacaattgaagctatacgtaaatttcctaatctttataaagcgacctctttaaaacaaaatctaagaaaagcaaccataagtaaagtgtgttctttttattatgaagttcacgaggatagcatcgccataatgtatttttgggataatcgtcaagaacccattgattattaaaataattctaattgtgtgggttgaggctcctttgggacttcggctctgccccaaaaattttgaatatttccaaattgcttatcagtaattcgcaatacacttactttacccaaaggaggtaggagttggaaaattcttttttcatgaacatcggcactttcactactggcacaatgacgtacataaaccgaaaattgcatcatagagaaaccatctttcaagagattgtttctaaaaccagatgcatttttccggtcttttttggtttcggtaggtaagtcaaaaaacacaaataaccacatgattctatagccatttagttccataatttggcatattttattttttttcgttcgccggtatagcattgttgtagcgagctggctgtcttttgaagggcaaccattaacggacttttttcctctttgaaaaaaacggttcgggtaagtatttgtaaaagttcagattttatcgttgtatttaattcttgctcactataagtttgcatgatttcaaatactttttcatcgacaattggtctgtagggttccataatatcatctgctaaagcaaaggcgttgtatttacttttatgatgaatacctagggtatttaataatccacttccagacaaggctctggctgtagccgctcttaaaatagcgtatccatagtttagaaaattgtttggatagtcaccaaaacgttctcttttaaattcctgctcaaaaaaaactttccagtaaaaattggcagcaacagcctccatatttgagctgtctccacttaaaacttttgaggctaaaaagtcgaagttgtttttctttgtggttattttttgcaataaaattccctgattcgaaattttttctacaattgtttgttgccaaagttgtttttttagtggtacacttgcgttaatttgatttttaaaaatttcttgttgaatatgatgactgttgaggtttaaaaacattccatttggtaaatgattttttccgcaaattataacagaagtattattttcaataagtaaattcattgtaggaatactaatgtaaatttcggcatgatccaataccaggaacccaatatcttcaataggaatagttttctctttgaattcagattttaatacaagttggttgttttttgtggtgagggaaagtttgttttcaattaatatggttttttttagcataataaatagaatatcgttaaaagtagattttagaggtatttaaaggtaagatattttttattatattaaaaattagagggttatgtttttttgatgtgtttaaaagcaaaaaatcccattttgaaatcattttcaaaatgggattttttaatgctttgatgaaattgtttatttcctttttaagctatttttttatgctctaatacatctgaaatgtgtaaaaattgattttttatttgttccagattttccaagctttttctgcttgaaaaataagcatatcaagaccgttttttatttgagcgccttttgctttagcgttttttaaaaattgtgtttcggctggattataaatcaaatcgtatgcgatgtgtttttctgtaaaaaaatcataaggaatctctggacaggcttcgatatttgggctggtgccaataggtgtggaattaatgacaatttggtattcctcaaaagtagcagctgttatttggctataatcaattgctttttcggaagcttttcgagatacaaaaacatattcgatacctaattcttccagagcaaaagccactcctttagaagcgcctcctgttcctagaatcaatgcttttttatgatgttcttgtagtaaaggacttagggactttaaaaaaccataataatcggtattgtagccttttaattttccttttttggtgaatttaatcgtgtttacagcaccaattttagcggcttttttagataatttgtctaaaaacggaattacctcttctttgtaaggaatggtaacatttaaaccgcttaaatttgctgtgtttttaatgatttcaggaaatccagagatttcctgaatatcaaaattttcataagtatagcctgcgtaattttctttttcgaatttggtagtaaaatgtccttttgaaaaggaataactgatattacgccccagtagtccgaagcgctttcttgtattttgggtcattattgtttgttgtgtttttcaatataattctgtaccatttttttctcccaaacaacaggaaaaaggtcttcgatgatgatatagttgtcaaaattcagtcggagcgcattgcttaagtgaattttagcttttctatcatcgttaatcataaaataaagaccagctaaacggtattctatttcactttcttccggataataatcagaagcttgtaacaaggtatgaatagcggtttcaaattcgcctaagaattgtaaaatgtctacccaaaatagccaagtatctaattcggtatcaccaaattcgactgcttttctaaaaccaaactcagcctcttcaaaaaagttcatctgtttgttaatatttgcatatcttttccagtacaagctgttttgattgtctattgctaaagctttgttgacaaaaaataaggctttttgaaagtttttttcatgtaaataaaaatccgtaattgcaatccatcctttgtctaaaagaggatcttcgtgaacggtttcgttatagaatttaagagctaacactttattgcctagtttttcgtagcattttccaatgcgaagtaaggcataggatgttggatcttctaattcgatagttctattataactttcaatagcttcctcaaatttccctaaacgttcaagggctttggctttttccataaaagcgcctaagaattcatcgtctataagagtagcataatcaaaggcacgaatagcttgctcgtattcttttaatccataatgtaaacgtcctttttgatgccatgcaatttcactatagggattgatttcaatgtatttatccaaataaaggatagcatcttgattttggtctaaaaactcaaaacagtacactacattatacagtgccgattggtcttcgatgtcttcttccagacatttgataaagttttctttggccaattctaaattgtccataaataggtattccattccaattaaattatacacatcggcataatcatcggtgtactgtaaagcaatttttagaaattcaacggctttttcatgctgatctctttttgagcagatatttgccttttgaatataaatttcttcattgtgcggttcaatggcatatagctcgttgagaagtttttcggctacatccaatttgtcatcataaactagcatttcaacttgaacaagttttaagcctgtagacttagggtgttggtctaatgctaatttgagcgcttttttcgctaaagcggctttacctgtatcgagatagtgaagtatgatttcttcaaattcttcagagtcaaaaaagagcactttgttggttttcaacatagactcaaatttggatagagataagttataatcttcttcttcgttgcttagttgcatacttcctgtttttagaatttggcctaccttaaaattaggcatcctttgtgttttatcgaagaaaaaaatgaattattgtgaacaatttaattaacaaaagaaacagtgtttattcgagcgattgctattttttttgagaagccattacttcatccatcacttctaatagtattgcgcatccttcgcgaatttcttcattagaaattgttaaaggaggagtaattctaatagcacatccttcaaaaaggagccaaaataaaatgagtcctttgtcttgacattttaatattacttcatttgtgattgcggcctcggcagtcatagccgccagcatcaatccttttcctctaacttcctgtatcaaaggatgtaccaaaagcgatcgaaagagtttttccttctctaaagcttcttgcatcaagtttgtttcagttaattctttcaatgttgctagacaggctgccgcaatgacaggatgtccgccaaaggtggtaatgtgccctaatttaggattatcagttaataaatccatcattgccgatgaagcggtaaaagcaccaacaggcattccgcctcccatgccttttcccatggcaattatgtcaggaacaatatcgtagttttggaaaccaaatagttttccagttcttccaaacccaggttggatttcgtccagaattaataaagctcctacttctgtacatcgagcgcgaacttttttcaagaaatcattttgtggttcaataaatccggcgcctccttgaatggtttcgagtaaaacaccagcagttttagtagttattttttctaaatcggcttcattgttaaacgtaataaagtctacatctggaattaatggtctaaaagcttgttttcgttcctcaaatcccataacactcatagaacccatagtgtttccgtggtaggcattataacaggaaatccattggcttcgaccagttactcttcgggctaattttaaggctccttcaattgcttcggtgcctgaattcactaaataggttttgtctaatggcgcaggtaggagtgaagccatgagtttgcaatattctacagcagggctttgggaatattctccatacaccataacgtgtgaatatttgtccaattggtctttgatggcttgattgactctaggaggttgatgtcctaaagtacaagctgaaactccagcaacaaaatccaggtattttttattattagtgtcgtatatatatgaaccaatggcgtgtgaaacttccattcctaatgggtaaggagaagtttgtgcttggtattttataaaatccttattcactgttgttagttttttaaccgcaaagtttgcaaagtttttcgcaaagttcaggaagtttttttactttttgttacaatttagatttagtatagtattctgtttttgccttctgaaactgaaaactgcctacttctttttcttctttttatcgtaattcaatgtttctttcctgattttcattggaacgtttttcttggcagcatcttttttagtatcagcaatcattttgtcgttgtattgattctcttcttctggaaagatatcgtctttagattttattcgttcgtcagcccgccatttgaagcctttaaatttcctttcgtattcgctaagttcttcttcaggatagatatctccatctacttgttgaaaaaacgtgatggtttcaatagcatttttatcgaaaagaatactgattttactgcttacatttttattgattccaatgagttccttgtcatcatttcgcatgtaataaatgacctcggcgtttttaacaatgtctacatcgtggagtttaccttcttcgaatttgccatagaggttcattccctttatttgattgtatcccgttcctaatgtgtctttggaaatgataaaggtgttgttaagtacttttaaggaatcgagtttttctgtttttttattccctatgaggtgcataatatcgccagtaatttgactttctccattccataatatggggttgcctatgagttttgttagagcgattttggtgctagaatgtatggaatcacattttccgctcatatctgttttaaagaaacgaacattattaaacgcacgaattattcggtcgccttctttgccagttaccattatttttttaccatgtatataaaccgaatcattttgaacgaagtttacagctaatgctcttttagtaacaaacatggagtcttttttctggaatatttcggcataatgacctttgacgataccacgattaatcgaatcggtaatttttacatttcgcgtagccgaagcaaattctttgttacgatcataatacaaactatcaccttgaatcaatcgatcattgtatttgatatatgattttcgcagaaaatgggctagatttttcttcgtatcataaaagcccttttcagtataaatataattgtttttgctggttatggttgaaggtccaaaaagataggaatgccctgaattgctataataatcaagatgatctgatttaataacatatttaggattcgtaatggttaccgcagtcaaaaactgaaatttcttttgagctacataatattttccagaattactttctaaagtattttcattgtttgtaattacccctttagtattgtaaaatgcttcttggttattacgatcaaaattaattgtatctgtttttaaagtagagtcgggtgtgcttaaaacagcatctccagtagcgaatgctttttttacatttccgttatactcagcatatttactgtttaaataaagagtgtctccttgaactaattgtacattaccaaaagctttaatgtagttttctttttgaaaatagtaggctttgttacaacttaaaacggcaccatcgtgatttacgaccacatttccagttaataaaaaagcgtctggcatttctgcctgattaacatcggcaaaatcagaatgttcaatgatgatttttttaggagtttgcgcttttacttgtattgaagtaacaaaaaacaaactaaaacagatgaaaaatagcgatttactcaagggtgtatatttttgtcaaatttataaaaaaggacgcaaacccaataaatattactgtttatttatgattttgataagagagttttatttgtagtaatgttgttgattacaacaaaaaatgccgacgtttattttaaaataaggcgtgggcattttattggtttgaaattatatcaatactgtttgataaatgagtttttgtaatttttattgacattattccagtcaataatagcaaaaaaagcatcaatataggtttttcgacggtattggtaacccaaataataagcgtgttcccaaaggtctaatgctaaaataggtgttcctggcacagcggcatttctcattaagggattgtcttgattttgtgtactggtgatttttagttttccagctttgtctacaattaaccaaacccaagctgaaccaaattgtaaacttgcttcttgtatgaaagcatttttgaagtcgttaaaagatccaaaatctctatcaattacggatgctatagtgtcttttggtgttcctccgcctttagggccaatagatttccagtataaggagtgattataaaatcctccagcattatttcttaattcagtatcatttatatcaagtttggctaaaatgttttcgatagacatattttcgtattccgtaccagcaatggctttgtttagattattggtatacgataaatagtgtttcgaataatgaacttctaatgttaaaggggatagagaaggcgctaaatcatcatagttatagggcagtttgtccaataaaaaagagccagggtctgcttttacatcatctggaaaaccaatagagattttttcttcagctgtaggaagtggaacttcgacaacttcagttagttttttcttattgcatgaaactaaaaaacttaaaaaaaataggcttgctgtggtaaagaaaagctttttcatgaattgtattattttcaaagcgaattaatgatttcaatatagttttctttggcttcatctaccgaaagatgactgatttgcatccaagcatttgttttaaaggcatctcttagatgaaaattagaagtttgtctaatttctactgtacctattgttgcttgtttgtaaaaggcataaagtcttagctgcacatcttgaggtaaagatgcttgagtcatttttgaagctttttcaaccgcttcgttaaaccgagtatctaaatctttttgagtcattatttttttgcaataacagtttttcctccaattgctttttggtttaaaactacatctactggagttcctaaaggtaagaataaatctactctggaaccaaatttaataaaacctgcatcagtaccttgtactacctgcattccttcttccgcataattaacaattcggcgtgctagtgcaccagcaatttgacggtataaaacagctccgaatgtgttgttttcaacgacaacagttgttctctcgttttcttcacttgcttttggatgccaagccactaggaatttaccaggatgatatttactaaatttaataattccactcatggcatatcgagttacgtgaacattaattggcgacatgaaaatagacacctgtaaacgtttgtctttgaaatattcaccttcgtatacttcttcgataaca

SEQ ID NO: 3108 - DNA, 24422 bp, synthetic construct
  misc_feature 1..24422: note = Synthetic
  source 1..24422: mol_type = other DNA
atgaggtggccttcgccttggagcgatggttttccaggttggcacctagagtgtactgccatgagtaccaaatatttaggcactcattttgacattcacggcggcggaatggatttaaaatttccgcatcacgaatgtgaaatagctcaaaatcaagccgcaacaggccatacaccagtcaattattggatgcatgccaatatgctgactttaaatggtaaaaaaatggcgaaatcaacaggtaataatatattacctggcgaaatacttacaggagaaaatccttttttaagtaaagcttttcctgctacggtcgctcgtttttttatgttgcaagcccattatcgtagcaatttagatttttcaaacgaggccattttggctgccgaaaaaggatttaatcgattgatggaagcattacatttgctaaaagatattcaacctcaaaagcaaacctctatcgatttaaaaacttggaaatcaaattgttatgaggctatgaacgacgattttaatgccccaattttaatagcaaatctatttgaagctgtaaaatatatcaattggctcaacgacaaaaaagaaacaattcattcagacgatttagccgattttacaaaaacgttacatgcctttgtttttgatgttttaggactcgaagacacaaaagcaagtaccaatcatagtaacaaacttgaaaatgtggttcaaatactcatcgaaatgagaaaagaagcccgagacaataaagattttgctttgtctgatcaaatcagaaaccaattgttagccataggtattcaacttaaagacggtaaagaaggcacaacttttagtgtttaaaaataattttgatgaatgtaacaaaaccttttatttttctagttaggttctatcaagtggccatttcaccatttactccagcctcttgccggtttgaaccaacttgttctacttatatgattcaatccctgcaaaagcatggattaataaaagggggatattatggtatcaaaagaatttttcggtgtaatccttggggaaaatcaggatatgatccaataaaataataaattaaataataatattaataatgaatacagcttttagtatagtttggaatccttctgaaggaatagatttgggtttttttatgattaggttttacagtttgatgtttgtcgttgcttttggattaggctggtggatcatgaaaaaaatatttgatagagaaaacgaatctattgataaactggatagcttatttgtatggacagttgttgctactttgcttggtgcaagactaggtcatgttattttttatcagccagaattatttttagacgatcctttaagtattttattaccaataagaacgcaaccagattttaaatttactggatttgcaggacttgcaagtcatggagctgctatttctattataattatgatgtatttttttagcaaaaaaatcatgaaaaaatctgttttatgggttttggatagggtagttattccggtagcaagtggtgctatttttgtaagacttggaaatttctttaattcagaaatttatggaaaaccaacagatggtaatcatttttatgctataaaatttgtaagagaagaagaattttggcaaaaccataatttgatggaaatgactcaagcacaatcagaaaatgaggcctataatgtaattgccaataactcaaaatttactgaagttttaaatgaaatacctttcagacatccatctcaattatacgaatcttttgcttatatttttgtgttttttatattatattttctttattggaaaacagatgctcgcaaaaaagagggatttttgtttggtatgtttttaatcacactttggcccattcgatttgttgtagagtttgtaaaagccagtcaaggaggttttgaaaatactttaggtcatttttcaactggacaatggttaagtattccttttattattttaggtttggtgtatgtatttagaaataatacaaaaaaagatgaaatatattaatacaatatggaaataattatcagaaatgcagttgaaaatgatttagaggccattttgaaaattgtcaatcatgctattttacatactacttcaaattattcttatgatattcaatctttagctgatcaaaaaaaatggtttatcgataaaaaagataaagggttacctattttggttgccgaatttcaaaatcaagtgcttggttttgcaacttatggaagttttagagaaaaaataggctaccaatataccatagaacattcggtttatgtaatagatgattatataggaaaaggtattggtaagttattattatcaaaattaatttatcttgcaaaaaaacaaggatatcattgcatgattggggctatcgatgcaacaaaccaaaatagtattcaatttcatcaaaaatttggattccaaatatcaggtcatatcaaagaagtaggttttaaatttaaccaatggctggatttggttttgatgcaattaattttacaataacgcttctttaaacactttcaaacattttgctctggcttcttgatggtttacaataggttttgggtaatttaattcttgatattctggaacccatttttgaatatatttacaatttgcatcaaattttttggtttgctccattgggttaaatattctaaaatagggtgcagcatctacaccacaacctgctgcccattgccaatttccaacattgcttgattgctcataatctaataattttgatgcaaaataggcttctccccatctccaatctataagtaaatgtttgcataaaaaacttgcaactatcattctaactctattatgtaggtatcctgtggcgtttaactcacgcatgcctgcatccacaatagggtaaccagtttgtcctaaacaccatttttcaaaatacatttcattgttatcccatggtatgttttcatattttggtctaaaacataagtgggttgtgtgtggataatgccaaataacattcataaaaaattccctccaaattaattcattaagataagtttcattttcaatatcaatgatatttctaataatttctcttatagatattgtcccaaaccgtaggtgaggcgctgcattagaagtttttgcaagatgtggaaaatttctattcaattcatagttatcaaccaattcatggccaatagcaataggtaaaactttctgcaatgattttttaaacccaattttttctaatgataaaaaagggtaggagtgaggttgtaaatgttgcaaataatcttcagaatatgctacattaattaaatttttatcgaatttctgcttccatttttttgaatatggtgtaaaaacaacatacgggctgccatcttctttgacaatttcatttttttcaaaaatgacctgatctttataagcttttaatggaatttgatgttcttgtaataaataataaatttttttatctcgttctcgagcagcaggttcataatctttgtttatatatactgatgtaatattatgatttgtaattaattctttccatatttcaatagggtcaccataaaaagttgcaattgaactattgtatttttggaattcatcattcattttttgtaatgaatcatgtataaaatcaacccttgcatcatttttttcgagttgttgcaaaatgttatgatcaaaaataaatatcgggaatacggattggttttcttgtaacgcatgatacaaaccaacattatctgtccatcttaaatcccttctaaaccaaaatattgtcatattattttattttaattcgccaaacatgcttgttaaaatcgcttttctaaattcaaaaatctccttaagtttaggtgctactaatatgggatgtaccatttgtcctaaaatacctaatggtaatttgtaatctactatatcttccatttctattcctcctggaattgctttgaaaaaatgtttatgatgccataatgaataagggccaaatcgctgttcatctacaaaataatgtttatcatctacgtgagtaatttctgtaacccattttgtaggtattcctgcaatgggggttacaatatattgaataatttgtcctgcaaacatgggtttgtcatcgcccgatagggttttgaaacccatatatggaggcgttattttttttaaattggctggatttgaaaaaaactcccaagcttgatctaaactaataggaagtttttgtttggattctaatctgtatattttcatggttacttttattgggtcaaaaatgattaaaatgaatttaagaatctatttttggtgtaaaagtaataaaaatgtttaattaaaacacaaaaagattaaacaatatatttttttttaaacatcatgcttttcagaaggcaactcaaaaatttctaatttaaaatagggcacggcagcaataaagtggtcgaataaatcagatacgatatattcataattttcccattttttatcttttgaaaaagcatatatttcaagcggaattccatgttgtgtgggttgtaattgtctgcaaaccaaaaacatatcttgattgattgcggcatgtctttctaaatattttgttatataaactctaaataaacccaaattagtaagatttcttccgtttactaatacgtctttattaatttgatgattcgcattatagatgtcaatttctgattgtttttgggaaatataatgatgaatcaattgaatttttgataaattttcgatttctatgtctgataaaaaatgaacactatgcgatttaatcaataaaaaacgttttatcctccttccagatgaattttgcatccctcgccagtttttaaatgaatctgatatcaaactatatgtaggaatagttgtagtagtcaaatcaaaattacgaacttttaccgtagctaaattaatttcaatcacatcgccatctgcaccaaatttgtcgaatgttacccaatcgccaatgcgaaccatatcgtttaatgacacctgaacactagctacaaaacccaaaatagtatctctaaaaatcaataatataacagcagaaacagctccaaaagctgtaaataaagtatttgtttttatttcaaataattctaatataattacaaataatcctatcatccaaaggatgatcataaatacttgaatataactgtctatgggtttatcgctatattggggtattaattttaaataatctcttaacgcattgaatatggttctgatgatccataaagtaagcaaaacaatataaatacctataaatttaccaaaaaaaccttcccaatatacataatcatttaaaattataggaactgatttataaataaataaaagtggtattaaataggaaatgtattttgctgttttgtttgcaattaaaaaatcatcaaactttgagtgggttttttgtgcaattattgccaaaacacttactaaaataaatctaaaaattttataaattagataggcaaacaaccataaaataatgatattcactatcaaactactataagatgcaaccgtatcatgccatcctatttttttgaaaagcggataacaccacccaaatattttgtttataaatttaagcattttttaaatatttattttcaatataaaatgttccaaacggtacaaaagaagccaaacatactatcgaaaatattttaaatgaccaattttgtttgtattttactataattgcaagcaaaatataagcaataaacaaaataccatgtgccatacctataggtctaatataggcatcgttttgaaaaaaacgtctcatgggcatagcaaagaaaaacaaggcaagcaacgacaacccttctaaaatagcaatgtatttaaataattttaacatagttttttttgagtacaaaattaataatttgcaatcaactctgctgctaattagctgttttttatgaattatttaataattgattcctaaacagcaaaatcaaatttgtttataataatataatattatacttattgtttttattttaaaatacaaataataatactatattgagtataattcatcaataattaaataaaattaaaatttatattgataatagttcaataaaataatatatatacataaatttaacattatttataaaatttattgattttacatctgctttaaatcactttttttaaattattatcaaataataggttttttaaacgtacttttgcaaaaatcaatttttatcaaatgtcatacccattagttgaagccgaattagacgaaaaaaaagttttatatgattatcaagaatacgatattgatgccatttttgaaagaatagacaaccaaaaaaacaactttcatttgctgtaccaattgcctacgggtggtggtaaaacagtcgttttttctgaaatagttagaaggtatattaaaaaaaataataaaaaagtagtaattttaactcatagaatagagctttgcaaacaaacttcaaaaatgctcaagggttttggtgtaaaaaataaaattgtaaacagcaaaatcaaagatttgccagaccagcatgaatattcttgttttgtagccatggtagaaaccttaaaaaataggttaaatgatgaaaaattattgatagatgatgtaggtttattaataattgacgaagctcattataattcttttagaaaattatttagttcttttgaaaattcttttattcttggcgttacggccactcctttaagttccaatgttgggcttcccatgcacgaaaattatgatgaattaatcgtaggagataccatacaaaacttgatagataatggttttttagcaaaagctactacctatagttatgatgttggacttacttcattaaaagtaggtataaatggcgattatacagtaaaatcgtcagatgatttatatactaatatggcaatgcaggaaaaattattgcatgcttataccgagaaatctttaggcaaaaaaacattaattttcaacaacggtatcaacacctcgctatatgtttatgaaacttttagagaagcaggctatgacattagacatttagataataccaatagtaacgaagaacgtaaagaaattttgcattggtttaaaaaaacgcctcatgctattcttacttctgttggaattttgacaacaggttttgacgaacctaccgtagaaaccatcatcctaaatagggctacaaaatcattaacgttatattaccaaatgatagggcggggctctcgtcgattgcccaacaaagacagttttacggtaatcgatttgggtaacaatgctgcccgatttggtttgtggaacgagcccatcaattggcaacatatttttaaatcgccagagttttacctcgaaaatctaagagacgatgccgaaattgaaatgaattttaaatatgtaatgcctgatgaattacgtcaaaaattcagtaaaactcccgatgttacttttgatgtggacgacgaacacaaattggccatcaagttcaatttgcgttcaaaaattgtactcgaaaaatcgctcgaccagcatgcggccatgtgtgtagataataccgaaacacttcaagaagcccgtgcattagccaaagaattattagcagatatagaaagtagaataaaaaaatattcaaattgtttgagtcaatgtagtaaaaattatagagaatggctagtcgatgattatattaaaaacctcaatttattgatagggaagaagtatcgtgaaaaaattatgaacgaaccagattaattttttagggagcttgatcccgcttttcgttacaatcttttgtggcgaaccccgccacaaaaggattttcactacaatcggggctagattcattttcaaaagtaacgctttcttaaaacaatattttcatgtcaaattttatcgatttaggtttaacaaatgcttttgttgaaacgcttaaaagcctgaatatcaatactccaactgaaattcaacaacaagttattccacaaatcctacaagcacaacatgatgtagtaggcatagcacacactggtcacggaaaaacagttgcttttggtgtacccattttgcaacaaatagacgtgcaaaaccctcatgttcaagctgttatattagcaccaaccagagaacttggacaacaaattacgcaccaactacaacaatttgctcaacatcattcgtcaatcaacattttggctacttgtggaggcaatccaataaaaccacaaattgcggccttgcaaaataaccctcaaattgtggtggctacgccagggcgattgctagatttactcgaacaaaaggtactcaacttgcaacacgtgcaatttgtagttttggatgaagcagacgaaatgatggccatattacacgacagtttgaccaaaatcgaacaatatttgcccaaaaataaacgacagtttttgtttacagcaacatattcggtgggattaaaacagttggtacaacaaaatttttcaaaaaatactgctattattacatcggttgtaggtacaaaaaccaatacaaacatcaaacaccattatgtaatagtagatccaatagaaaaattagcagtattattacatttattaaattcaaaaccaaatcaaaaaggaattattttttgtaaaacaaaagcagctgtcaataaattagccaaaaatttagccatcaaaaagtttacctcgggtgccattcacagtagtttgacacagcctataagagacaaaatgatgtcgcaatttagagcaggacatattcctattttagtggccacagacttggctgcacgtggtatcgatatagatgacatccaatatattgtaaattatcacttaccagatactttagaaacatacattcaccgcagtggtagaagtgcccgaaatactcacaaaggcttggtttacaatatcatacaagaagaggaattagcccaattgcaaactattgaaaaagcgattgagttgcccattttaaaatatgaaaaacctgacaataaaagtattgaagataataatacgatgatatgggccaaacaaatttttaaaaccaaacccaatcatcaaatatctaatgaattgaaaaacgacattaaagcaatttttcatcatttaacaaaagatgaattgattgataaaattttggcgaatcacttgcaacaaaacgctaaaaagtaaccaatatcaaagccaatgtgctcctatttttggttctattattttgaactataattaatattatgtaaaatagaaaattacatttatccattttgcctatcgcatgcctttcacatgatacagagcattgttacagatttattttaaaattatagttaaaaaaataaatacaattttataaagatagcattatcaataaataaatgcttttttgaaaatttgtgtaactcaaaacttgatttttcacatgatttcaattataaatgtaatagtaaatttatatttacctaaatctaacttatttgatttcatttttttatcaggaaatcatttgcaaatgtgaaatgagtctataatatcgaatttatttatcttttatatttgaatttaatatttagctgttttttacaaaagtataaagcaattgattaggagcttttttttatgagaaatggataaaaaaacagttgaaacaaggtaaaaataacacaacaaactaccccaaaaaagctgcccccccctactcttttcgtggtattttattacaaaaaaaagtcccaccgaagcaggactaaagattttcatctacggcatatagccttattgtgataagattaaagattagaaatattaatcatgctgcaaatatataaaacatttttaaatgtatatagcgaaaaaactttttttttaaaatattttttccaatatatttacaaaaaatatgaaaacacaaaaatggcaaaaatattaggattagatttaggcacaaacagcattggctgggcggtggttgaaagagaaaacattgatttttctttaattgacaagggagttagaatattttctgaaggagtgaaatctgaaaaagggattgaaagttcaagagcagctgaacgaactggttacagaagtgctagaaaaataaagtacagaagaaagttaagaaaatatgagactctaaaagtactttctttaaatagaatgtgtccgctttcaattgaagaagttgaagaatggaaaaaatctgggtttaaagattatccattaaatccagaatttttgaaatggttgagtactgacgaagaatcaaatgttaatccatatttttttagagaccgagcaagcaaacacaaagtatctttatttgaattaggtagagcattttaccatatcgcacaaagacgtggttttttgagtaatcgattggatcaatcagcagaaggaattttggaggagcattgcccaaaaatagaagcaattgttgaagatttaatttcaattgatgaaatttcaacaaacataacagattatttttttgaaacaggaattttagatagtaatgaaaaaaatggttatgccaaagatttagatgaaggcgataaaaaattagtttctttatataaatctttattggctattctgaaaaaaaatgaatcggattttgaaaattgtaaaagtgaaattattgaacgattaaataaaaaagatgttttaggcaaagtaaaaggtaaaataaaagatatttcacaagctatgcttgatggaaactataaaacattaggtcaatacttttatagtttgtatagcaaagaaaaaataagaaatcaatatacttcaagagaagagcattatctttcagaattcataacaatttgtaaagttcaaggcattgatcaaattaatgaagaagaaaaaataaatgaaaagaaatttgatggtcttgccaaagatttatacaaagctatcttcttccaaagacctttaaaatctcaaaaaggattaattggaaagtgttcctttgagaaaagcaaatctcgatgtgcaatttcgcatcctgattttgaagagtatagaatgtggacttatttgaataccataaaaattggtacacaatcggataaaaaattacgatttttaacccaagatgaaaaattaaaattggtgcctaaattctacagaaaaaatgattttaattttgatgtattagccaaagaattaattgaaaaaggttcaagttttggtttttacaaatcatccaaaaagaatgattttttttattggtttaattacaagccgacagatacagtagctgcatgtcaagtcgctgcttcattgaaaaatgctataggtgaagattggaaaacaaaatcatttaaatatcaaacaataaattctaacaaagaacaagtttcaagaacagttgattacaaggatttatggcatttgctcactgtagcaacatctgatgtttatttatatgaatttgctatagataaattaggcttagatgagaaaaacgcaaaagcatttagcaaaactaagctcaaaaaagattttgcaagtttgagtttgtctgcaattaacaaaattcttccttatttaaaagaaggattgttgtattctcatgctgtttttgttgcaaatattgaaaacattgttgatgaaaatatttggaaagatgaaaaacaaagagactacattaaaacacaaatttctgaaattatagaaaactatactttggaaaaaagtcgatttgaaataataaacggcttactcaaagaatacaaatcagaaaatgaagatggaaaaagagtttattattcaaaggaagcagaacaaagttttgaaaatgatttaaagaaaaaacttgttttattttataagtctaatgagatagaaaataaagaacaacaagaaactatttttaatgagttgttacctattttcattcagcaattaaaagattatgaatttattaaaattcaacgccttgatcaaaaagtgttaatttttctgaaagggaaaaacgaaacaggtcaaattttttgtactgaggagaagggaacagctgaagaaaaggaaaagaagataaaaaacagattaaaaaaactttaccatccatcagatattgaaaaattcaaaaagaaaataattaaagatgagtttggaaatgaaaaaatagttttaggaagtccattaacaccctcaattaaaaacccaatggcaatgagagctttacaccaattacgtaaagtgctaaatgctttaattttagaaggtcaaatagatgaaaaaacgattattcacattgaaatggcacgtgaattaaatgatgccaacaaaagaaaaggaatacaagattatcaaaatgataataaaaagttcagagaagatgctatcaaagaaattaagaaactttattttgaagattgtaaaaaagaagtagagcctaccgaagacgatattttaagataccagttgtggatggaacaaaacagaagcgaaatttacgaagaaggaaaaaacataagtatttgcgatattataggtagcaatccagcttatgatattgagcatactattccaaggagccgttcgcaagataattcgcaaatgaataaaactttatgcagccaacgatttaatagagaggttaaaaaacaaagtatgccaattgaattaaataatcatttggaaattttacctagaatagcacattggaaagaagaagccgataacttaactagagaaattgaaattatttctcgttcaataaaagcggctgcaacaaaagaaataaaagacaaaaaaataagaagaaggcattatttaactttaaaacgagattatttacaaggcaagtatgaccgttttatttgggaagagcctaaagtaggttttaaaaatagtcaaattccagatactggaatcattacaaaatatgcacaagcctatttaaaatcatactttaaaaaagtagaaagcgtaaaaggcggaatggtggctgaatttagaaaaatatggggcattcaagaaagttttattgacgaaaacggaatgaaacattataaagtaaaggatagaagcaagcatacgcatcatactattgatgccatcactattgcttgtatgaccaaagagaaatatgatgttttggctcacgcttggactttagaagaccaacaaaataaaaaagaagctcgttcaataattgaggcatcaaaaccttggaaaacttttaaagaagatttattaaaaattgaagaggaaattttagtatcacattacacgccagataatgttaagaaacaagctaaaaaaattgttagagttagaggaaagaaacagtttgtagcagaagttgaaagagatgtaaacggaaaagctgttccaaaaaaagctgcttcaggtaaaacaatttacaaacttgatggagaaggtaaaaaactcccaagattacaacaaggagacaccattcggggttctttgcaccaggatagtatttatggagcgattaaaaacccattaaatacagatgaaataaaatatgttatccgaaaagatttagaaagcatcaaaggttcagatgttgaaagtattgtggacgaagtggtaaaagaaaagataaaagaggcaattgcaaacaaagttttattgctttcatcaaatgcacaacaaaaaaacaaacttgttggcacggtttggatgaatgaagaaaaaagaatagctattaataaagttcgaatttatgcaaattccgttaaaaacccgctacatataaaagaacatagtttgttatcaaagtccaaacacgtacacaaacagaaagtgtatgggcaaaacgatgaaaattatgcaatggctatttatgagctagatggtaaaagagattttgaattaattaatattttcaatttagcaaaattgattaaacaaggacaaggattttaccctttacataaaaagaaagaaataaaaggaaaaatagtttttgttcctatagaaaaaagaaacaaaagagatgttgttttaaaaagaggtcaacaggttgttttttatgacaaggaagttgaaaatccaaaagacatctctgaaatagttgattttaaaggaagaatatacataatagaaggtttgtctattcaaagaatagttagaccgtcaggaaaagttgatgaatatggtgtaattatgttaagatatttcaaagaagctagaaaagctgatgatattaaacaagataattttaagccagatggtgtttttaaattaggagaaaacaaacctacaagaaaaatgaatcataatcaatttacagcctttgttgagggaattgattttaaagttttaccttcaggtaaatttgaaaaaatatagattatggaattagaagataaaataattttaagaaatcaattagcattgttaatcagacatcttagagaattaaatggaatttctcaagaagtgttagcaaataaaataggaattaaagaacacacaatgattagaatagaacaaggtaaattttcaattaatgcagaattattgttgttaattttgaaaaatctagaatgtaccattttagctaaaggaaaggagtttaagatttaaactgttttttttctctatatattgaatttgagctgttctgattaaataaatataatttaattaaaatattgaatgcaataatacaaagttctttaaagtttagatattaattttaaaaaagctttctagtttagaaaaaaattctaaacatttctaataaacgcttactagtatagaagaaagtagctaatgtttcttgtaaaggactactgttttaaaagatagtaattaaagtttctaataaacgcctactcctttaaagataatgagctaacgtttaatataaacgcttactagtttagaagtaactagtgagcatttattataaacacttattagtttagaggaagggagttgatgtttgttataaatgcttattattaaagaataaacacctattaatcacaataaaggctataatagtttataaaaaatgttaaaataatgcaaaataattttatggtataactttttttttataattttatataaatttttaaaatataaaacaatggcaagaaaaaaattagtcagagtacccgaccttgataaagggactactcgtttggcatcagtaaaaagtatcgatccagttatcgatttaggtaacggcatcactgctgaaaattatgaaacacagattaatttgttacgcaccaagctaaacaattacaacacggctttgagtactattgatgatttgtataacgagtgtattatacaaatagatgtggtacgagattggaatgacagggttttgactggcgttgcaaccaaatttggcaaaaacagttcgcagtatgaaatggctggtggcgtaaaaaagagcgaacgtaaaaaacaaacgccaaaaccaagtgcctaaagatcaaaatcccaatgtaaagattgggatttttttatggttttaaagaaaggggtgttttatttttttaagcttataatcaattcgaaaccataaaaaattaaaaattaaataattcggtttatatttgcactaataaatgatagcatgatggcacgacaaagcattactctagcagaagaaaacgacgaatggttgaaaaaccaagtagctaacgaagtgtttacaagtaaaagtgaagcggtaaattatttgattaaaaaagctcgtgaacgcgatgcgtatcatgaatatgttcaaatgaaaattgatagcggattaaaaagtggttttgctgtgaagcaaaccaaagaagaaatgttagccgagttcaaagaaagattgaatgtactatagttattttttaactcgagaagcaaaagaagatttgtagagaatttatgaatttggtgtttacaaatttggagctgcttaagcagataattattttacaatgtttcatgattgttttgacaaaattgcaagcaatctttatatgtttccgatggtctcaaattataaaaatgtagaacgattttgtgtttgtggtgttgatacgatttattacaatatcaaaggtgatgaaattgaaatcgttaccatcattggaagacaaaatttttaaaagttctttgacatacgttttcatggtcttaaacagccaaaccacaaagacgatataagagtaatctgtgcatcagtggcaattttaaagttgtggtttacaaacaccaaaataatattttttataggtgtgtttgtgaatttatttgattaaagattagaaaacacgatatgttcagattttttgaaaatcaacggtattgagttgtggtttacaaacaccaaaataatattttttataggtgtgtttgtgaatttatttgattaaagattagaaaacacgatatgaacatattttttaataattacatttttagtgttgtggtttgattaaaaattagaaaacacgatatggcgggttagagtagtctggtagctcgttgggttgtggtttgattaaagattagaaaacacgatatgcatgccagcagctgccgatacgttggggtgttgtggtttgattaaagattagaaaacacgatatgaatacttgcaagtgtttgtatatttgccccgttgtggtttgattaaagattagaaaacacgatatgtttaacgctttaattcaagcgattacaagcgttgtggtttgattaaagattagaaaacacgatatgcgttttattggtgcaattgttttggcctacgttgtggtttgattaaagattagaaaacacgatatgtggggcaacatgtaccgtagcagctggcgtgttgtggtttgattaaagattagaaaacacgatatgcctagtattaaattaatatccaacgcatccgttgtggtttgattaaagattagaaaacacgatatgctcaaataaaagtgccagcaggagccatagttgtggtttgattaaagattagaaaacacgatatgcaagcaaaaagaaaatgaaattaaggacgagttgtggtttgattaaagattagaaaacacgatatgattacgcccgatggtgtgggcggcacttgggttgtggtttgattaaagattagaaaacacgatatgtcgccatgattttcgatgttattatgtatagttgtggtttgattaaagattagaaaacacgatatgcataccagcagctgccgatacgttggggtgttgtggtttgattaaagattagaaaacacgatatgaatacttgcaagtgtttgtatatttgccccgttgtggtttgattaaagattagaaaacacgatatggattgtgctaaaacattaagttcgttaaatgttgtggtttgattaaagattagaaaacacgatatgaccaaagaaaaactcacaaattgtgagaatgttgtggtttgattaaagattagaaaacacgatatgtttaacgctttaattcaagcgattacaagcgttgtggtttgattaaagattagaaaacacgatatgcgttttattggtgcaattgttttggcctacgttgtggtttgattaaagattagaaaacacgatatggcttgaagtttccaaaatggagttcaaatagttgtggtttgattaaagattagaaaacacgatatgaaatcttttggctgtatcaactgtattagcgttgtggtttgattaaagattagaaaacacgatatgtttccgacaaataataacacaccacaggcagttgtggtttgattaaagattagaaaacacgatatgtttggctatcttagtttcttcatagccattgttgtggtttgattaaagattagaaaacacgatatgatttccaaatgccatttcaggcaaatacaggttgtggtttgattaaagattagaaaacacgatatgtttttcagttgttaatgaaaacccttcaatgttgtggtttgattaaagattagaaaacacgatatgagtttataaaagaatatgaaaacggaactagttgtggtttgattaaagattagaaaacacgatatgtttctaatcattattttttctttttaagaagttgtggtttgattaaagattagaaaacacgatatgataagggtttgactctattctacaaacatcgttgtggtttgattaaagattagaaaacacgatatgagttggcttgttgccttctgatattcaagggattaattgtaaatatcgttataaaaaatgcctctttataggactgataaccctatattgaggcattttttgttttctaaaacagctctagctgtacaggcattggtacttttggcaacggagcttggccccaataattcataatattgccaaactgtttgtcggttatccgtacaacactcaccttgcctagtgggggcaacaattgtacgatacgtttttcgtgtacgtcggcactctcgctactggcacaatgtcttgtatatacagaatattgcatcatcgtaaatccgtcgttcaataatttgtttctaaaaaccgaggcatctttacggtttttttttgttgctgtgggcaggtcaaaaaatacaaacaaccacattatccgatatccgttgagctccataacttggcatattttattttttttgcgttcgcccgtataacattgttgtagcgagctggctgttttttgtaaagccaccatcaaagggcttttttcgttttcaactattttttaaaagaagtttattattacaaataaagtggcttttttgcagacgctgcgttagggatagtagtggaaatccttttttggggcagggcttttttttggccctgccccaaaaaagattgcaacggatagcccggccccttgtgggaacgcccaaaaaagggttgtggttttgtagtgaagttttttttttgatattattcatcaagtaaattgtgtgtagggctgtggtttgaaattgtttgcaccgttcaaagtattttgctacatttgccataaaataatgcaccaatgaacaatcccgtagcagataaaatagcagattttttatcggattttaaaccatttaacttattgagccacagcgatttgttgttggtgtctagagaagtgaaaatattgtacaaagataagggcaaaacgttgtttcaggtaaacgatgcgttgcacgattgtttttatgtgatttattcgggaagtgtcaaattgacggtgtttgcagatgccgaggaaacgttgttgaacaagtgtcagaggggggatatttttggattgaggcctttttttgcaaaaaacaactacatgatgacggccacggcccgagaagatgctatggtgtatgcgattccgttggcggtttttaaaccgctattggcttcaaacacagaggttttggattatttattggaaagttttgcctcggtgtctagtacgtccaaagatagtaaaaacacgatttcggatgccatttcgatgacagaaaatgggtcggaaattcagtattttcaggcattaaactattccaaaacaaccttgcaggtggtagtagagcaaacgatacatcaggtggcacagttgattagtgaaaaaaatactgattattcgcttgtaatagaaaataatttaccaattggtattgtaaccgatgaagattttcggtcgaaagttgcaacaggccgctaccctattttgtcctcaatagacaaaatcatgtcgtcgcccgtgataacggttaccgaaaacatttcgttgacagaggctcaattgttgatgctcaaaaacagtgttacccacttgtgtgttacagaagatgggagcgacaagtcggtggtaaagggaattattacacaaaatgatttaattgtagcacattctaacaatcctggggtgttgttgaaagaaataaagaaggcaaaaagtactaaagaattgaaaaatattcaggaaaaattgtatgaattgattcaaacttctatttcaaaaaacatacctatacaaagtattgccatgatagtgggcgaaatattttttgcgttaaataaaagggttattgagctggctattatggagttggggactcctccaactacttttgcatggtttagtatgggcagtcagggtcgaaaagaacaaattttgcaaacagatcaggatagttttttggtgtttgatgatgttgcggccgatatgtaccgcaatgtgaaagattattttttgaaattgtctaaaaaagtaaccacaacgctcgaaaaaatagggtatccgatgtgttccaatggtcatgtggccagcaattatatttggtgtaagtcgttgagcgactggactaaacagtttaacaattggattaatactccaggtgaaaacacagacgatgtatgtagtgttttttttgattttgaattgatttatggcgaagtaaaaatagaagaaaccttacagaatattgtgtttaaagaacgaaaatccaatcatttgttttatgattatttaggtaacgaagccataaaaaaaccagcccccttgaattttttcaaaaaatttaatttggaagaagaaggtgccgaaaaagggaaatttgatatcaaaacccgagggctactgccgctggtagatgcggcaaggttgtttgtattgagtcaaaacatcaaaggtaatggtcatacctactttaggttcaagcagttagcacatttgaatccgcagcatcaagctttatttttgaattgtgccgaggcctttatcacgctttctaaatttagaattttggatggattgaaaaatgatagccaggggcagtatatagatttagaagaattttcaaagttggataaagaaaaattaaaaaatgctttattaagtttgaaagatttagaagaaatcatcaaagaacaatttcaactaacccatttttcgtaattatgctagactggctcatcaatatcggaagcaattatccagatttttggaaaacatatacagaaaaatttcaaaccaaatccaaacagtttgttgttttgagtatagaaacctcgggtttgaatcctacagaggattacatcatgtctgttggggctattgttatcaaccaaaatgaaattttagtacggcaggtttttgattttaatttgaatgaattttcatacaatttagaagagcaattgaatgcaaaagaacaagaacttatcatcaattttattgattttataggtaatgctacacttataggccatagaattcattttgatattgcgatattaaatgaatatctcaaaaaaatgcaatgtggccgactgaaaaatgaggcattggatgtagaagtgatgtataaaaaatggaaagatactaatgaaaaaacttttacagtagaagaattattacaagaatttaagattgaaaaaagcgaaagaaatacggcttcagaggacgcattgtctctcgctttgttgtttttgaaattaaaatcaaaactgaatatgccttagattttgccataatacatggcttttacaatgccgtctgaaagtccaattttgggtacataaatgttttgtgctttgctccatttcatggcattcaaatacaatttcatggcaggaatgataacgtctgctctatcaggattgaggcccaactctgcaatacgttgttcataagtcaaattgttgagcattgtaaattgagcatttaagtaaatataggttaaaggtttttcttgtgatttacccgacattttaaataatttgttaatatttccaccagaacctatcaaggaaatactatcataaccagatgtattgcttacaatccatttttcaatttctttccaaacgatatcgcttacgacttcgttgagcaatcgaaccgtacccgctttaaaggatttagaagcaataattttgccgtcggaaaacaacgaaaactctgtactaccaccaccaacatctacatacaaatatgttttttctgtttttaataagaaatgcaaatcggttgatgcgatgatggccgcttcttttttgccatcaatgatgtcgatgtcaatttcggcttctcttttgataatgtccacaacctctttgccattataagcctctctcatggccgaagtggcacaggccaaataacgttctaccttatgaactttcatcaacaatttaaaagctttcatggcatcgaccattctttcaatattttcggaagttatttctcctaccgtaaaggcatcctgacctaaacgaataggtactctaaccaacgaacttttgttaaactgggtttgtttgcctttgtattcgataatattagtaatgagcaaccgcatggcattagaaccaatatctattgcggcatatttttttatgtttatatgttctgttgtactcatttaatttttttttgataaaatctataagattctaattgagccctaaatacaggttcgttgtcttttcttatacggtatttattatctaaattttcagaatgaagccttacttttacatttcctttccaacccaaatcaaaactatcaatcaaatcctgtttgattttggggtcgtatattgggcaagttacttcgaccctaccatctaaatttcgggccataaaatcggccgacgaaataaatacatcaggttttccgccgtttccaaaaataaataaccgtgtgtgttccaagtagttatctactatactaatggcttcaatattgtcgctcaagccttttttgccaggaatcaaagagcaaattcctcttacaattaactgaattttgacccctgccctactggcttcatacaatttgtctatcatttgaaaatctgacaaactattcatttttagttttataaaagtaggaataccggcaagtgctaatttgatttctttatctatcaatttaaccaattttgagcgggtataatgtggcgaaactattaagtgttggtagcggtgtattctaaaatttacttcaaaaaaatcaaaaacttttgaaatatctttaagaatttgctgatgacttgttaataatgtaacgtcggtataaacttttgccgttgattcattaaaattgccagtagatacaaaaccgtatcgttttaatttgccttcttcaattctatcaattacacaaattttgctatgtactttaagcccttttaccccaaaaatcaattcaataccttcagtttgcatttgttctgcataagaaatattgctggcctcgtcaaaacgggcttgtaattcaatttgaaccactacttttttgccgtttttggcagcattgattaaggaactaataatttgagaatttttagacaatcgatataaagtaattttgatacttgttacttgagggtctagagcagcttctcgtaaaaatttaataatataagaaaatgtttgataaggtgcgtttacaagataatctttttctcctatttttttcattatattttcgtccaaactcaatccaggcactaataatggtggattcgttttatacaataaatccttacgacccaagtcgggaaaatccatataatctcttctattgtggtacctcccccctggaatgatactatccgaagcatctattcccattttttttaggaaaaactttaaggtatctttttcaatagattggtcatatataaaccgaacgggctccccaattcttctttctttgacactagtagctattttttcgagcatgcttttactcaaatcgctatctatttccaattgagcatcacgagtaattttgatcatgtgtgccgacacttgttcgtagtcaaaaatattaaagatgctttgaagatgcagcctaatcacatcgtcaatcatgataatatattgcttttcatgaatagaaggcaataccacaaaacgattgatggattttggtatttcaattacagcatatctgatttcgggttttaacaaaggcaaatttaaaagtttagattttactttgcttttcatggttaattttacagccaaatagccaaaagtatcttttagcagcggaaattctgccaaatcatttagaataatagttactaaagcaggagccactttttgaacaaaaaaatctttaatataggttttatgttcgtctaaaatttcactttcgttaataataaaaatgttttgttcttctaattttttttcgataatacccaaaattctcaagctttcagactgttgtttgatggctatttcggtaatatctttaatcaattgttttgcagtaatggtaccaatcattttgttttgcgatgctttattaagcgtcaatcttcgaatggctgcaaatcgaactctaaaaaattcatctaaat

SEQ ID NO: 3109 - DNA, 24413 bp, synthetic construct
  source 1..24413: mol_type = other DNA
  misc_feature 1..24413: note = Synthetic
  variation 14471..16665: note = note, n is a, c, g, or t
aaaagagaagatttgtatgcggccatcgatgctttggaaaaagaagcctatgaaatctcagaaaaagtcttaaacgacattttaccggaagcttttgccgtggtaaaagaaaccgcccgtcgttttaaagaaaacagccagattacggttacggctacccctaaagatcgcgaattatccgctactaaatcctatatcaccatcgacggagacaacgcggtttgggccaactcctgggatgctgccggaaaagccatcacttgggacatgattcactacgacgttcagttaattggtggtattgtgcttcatcagggaaaaattgctgagatgcaaaccggggaaggtaaaaccttagtagccactttacctctatacttaaacgcattaaccggaaacggagtacacctggtaaccgtgaacgattaccttgccaagcgtgacagtacctggaaagcgcctttattcgaattccacggattaaccgtagactgtatcgacaaccaccagccgaatactttagcccgtcgcaaagcttacgaagcagacatcacttatggaaccaacaacgaattcggtttcgactacctgcgcgataacatggcacacacgccaggcgaattggtgcaaagaaaacacaactacgccatcgtcgacgaggtggattccgtattgattgacgatgcccgtacgccgttaatcatctccggaccggttcctcagggcgaccgtcacgaattcaccgaattaaaaccgaaaatcgaaaacttatacaatcttcagcgtcagttggccaacggtttcttaaccgaggcgaaacgtttaatccgcgaaggcaacaccaaagacggaggtttccaattgcttagagcttaccgtgctttaccaaaaaacaaagcattgattaaattcctgtctgaagaaggcgtgaaacaaatccttcagaaaacagaaaacgaatacatgcaggataacaaccgcaaaatgccgcaggttgacgaagccttgtatttcgtaatcgaagagaaaaacaatcaggtggaattaaccgataacggtatcaagttcttatctcaggatacttccgatgatttcttcatcttaccggatatcggaacggaaatcgccaacatcgaaaaacaaaacctttccaaagaacaggaagccgaagccaaagaagctttattccaggatttcggggtgaaaagcgaacgtatccacactttaacacagcttttgaaagcgtataccctattcgaaaaagatacggaatacgtaatcatggacaacaaaattttaatcgtagacgagcaaaccggacgtatcatggacggacgccgttattccgacggattacaccaggcgattgaggcaaaagaaaacgtaaaaatcgaagcagctacgcaaacttttgctacgattactcttcagaactacttccgtatgtacaacaaattaggaggtatgacgggtaccgcagttacggaagccggcgagttctgggaaatctacaaattggatgtagtggaaattccgaccaaccgaggcattgcccgtaaagataaagaagatttaatctaccgtaccgttcgtgagaaattcaacgcggtggcggatgatgtgcagcaattggtagcagaaggccgtccggtgttaatcggtacaacttcggttgaaatttccgaattgttgagccgtatgcttaaaatgaaaggcatccagcacaacgtattgaacgcgaaattacacaaacaggaagcgcaaatcgttgcggaagccggtaaaccgggcgtggtaaccatcgctacgaacatggccggtcgtggtaccgacatcaaattgacggatgaagtaaaagctgccggcggtttagccatcatcggtacggagcgtcacgattcgcgtcgtgtagaccgtcagttgcgtggtcgtgcaggtcgtcagggagatccgggaagttcacagttttatgtgtctttggaagacaacctgatgcgtttgttcggttcggaaagagtagccaaaatcatggatcgtatgggaatcaaagaaggtgaagtaattcagcactcgatgatgaccaaatctatcgaaagagcacagaaaaaagtagaagaaaacaacttcggggttcgtaaacgtttgctggaatatgatgacgtaatgaacgcacaacgtgaagtggtttacaaacgccgtcgtcatgccttacacggagaacgtctgaaagtagacatcgccaacatgatgtacgatttggccgaactgattgccgaaaacaacaaagtcgctaaagatttcaaaaactttgagtttgagttaatccgtaattttgctatcgaatcaccgatttccgaaagcgattttaacaaactttccgaagtggaaattgccggcaaagtgtacaaagctgcgatggacacttacaacgcgaaacaggagcgcaatgctaaagaggcttatgcggtaatcaaaaacgtatacgaaaacaacaacggacagtacgagcgtatcgtagtgccttttacagatggcattaaaacgctgaatgtcgttacagatcttgaaaaagcgtatacttccgaaggaaaatcgttattggcggattttgaaaagaacatcactttggccattgtagacgaagcgtggaaaaaacacttacgcaaaatggacgagttaaaacaatccgttcagttggctgttcacgagcaaaaagatccgttgctgatttataaatttgaagcgttccacttgtttaaaaacatgctggacggcatcaacaaagaagtgatttcgttcctgttcaaaggtgatttaccttctcagaaccctaacaacattcaggaagctgaagaagttccggtacaggaagattatacgacttccaaagaagaagttttgaataccgacgaaatggcggccagaaaccgtgaagcgggacaaatgcaacagcaacaacaacaccatgtaacggaaactgtggttcgcgatgcgccaaaaatcaaccgtaatgacaatgttaccattaaacacgtaatgagcggaaaatcggaaaccatgaagtataaaaaagcagaatcgctactagcttcaggtgaatggattatcgtaaacgaataaacttatcttgtactcaaaataaaatccccaactgacaaccaattggggatttttgtatttttaacgaaaatcttttttatgaaactaaagtcagttctattttttctgttcctgttttcaattagtaaggcacaaacccttgatgagttaaaagtggaaaccaaaaaagtttatgatgccagctacaacatagattttgatgaaatattaaattactcctatcccaaattatttgaactagtcgatagaactcaaatgacacaagtattggaaagtaattttcaaaatcctgaattcagtgtcagttttgtgtatcctaatccggtatttacgtattcggaactgaaaaaaattaaccaacagactttttgtattgtccgctacaacggtgccatccgaatgaaatatgaaaaaccgctaaccgatcagcttgccaatggaatgcttaccacattcaagcaacacatgacgggcaaaaaggttactttcgaaaaagagcgcaacagttttctgattgaaggagaaagtgttatgattgccatttccgataacgtaacgcaaaacaaatggcgttttataaattatgatgcgggtcagcttgacttcatcgacaaaatgctcaccgaaaccgtccgaaaacaacttggactataacaaccgtttcttttcgaagcttccaaagcaacagattataacacaatgacgaacactatcgtattttcttctttttttaacgccgtacactccagtattgccgatggtacttttgctaaactgacctttaccaaaactatcggaaaaccggaattgctgaacatttacgtaaaaaccgctgtggaaaacggcactttaaaactgtcggtcattcataaaatttacaacgaaggattgcaggagattgagaaaattatcgaactggacgatctggaatccgaattgacgccttacatcaacaatccgtttatgtgggttttattgtttactacggaagccgatatcacaatgaagctaaataaaaaacgcattgctaacattagcgaacaaccgcctacgtttaaaaatccggatgctgctttaactgtgtttaagaacaaataaaaaaggatgtgagtacttcacatccttttttattgactttatagtgcatccggaaaaatcttgcccggatttaaaatattgttcggatcgaagacctttttgatgctcttcatcagctgcaattgactgttgttgaaggcgatgtccatgaaatttttctgcacataccctattccgtgttccccggataaggttccttttagggaaacggtcagttcgaagatttcgcggatgcctttaggaacttgcgttttccagttatcgtcggtcatatcggctttgatgatgtttacgtgcaggttgccgtctcccgcgtgcccgtaacacacggatttgaaaccgtatttgtcaccaatcgtcttaatcccttttaataaggttggcaattcataacgcggtaccacagtatcttcttctttatacacagaattcgattttacggcttccgccacaccgcgacgcatgcgccataaggcatttttctggtcttcggtatcggcaaaaaggatttcatcaatttcgaactgttcgactactcccattattttttcggcttcgagcattaaaacatcggggtaattaccgtctacttcaattaataaatgggccttaatttcgtctttaatagctatgttaacgccttcaatgtatttgatggcccagtcgatggcatcgcgttccatgaattccagagcgcttgggactacacctgccctgaagatggcggaaacggcttcgcaggcctgttcggctttgtaaaacggcaccagcattaagacattgtgcgcatttttcggcaagagttttaaaacgattttggtgatgatgcccaaagtcccttcactgcctaccattaactgtgtcaggttgtaccctgttgagtttttcaaggtgttggcaccggtccagatgatttctccggttggcaatactacttccagattcaggacgtaatctttggtcacgccatattttacagctcttgctccaccggcattttcagcaacattaccaccgatgaaacaactgccgcgactgcttggatctaccgggtaaaacaggcctttctctaaaagggtttcctgtaaaacctgtgtgattacagccggttcggttactacctgaagatttctttcgtcaatttcaaggatgctattcagacggtctgttgacaaaccaatgccctgataaatgctcaacgcaccgccgcttaaaccggttcttccgccaatgggtacaacaggaattttgtattcgttcgccagtttcacaatctgcgaaatctcttgtgcagatgccggtttcacaacaacacttggcggaaacacataatcttctgtttcgtcgtgaccgtagtggttgcgggtttcttcgtctgtaaacacgaacgatgcgcctacgatggtttccagtttttgcagtatttcgggtgttagtggcatgacatgctatttttaaacaaatttaataaactaaacgggatgacggaatcaaatgtttataaagatgctgttttctagggctgaggaaagtattaatggtattgagcatggtgtatttgtataactgaaattttgcaggcttgaacattaagttttatacgacatatacacgacatatacacgacatatacacgacatatatacgacatatatacgacatatatacgacatatatacgacatatatacgacatatatacgctatatatggattaagtatgaattggaaaggattaactgtgtttttgtgctttggtttagataatgttttaaggcagttttattagatttgttttgacgttgaatgcacacacagattagaccggtgctttaaccgaactgggtgtactgcttatctacggtgaaacctctgaaattatgaaagggaatatttccagaattattattgaacaaaaaaattacaaaaaagctattaacctatttgccgtctgaaactaaaatgaagctgactgatttagaaattaaacacatccaaaatgatccgaaaaggcctacccttatttttttgcacgattcgttgggaagtattgctctgtggcgcgatttccccgaaaaattagcggcccttacccaatgtaatcttcttatttacgaccgtttgggctacggacaatcgcaaccgatgccgacacacgtaagaaacaatgattatgtggaactggaagcggatgtgctaaaccggattataaccgaatatgcgttaagcaatgtcatcctgttcggacacagtgacggtggttccattgcgcttattgcggccagcaaatatccctcaaaaattaaggcgattatcgtggaagcggcgcatatttttgtggaagacattaccctgaaaggaatctgtgaagcagctgaagcctacgccacaactgatttgcccgaacgtttggccaaataccacggcactaaaacggataccatggtaaaagcctggaccgaaacctggcgcagtcctgcattccgaaactggaatatcgaacatttcctgaaaagcattacggctcctctgcttttcattcagggtgaaaacgacgaatacggcacattgaatcaggtgaaaaaaaccatttcacaggtaagcggaagcgctgaaaaagcagttattccgactgtcggacataccccacacaaagagcagccggacgtagttttgaaaatcgccgcaactttcatcaacaggctgattcgttaaaacggtcgctaatttgtcttgcgaaagacagggtaaattgccgaaaaatcactaaatttaaggattgtataaaggcttcttttgctaaatggatgaattgagcagccttacggttttaaattacccttatctgcaggctgatggtctttaaaaaaggcaacccaacgacaggaaaagacgtacgacaagcaccgctgccatgatcaatacagaccaaaatcacaaacacacctacgatgcgcagggccggatgacgtgttgcacgctggaagataaaatttacagtaaagcagaggaaaaagaacgccatcaccacgaccacgattacgaccacagccacggcggaagcagtctaatgaaactttttttgccgagtatcctttctgcggtgctattgctcgctaccatcagtttggaccattttctgaaacccggatggtttaccggttgggtaaaaattatcggatatgtagcagcttaccttcctgtcgggattcccgtacttaaagaagcgcttgaaagcattcgcaagggggaaatcttttcggaattctttttaatgggtatcgcgaccctcggagcttttgcccttggtgaatatcccgaaggtgtggccgttatgctgttttatgccgtgggcgaagtgtttcagaccctggccgtaaaaagagcaaaagccaacatcaaatccctgctcgaccaacggccggatgaagtaacggttttgcgcaacaagcaaccgcaaacggtaaaagcggaaaccgtagtcattggcgaaatcatacaactaaagcccggagagaaattgggactggacggggaactcttatcggaaacggcttcgtttaacaccgcagcgctcaccggcgaaagcaagcccgacaccaagacaaaaggtgaaacagttttggccggcatgattaacctcaacacggttgctcaggtaaaagttacaactgcctataccgacagtaagctgagtaaaatcttagagttggtacagaatgccacgtcccagaaagctccgacagagttgtttatccggaaatttgccaaaatctacaccccgattgtggtggctttggctgtgggcatttgttttctcccctacttttttacaaccgattatcagtttgccgattggttataccgggcgctcatttttctggtgatttcctgcccctgtgcgttggtgatttccattccgctggggtatttcggcggaattggtgcggcgagtaaaaacggaattttgtttaaaggcagtacctttttagacgtgctggcgactgttcagcatgtggtgatggacaaaacgggcaccctgaccgaaggcgtttttaaggtgcaggaagtggtgtttgacccggcctttatggaagttgaactgttgcaaatggttgatgcgctggaacgtcacagcagccatcctgttgctaccgccatccatgaatttgtcgggaataccggcaatacgattccgcttgaaaatgtggaagaaattgcagggcacggactgagaggcactgtaaacggaaaagaattgctggtcgggaatttcaaactgatggaacaattcggcattccgcaccaaaaagacctaaaggatatcgtttataccgttattgccgttgcctacgacagccaatttgtgggctaccttaccatatccgacactataaaaacagatgccaaacttaccattgatcgcttaaaatccctgcgggtaaaacccacgatgctgagtggcgacaaaaccacggtggttcaatttgtggcaaaaaccctggggattccaaatgcttttggcgactgtctgcccgaagacaaggtgaacaaagtgaaagaactaaaatcacgccgggaaagtgtggcctttgtgggcgatggtgtaaatgacgccccggcggtagccctgagcgatgtgggaattgcgatgggcggcttgggaagcgatgccactattgaaacggcagacgtggtcatacaggacgacaaaccaagtaaaattccgatggcgattaccatcagtaagcagactaagaaaattgtctggcaaaacatctccttagcctttgcggtaaaaggaattgtgctgcttttgggcgcaggcggattggcgaccatgtgggaagcggtttttgcagatgttggtgtggctttgctggcgattttaaacgctgtcagaatacaacgaatgcggttttaaagtgcgataacgataaaaagaagactatgaaaaaggtaattgcagccatcaatatgacgcttgacgggttttgcgaccataccgctgttatcccggacgaagaaatacatcagcattacgccgacctgttgcgaactgccgatatcgctttatacggcaggataacctaccagctgatggaattttggcgcaccctactggaaaatcccacaggcgataaaacaatggacgattttgccgaagccatggacaacactccaaaacttgttttttcccgcacactgaaaaccctggactggaaaagtgccaaattagccgaacaggatcttgaaaaagaggttctgacgctgaaacagcaatcaggcaaagatgtttttgtatgcagccccagcctgattgtagcgctgacgaaactccgtttaatcgacgaataccagctttgtgttcatcctgttatcgccggaagcggtttgccgttatttaaagacatccgcgaaaggattgtgcttaaactgattagaactaaaacgtttcgcagcggggcggttattctttattatgaaggggaaaggggtagttcttaatggttgcgcgttctcagaccggggggctttgattgaggttttgtttttgttgttcatttttttgtattgatgcttaagacgaatgatatttgttgtgttgcgcggtggctgaggccctcgaagccacttctactcatggcaaacttttttgaaaaatcactaaatttagtgattgtgtgggtggttttttatgggtatgtttgggaagtttataaataaaaaaagtcccaccgaagcaggactaaagattttcatctacggcatatagccttattgtgataagattaaagattagaataattttttcacatttcaaatgtaacgataaaaaggaaataaaaaaatatatggcacgaattttaggattggatttaggaacaaactcgattggatgggcaatcgttgataaaaatggaactgaattttcattagttgataaaggagttaggatattttctgaaggggtcaaatctgagaaaggcattgaaagctcacgtgctgctgaacgaaccaattatagaagcgctcgcaaaataaaatttagaagaaaacttcgaaagtatgagactttgaaagtgctttcacaaaatgggatgtgcccattatcagtagacgaagtaaatggatggcgtaaatctggcttcaaacaatatccattaaatccggagtttttaaaatggttgcgcactgatgataaccaaaacatcaatccttatatttttagagatagagcaagtagacagaaagtttcattgtatgagcttggcagagctttgtatcatattgcgcaacgaagaggctttttaagtaatagattagatcaatcggctgatggaattattgagcaacacgcacccaatattgaaagtagaattgaagaggctcaaactgttaatgatttaatggttgaaattgaagattattttgacggattagatatacttgaaaagaattcaaaagatttagatgaaggagaaaagaaactcaaatctttatataatgctcttgaaaagataattaagtctaatgattttgaaaaagcaaaagcagaagttattgccagactaaatagaaaagaagatcagggagcagtaaaacaagagattggagaaatatcaaaagccatgaaagatggaaattttggtactttaggtcaatacttctatagcttatacagtaaaggtaaaataagaaatcattatactgcaagggaagaacattatttagccgaatttgaaataatttgcaaagcacaaggaataacagaaattaatgaaaatgaaaaattaccagaaaaaagatatagcggtttagcaaaagaattatatcgagcaatattttttcaacgtcccttaaaatcacaaaaaggactaattggtaaatgttcctttgaaaaaaataaaacacgttgtgcaatctcacatcctgattttgaggaatacagaatgtggagttatttaaacactataaaaataaaaacaccagaagatgaaaaattacgctttctaactttagctgaaaagcaaagactaattcctaaatttttaagaaagaaagacaatttcaatttcgaagatttggctaaagaactcattgttaaaggaacaacattcgaattttataagtcttctaatgctaaatcagcacattatttatttaactataaaccgaaagatactgttccgggcagtgttgtttcagcttcactaaaaaatatttttggtgacgattggaatactaaacaatggaactatcaaactcaaaactcaaaaggtgaaacggttacaagaactgtttactacaaagatatttggcatttgttatctgtttctacttccgatatttatttagaggaatatgcaaaaaacaaacttggcttagatgaaaaacgagctaaatcattcagtaaaatcagattaaaaaaagattttgccagtttaagtttgaacgcaattgctaaaataacaccttatttaaagcaaggtttattgtattctcatgccgtttttatggctaatattgaaaatattgtagatgaacacatttggaacaatcctaaagaacgcttgtacatccaaaataaaatagctgagattattgatgataacactcttgaaaacagtaaattagaaatcataaacggtttaatcaaagaatgtaaagccgataactgttattattcaaaagaagctgaacatacctataaaaatgatttacaaaaaaaggtcgctactatttttagaaacaatgaagaccaagatgatattgtagaggaattgtttccgattttcattatacaattacaaaaacatgaatatatccctattaaaagattagatgaaaaagtaattgaattcttgaaaggagaaaacgaagatggcgaaatctattgtagcaatcaaaatcgtttgcataaactatatcacccatcagatatagaagtttttaaaaagaaaatcataaaagatgaatttggaaatgaaaaagtggttttaggtagccctttgatttcatccatcaaaaatcctatggctatgcgcgctttgcatcaattgcgaaaagtgttgaatacattaatattagaaggtttagttgatgagaagaccaaagtacatatagaattagcgcgtgagttaaacgatgccaacaagcgaaaagcaatacaggattttcaaaaagaaaatcaaaataaaagacaggatcttgctaaacaaataaaagaagattataaagcccaaacaggtaaagatatcgaaccaacagaggatgatattttgagataccaattatgggtggagcaaaatggaatggaaatatacgaaccaacattaaatggtggggtaagtaaaaaaattggaattcatcaaattattggcgaaaaccctgattacgatattgaacacaccataccgagaagcatttcgcaagataattcattgatgaataaaacactttgcagcaaacgatttaacagagacattaaaaaaaatcaaatgcctatagagttaaataattatgaattgttactaccttatattgaccactggcgtaaagaagcagacaaactaacttgggaaatagaacaaatcataaaatcaacgaaagccgctgctactaaggaagctaaagacaaaaaaatacgaagaagacattatttaaccttaaaacgtgattatttaaaaggtaagtatgaacgttttgtttggaaagaggctaaagttggatttaagaatagtcagattccagataccggaatcatcaccaaatattctcgtgcttatttgaattcttactttaacagagtagaaagtgttaagggtggaatggttgccgaatttagaaaaatctgggggctacagccaagttttatcaaagacggtaaaaaatattatgaggaaaaagatcgaagcaaacatactcatcataccattgacgctataaccatagcctgtatgactaaggacaaatatgatgtgttagcaaacgcctggacaaaagaagataatgaaaacggtaatgaagcaagaaaacttttatccgaatcaaaaccttggccaacctttacagaagatttacaaaaaatagaaggagaaattttggtttctcatcatacacctgataatgtaaaaaaacaatccaaaaagattgttcgagttagaggtaaaaaacaatacattgctgaaatcgaaagggatataaacggtaaagctgttgccaaaaaagacggtaatggaaaaatcatctataaattagattgtaatggcaagaagttgccaagaatccaacaaggtgatactattcgtggttctttacaccaagacagtatttatggagctattaaaaatccattaaatacaacggaaatacgttatgtaattcgtaaagatttagaaagtttaaaagctaatgatattgaaaatattgttgatgaaatcgttaaagaaaaagtaaaacaagctattgctaacaaagtgttattactgtcatccaatacgcaacaaaaaaacaaaatgtcaggtacagtttggatgaacgaagaaaaacaaattcctattaataaggtgaggatatatgccaattctgtaaaaaatcctttggagattaaagaacatagtttgctttcaaaatctaagcacgaacataagcaaaaagtgtatggggttaatggtgaaaattatgctatggctatttatgaaggtcaggataaaaaaggtaatttaaaaagaggatttgaattgttaaactatatggatgcaggtaactattataaattaagtaatgattctaaaaatcataatacaattgtgccagccattcatttaaagttagatttaccgttaaaatatataattaagaagggtgatttagtcctgttttacgaggaaagtagagaagaattaagtgaagtaggtgataaagaatttatgaaaagattatataaagttatcggatttgagggagatggaagaattcaattcagacatcataaaacggcaatgcagcaaagtagtgcaaataaagaagaattgactattgtcaaattcatggctgataataatttgaaaaattctcaagtagattttgatactccagtgccatggttaaggttgagagtgtcaaattgtgattttttattgaatgataaagaattcaagattaatccgttaggtaaagttgcaattttataaaataaattaaaagttcattgacataaagtttcaaattcttaaacagctcaaaccacannnnnnnnnnnnnnnnnnnnnnnnnnnnnnnnnnnnnnnnnnnnnnnnnnnnnnnnnnnnnnnnnnnnnnnnnnnnnnnnnnnnnnnnnnnnnnnnnnnnnnnnnnnnnnnnnnnnnnnnnnnnnnnnnnnnnnnnnnnnnnnnnnnnnnnnnnnnnnnnnnnnnnnnnnnnnnnnnnnnnnnnnnnnnnnnnnnnnnnnnnnnnnnnnnnnnnnnnnnnnnnnnnnnnnnnnnnnnnnnnnnnnnnnnnnnnnnnnnnnnnnnnnnnnnnnnnnnnnnnnnnnnnnnnnnnnnnnnnnnnnnnnnnnnnnnnnnnnnnnnnnnnnnnnnnnnnnnnnnnnnnnnnnnnnnnnnnnnnnnnnnnnnnnnnnnnnnnnnnnnnnnnnnnnnnnnnnnnnnnnnnnnnnnnnnnnnnnnnnnnnnnnnnnnnnnnnnnnnnnnnnnnnnnnnnnnnnnnnnnnnnnnnnnnnnnnnnnnnnnnnnnnnnnnnnnnnnnnnnnnnnnnnnnnnnnnnnnnnnnnnnnnnnnnnnnnnnnnnnnnnnnnnnnnnnnnnnnnnnnnnnnnnnnnnnnnnnnnnnnnnnnnnnnnnnnnnnnnnnnnnnnnnnnnnnnnnnnnnnnnnnnnnnnnnnnnnnnnnnnnnnnnnnnnnnnnnnnnnnnnnnnnnnnnnnnnnnnnnnnnnnnnnnnnnnnnnnnnnnnnnnnnnnnnnnnnnnnnnnnnnnnnnnnnnnnnnnnnnnnnnnnnnnnnnnnnnnnnnnnnnnnnnnnnnnnnnnnnnnnnnnnnnnnnnnnnnnnnnnnnnnnnnnnnnnnnnnnnnnnnnnnnnnnnnnnnnnnnnnnnnnnnnnnnnnnnnnnnnnnnnnnnnnnnnnnnnnnnnnnnnnnnnnnnnnnnnnnnnnnnnnnnnnnnnnnnnnnnnnnnnnnnnnnnnnnnnnnnnnnnnnnnnnnnnnnnnnnnnnnnnnnnnnnnnnnnnnnnnnnnnnnnnnnnnnnnnnnnnnnnnnnnnnnnnnnnnnnnnnnnnnnnnnnnnnnnnnnnnnnnnnnnnnnnnnnnnnnnnnnnnnnnnnnnnnnnnnnnnnnnnnnnnnnnnnnnnnnnnnnnnnnnnnnnnnnnnnnnnnnnnnnnnnnnnnnnnnnnnnnnnnnnnnnnnnnnnnnnnnnnnnnnnnnnnnnnnnnnnnnnnnnnnnnnnnnnnnnnnnnnnnnnnnnnnnnnnnnnnnnnnnnnnnnnnnnnnnnnnnnnnnnnnnnnnnnnnnnnnnnnnnnnnnnnnnnnnnnnnnnnnnnnnnnnnnnnnnnnnnnnnnnnnnnnnnnnnnnnnnnnnnnnnnnnnnnnnnnnnnnnnnnnnnnnnnnnnnnnnnnnnnnnnnnnnnnnnnnnnnnnnnnnnnnnnnnnnnnnnnnnnnnnnnnnnnnnnnnnnnnnnnnnnnnnnnnnnnnnnnnnnnnnnnnnnnnnnnnnnnnnnnnnnnnnnnnnnnnnnnnnnnnnnnnnnnnnnnnnnnnnnnnnnnnnnnnnnnnnnnnnnnnnnnnnnnnnnnnnnnnnnnnnnnnnnnnnnnnnnnnnnnnnnnnnnnnnnnnnnnnnnnnnnnnnnnnnnnnnnnnnnnnnnnnnnnnnnnnnnnnnnnnnnnnnnnnnnnnnnnnnnnnnnnnnnnnnnnnnnnnnnnnnnnnnnnnnnnnnnnnnnnnnnnnnnnnnnnnnnnnnnnnnnnnnnnnnnnnnnnnnnnnnnnnnnnnnnnnnnnnnnnnnnnnnnnnnnnnnnnnnnnnnnnnnnnnnnnnnnnnnnnnnnnnnnnnnnnnnnnnnnnnnnnnnnnnnnnnnnnnnnnnnnnnnnnnnnnnnnnnnnnnnnnnnnnnnnnnnnnnnnnnnnnnnnnnnnnnnnnnnnnnnnnnnnnnnnnnnnnnnnnnnnnnnnnnnnnnnnnnnnnnnnnnnnnnnnnnnnnnnnnnnnnnnnnnnnnnnnnnnnnnnnnnnnnnnnnnnnnnnnnnnnnnnnnnnnnnnnnnnnnnnnnnnnnnnnnnnnnnnnnnnnnnnnnnnnnnnnnnnnnnnnnnnnnnnnnnnnnnnnnnnnnnnnnnnnnnnnnnnnnnnnnnnnnnnnnnnnnnnnnnnnnnnnnnnnnnnnnnnnnnnnnnnnnnnnnnnnnnnnnnnnnnnnnnnnnnnnnnnnnnnnnnnnnnnnnnnnnnnnnnnnnnnnnnnnntcaagaaattaaataaaaatatcgtgaaaaaaaatgcttcttttttgcagtgataaggcaagattgaagcatttttttatttataagactaaaaaagctcaagttgtgtgggctgcagttctttaggcacttccgattttccccaaaaattctggatattcccaaattgcttgtcggttattcttaaaatgctcacttttcctaacggcggcaataatttctgtactcttttctcatgaacgtctgcactttcactactggcacaatgtcgcatatacaccgaatactgcatcatattaaaaccgtcttttaaaagctggttccgaaaaccggaagcatttttccggtctttcttggtttcggtgggtaaatcaaaaaacacaaatagccacataatgcgataaccgtttaaatccataattgtgggtatttaattttttttcgctccccagtataacattgctgtaaggaacttgccgttttttgcagtgctaccattaaaggactcttttcgtctttaaaataaactgttcgggttaaggtttgtaaaagttctgccttaatcgctgttttcagttcctgttcttcataatgctgcactaactcataaaccttttcatccacaatgggccgaaaaggctccatgatatcgtctgccaaagcaaacgcattgtacttgctcttatggtgaatccctaacgtatttaataaaccacttccggacaaagcccttgctgttgccgctctcaataaagcatagccgtaatttaaaaagttattcggatagtcgccaaaacgctcccttttgaagtttgccgtatgaaactctttccagtacaggttagccgcaacagcttccatattcgaggtatcgccacttaaaactttcgaggccaggaaatcaaatttatttttctttccggtaatttttgccaataatatcccctgattattgattttctctacaatggtttgttgccaaagcttcttttttaaaggttcggaagcattaatctgttctttaaaaatctcctgttgaatgtggtggctgtttaggttaagaaacattccgtttggcaaatgattggttccgcagacaattaccgaggtgttgttctccaagagtaaattcattgccggaatactcaaataaatttcaggattatcaagaacaataaatcctacatcctcaaccggaatgctgctttccctactctccgatttcagtattaactgaagattcttagtggttattgaggttttactttctattaataaagttcgctttatcataagagtaaattattttttacaacaatttactataaataaaattttatttgtttttttatcgccaaaaggaaattatagtctatatattacaattttggcgatacccccaacctaaaaacacagaaccattaagaaaatttcaagggtttacgttaagaagtagtagctgtctgaccgaagggagttcggataatttagaaacctttggaatttttaggtggcgtgtttcagtcttgaaacctttaggttcacgaaatccataggcaaaataacacttgagtattttttgtttcctttaactcattagttaatattttgttttggcattcgttgaatcggagatttgtatcaagacaaaagaaaagaagttgttcaattcaaaacaacacaatcgggacttttacaggctcagcctccgattaactaaaaatcagcccccaattaactaaaaaaagttctaaacccctttcaaaacccaccaccaaaacaccagcgtcaaaaaagacataggaatcccgaaaccaatcatcatgttggccagcttgggttttaaaccgtaattgacggcgacgatggctccggtaatcatgggtgccatggcggcttccagtacggaaacctgtacctcctgcccttttccgtttaaaatcatcacgtataaaagatagaagaaagccggagtgatgaggagtttaaaaaacagccctaaagtcaggaatttccagtgtttgcttttccagtcgaattcgagttgcatgcccacggctactaacgctatgggtgttacggttgttcccagacgctggaataccgattggagcatttcggggaaatcaagctgcatgacattgagtaaaacggccactataaacgcgatgaaaggtggaaacaacaaaatctttttaaaaaccgtagttgtggaattttcggtacttcgggaatacagcgaagcaattaaaatcgctaccgtggaaaccaccacgaacgaacccggctgatctacaataacggcggtttccagagcctttttcccgtaaaccgcttcgacaaccggaaagcctacaaacgaggtattgcccaatccggctactattatcaaacaacccgttagttttttagaccaaccaaacacttttgaaaacgccgtaaaaaacaaaaacgacaacccaaaacccagccatgcaatgcccaacggaaacagcagtcttgaactgatttccagtttcgggatataatacagcgccacggcaggaagcgaaatgtaaatcacgaactggttgagcgttttgtaacttaacggaggaaaagccgccattcttttgagcagaaaacccaaaagcatgcagacaaaaatgagtataatgttatccataacaaacgttgacgggcaaaggtattactaatttgaaatctatttactacttttaccaaaagctttgttttgaactcttcgcataaaaaatcggccttaaaggaaaatgacggtattgaacaaccggacagcattagcgcttcttccgtggaacaaatccagaagttccgaagaaagcaacctactgccgaagaactgattgccaacatcctgaaaggcgacaaaaccgccttaagccgcgccatcaccttagtggaaagcaccagcgaaaagcatctggaaaaagccaacgacatcattaaaggctgtttgccttatgcgaaccaatcgattcggattgggattacgggcgttccgggtgtgggaaaatcgacgtttattgaggctttcggaaaatatctgacttcgattggaaagaaagtagccgttttggcggtggacccgagcagttccatttcgcacggcagtattttaggcgataaaacccgcatggaagaactggtgaaagacgaaaatgcgtacatccgaccgagtgcttccggggaaagtctgggcggtgtggcgcgaaaaacaagggaaaccattattttatgtgaagcctgtggttttgataccattctgattgaaaccgtgggtgtcggtcaaagtgaaaccgcagtacacagtatggtcgatttctttctgctgctgaatttagccggtgccggtgatgaattgcagggcatcaaacgcgggattatggaaatggcggatttaatcgtaatcaacaaagcggacggcgacaacgtaaaacgcgcccgattagccaaaaccgaatacaaccgtgctttacatctgttcccgataaaaaactcgggctggtcaccaaaagtaaccacctgtagcgcgcttcacaacgaaggaattgcagaagtttgggaaacgattaccgagtatttcaacctgacaaaagaaaatcattacttcgaacaaaaacgcaaggagcaaaaccaatattggctcattgaaaccatcaacgaacagttaaaacagcatttctacaaccatccggaagtacaaaaattactggaggaaaacaaaaaagcggtgcaaaacaatgagatctcaccgtttgccgccgctcagttgcttttgaacatgtatcataaatagacagcactgcaaactgcgactgtccaatgaacaatgaacactgcttaagcttcgtagcgctccatttcacgatcgtaaaactctcctgccaaggtaattaaatgttccatttcggattccatttcgtgttcgtcttcttcgtcaatgtcttctaaaaattccactgaatcgtctttcagattgattaaaaaacgcgggaattctaagtgaatgatgaaaatatcgtccgggaaatcagtgttgtctgctaatacgaatttcggtaattccataaaggttatgaattataaattatgagttatacgtttaaaaaaaactaaattccaaatctttaatgtcaaatctatttttaacaatataaggtcattaaagaaaatctttcaatctttcaatctttcaatctttcaattatcaatttattacttaaatgattaaagcgaagatacaaaaataaggcggctgcggttaatccggacaataatccaatccagatgccgatggctttcaaatcggtgtacaatcctaaataaatcgaaattgggaaaccgattaaccaatacgcaatgaaagtaatgtacatcgggattttcacatcctgcaatccgcgtaaggcacctaaaaccaccacctgaatcccgtcggaaatctggaaaatggcagcgatgatgattaaatgggcggcgatggaaatcacctcagaactgtctgccaactgcgcaacgttttcggcattcataaacaattccggcaaatacggatgcagcaccacgaaaatgaaggcgaaaatcccctgaatgataattgctaacaggaacaacgaacgggcaacggttcgcaggagtttaaaatcctgagcacctttgtaattgccgactctcaccatagctgcaacgcccaaaccggaaacaaacataaacgtaaaagttgccagactcagggctatctgattggctgcctgtgcagtggttccgattcttccggaaagccagatggctccggtgaacaacgccacttcaaaaaacatctgcatcgaggaaggcaagcctaaatttacaattttttttacgatatctttttgcagttctctgaatgaaaatccctcaaaatacgttttaaaacgctctttgtgaatcagggaataatggatgtaaatcaacatgacaaaacgggaaattaccgttccgtaggccgcgcccaacatacccagcttcggaaagaaccacaaaccgtaaatcaaaaccacgttcaggaaaaagtgtaccacgttgcacagtaaattcgcccacatcgccactttggtttccgattttccgtcggcaaactgtttgtaaccctgaaagataatcagcggaattagtgaaaacgccacgatatccaaaaacggtttggctaaagtaaccacgtcttccggttgccccatcagactaatcaggggctttgaaaaatagataatcagaaacagactgatacccaaaatggtacacaaaatcaggccgtgatggaaaatggtacgttctttatccacatttttctcgccgtctgcttctgctaccaaaggagtaatcgccgtagaaaaacctaatccgatcgacatcgcgataaacacaaaactgttggccagtgaagccgctgccagctcggttggccctaatttccctaccatgacgttatcgatgatgctcactaaggtgtgcccgagcattcccagaataatcggataagcgagtttcaggtttgcggaaaattcttttgtatagtcagaccaacgcatttttctaaattttgggcaaaggtaagaagtagattttcggtaacgctacagatttctgaaaatttagccaaaacaataaaaaaccagcaaactactgaatatcaaatttttacatttctttattaagaaaccttatgaatttttaacagaagtttaagtttttcagacaaacgaaaatccggtaaacgcagtttttataccaactatccctaaaataccctatcatgagagtaaaacacaaatttttaaggacgttgttccttttcggaatcatctcggcttctgcgaccgctttggcacaggaaaccaaaccggaatatttacaccattggcgcgcaggatttggccttaacggaggaatccctttaaataacaactacaatttcagtttaggtgtcgatggccgtttacaatacgatttgacgatgaagacgtcattagcagccacaacgggttacacgcatttgttcagttcgggaagcgatgccggatttattcctgccaaactgggttttaagtcctttttaggcaatcagttttatgttttgggcgaagtcggtggtgcatttggcgttaccaaagaattggggaattcctttttatggacgccgggcattggtgtagcaaccaaacatatcgacattagcctgcgctatgaaaactacaacgattacgataccgggcaaatttcgctgcgattggcttacggttacaaattataaattttataaagccacaaatgcacgatttttaagtagttatacaattcgtgcattcgtggctatctctttatttgcttaacttttcccggtacaacgcaaaatccgcttttactttagcgtctagctccggttctttaatatcggtatacttctgcatttcttcccagatgattttggctaccatgtaccgtgccatatctttatcatcagagggaattacgtaccacggtgcgtgcggttttgaagttttgttgatcgcttcctcgtagtatttcatgtaatcgtcccaacggtcgcgttcttttaaatcgccgggtgagaatttccagtggtgttcttcctcttccaaacggcgtaataatcgtttccgttgttcttctttgctcatgtggaaataaaacttcaggacaatcgtgccgttttgtactatgtgtttctcgaaattgttaatttgctcgaaacggttttcccagaattcgggtgtaatgtcttccactttttcaatgccgggcaggttttcattcaaaatgtattccggatgcactcgggtaaccaacacattttcataatgcgtacgattgaacaccgcaaacttccctttttccggtaacaccagataatgccgccacaaataatcgtgctccagctcggtggaattgggcgttttaaaactgtgcaccactaccccgcgcggattgaattccttaaacacttcgcgaatcaggctgtcttttccggaagtgtccataccttgcagacaaatcagcacgccgtaacggttgtgggcatacatcacatcctgccattcgcttaatttcttctggactttatccagtttttcctctttttcctcgtcgtcgatatgcgtttgcagtaccgttggaaaatcgttaatctgaaaaggaatggtaattttaaaattatcgggactaaatagtgccataatcattcgctttatatacgtaaatataagtaattttaggagctttttcccgctttccgttacaatctttccttgcttaaagaaagcaagaaaaggattttcactgcaatcggggctaaaccaaaacacaacatcatgcacaaattcaccctggaaatcctgtttcaaatcatcggaatcggttcggcttccggacttatgtttaaaaacaatcaggtattggttgtaggcgacaacagcagttatttttacgaatacaatatcgcaaccaaaacgctggaacgccatccgctcacggaaaacccgtcggaaaacatcgccaaaaaagacaaacccgattttgaagcggttacggaatttgaaggcaaaatctacatttttggctccggttccacggaaaaacgcaccaaaatgatgcaattggatgccaaaaccaaaactgttgaagcaacaaccgatttaagtgatttgtatttatcgatgcaaacgttcgcc
